United States Patent Application Publication US 2007/0178451 A1 - sequence listing, part 2

SEQ ID NO: 4057 - DNA, 473 bp, Chlorella sorokiniana
  Clone ID: LIB3602-047-Q6-K1-D10
catcaccctcgaggtggagtcttcggacaccatcgagaatgtgaaggccaagatccaggacaaggagggcatccccgctgaccagcagcgcctgatcttcgccggcaagcagctggaggacggccgcaccctggcagactacaacatccagaaggagtcgacgctgcacctggtgctgcgcctgcgcggcggcatcattgagccgtccctgcagatcctggcccgcaagtacaaccaggacaagatgatctgccgcaagtgctacgcccgcctgcacccccgcgctgtgaactgccgcaagaagaagtgcggccacacctcgcagctgcgccccaagaagaaactcaagtaaactactcgcttcggcacgagcggaagcggcatgagcggcagcaaccgcttgcccccccccgccccgccagccgggatgccatgacagcaccgggtgctcagctgctgatgtgctgcatgtc

SEQ ID NO: 4058 - DNA, 65 bp, Chlorella sorokiniana; identical to SEQ ID NO: 672
  Clone ID: LIB3602-047-Q6-K1-D11

SEQ ID NO: 4059 - DNA, 319 bp, Chlorella sorokiniana
  Clone ID: LIB3602-047-Q6-K1-D12
gcaccctggaatgaacgatcgctgcgcttcccgctcccttaccgctgtcccgtgctctggtctccgtctccccctcacttccttcccctagtctcggctttccttttgctagggtgcaaccccccatgcacgccgccacatatgcttttccacccgaccatctctgtttatcatctaatccctggtcccctgttgctgtgcgctgctgcccaccccacactgtcccttgtttaggtcacttgttcctttctttcacaatctcgtagagtcgcgcatcctgtgcctggattctccctgggagctgtaacacaaccattgt

SEQ ID NO: 4060 - DNA, 494 bp, Chlorella sorokiniana
  Clone ID: LIB3602-047-Q6-K1-D2
gcgcagaaggctcggcccatcaccttacgggacagcaaaggcggacgagcaacatggggcggcggccggcgcggtgctaccgccagatcaagggcaagccctaccccaagtcgcgcttctgccgcggcgtgcccgaccccaagatccgcatttatgatgtgggcgccaagaaggcgggcgtggacttcttccctcactgcgtccacctggtcagctgggagaaggagaacatctcgtccgaggcgctggaggcggcccgcatcgcggccaacaagtacatggtgaagaacgcgggcaaggacgccttccacctgcgcgtccgtgtgcaccccttccacgtgctgcgcatcaacaagatgctttcgtgcgccggcgcagacaggctgcagacaggcatgcgcggtgcgttcggcaagccatttggtgtgtgcgcgcgcgtgggcatcggtcagatcctgctgtccatccgctgcaaggacacgcacgctgcggtg

SEQ ID NO: 4061 - DNA, 351 bp, Chlorella sorokiniana
  Clone ID: LIB3602-047-Q6-K1-D3
cgacgccacgcgcgcgcacagccgcaaggcggagcggccgcgcacccgcaccctcacctcggtgcacgaggcgtacctggacgacctggtctaccccaccgagatcgtcggcaagcgcatccgctaccggctggacggctccaaggtgctcaaggtgctgctggaccccaaggaccgcaactccgccgagtacaagaccgagacctttgcgagcgtgtacaagcggctgaccggccaggacgtggcctttgagttccccgtcagcgagcagtaagcggctcgaagcctttggcggcagcggttgtcagcccatgtcgccctgacgcgccgcgcagcagcggcggcgcacgc

SEQ ID NO: 4062 - DNA, 276 bp, Chlorella sorokiniana
  unsure (1)..(276): unsure at all n locations; Clone ID: LIB3602-047-Q6-K1-D4
ctgcgtcacttagcatttacgttaggccctgacagtgacttttagtttccaagaccactggtttggtgttcgtaggtttgtaggttttcacacaggctagacagcgttgcctctgccctgagcatgggcctctttgcactgccgcccatgctgtgcttcctgttcccctccttacttctgcctgcttgcaacccctgctctcctctcgctcccgctgccgctccttctccctgcttcacattgacagctgttgccgtgtaacagtggcncgacana

SEQ ID NO: 4063 - DNA, 487 bp, Chlorella sorokiniana
  Clone ID: LIB3602-047-Q6-K1-D5
ccccagccgaccgagtgaggctcacaggcagacatggtctggcggtggactctgatcaaggcgctgaggccctaccgacaggccgagttgaagtatttcaagcccaagccggatttctacccgctgctgactgtggtgggcgtggcggcttccactgtggtctactgctcctaccgagccctggcacacaaccccgacgtgcacctgagcaagatccacaagcacgacgagctgagcgagagcgcggagcacatggagcgcgccgaaaagtactggcacagcatcttccgcaaggcgtggcttagccgcgtgcacgacggggacgtggtggacgcccgcatgatgcgcgtctaggcagtcgagacgcgtctaggcctggaggcagccccccgcctctgtgccacaccatgccaatgttaattgaaccccgccaacatacagcaacttcgagcgagccactcacaacaagacggcagcagctggagcg

SEQ ID NO: 4064 - DNA, 470 bp, Chlorella sorokiniana
  Clone ID: LIB3602-047-Q6-K1-D6
ctccaaggtgctgatcaagttcctctcgctcatgatgaagcacggctacatcggcgagtttgagtttgtggacaaccaccgctcgggcaagattgtggtggagctgaacggccgcctgaacaagtgcggcgcgatctcgccccgctacgacattgcggccaaggacattgaggcgtgggtgggccgcctgctgccctcccgccagttcggccacatcatcctgaccacctcccagggcatcatggaccacgaggaggccaggcggaagaaggtgggaggcaaggtcctcggcttcttctactgagcggccttgttggatgcgccgcagcagccacggtggaccacagccgtggcggatgcagcacggccggcgcgcccggccgcggtgtttgctgcagcaccggcggcagccctgggtgctgcccccctcttagattgctgcaccgcacggttgtaacagaggttacatg

SEQ ID NO: 4065 - DNA, 488 bp, Chlorella sorokiniana
  Clone ID: LIB3602-047-Q6-K1-D8
ggcggcggcggcccgcgatcaggcaccgcacggcggcgccggcgtggaccggctggcggcggcccagcgcgaaatcatggagatgaaggatgagaaggccggccagcgcgacctgaccgcttccgatgacgagtggcagcacatgccggtgcagaagaagtggtttttggaattcaaaaatttcctgtactcgtggctgggcactggtgtggagcctctgtgagtgcctggtgggcaggcacggtacagcctgtagccccaaacctactcgagaaggtgtggctgtccacagcagcagctgatggctgcagctggcctgccagcctattgctccacacaatgctctctttcttcccatcatacatataaaccgcgcttgcgaccaacagcatgaatccccttctgttttgcaacccgaccctgtgcgcccctgcttggctggcaggagcggccccgcaacagacgccgcctgccgcaccgaatgacat

SEQ ID NO: 4066 - DNA, 489 bp, Chlorella sorokiniana
  Clone ID: LIB3602-047-Q6-K1-D9
cggtgtcccgctcctgcgtcacccagccatggcggcgatttccaagacccgcaaggccgtcgccgatggcgtcttctacgctgaactcaacgagctcctcatgcgggagctgggcggggagggctactctggtgttgaggtccgcgtcacccccatgcgcacggaggtcatcattcgtgccacgcgcacgcagaatgtgctgggcgtcaagggccgccgcattcgcgagttgaccagtgtggtgcagaagcgcttcaagttcccggagggctctgtggagctgtacgccgagaaggttgccaaccgtggcttgtgcgccgtggcacaggcggagtccatgcgctacaagctgctgggcggcttggctgtgcgccgtgcctgctatggcgtgctgcgcttcgtgatggagagcggcgccaagggctgcgaggtgattgtgtctggcaagctgcgtgcgcagcgcgccaagagcatgaagttcaaggatgg

SEQ ID NO: 4067 - DNA, 515 bp, Chlorella sorokiniana
  Clone ID: LIB3602-047-Q6-K1-E1
atccgggtcgacgccacgcgtgcggaggatctgggctccgccgccggcaccggcaagatcacccagtttgatggcctggtcgacttcttctccaccaagaacggcaccggcgctgtgtggcaggccattgagctgctgattgagagcggcgtggaccccgagctggtggccgcgctcaacgacaccgccaccgtcgccaccgtgtttgctcccctggacgacgccgtggaggcgttcctggccaacaacaccgaggcactcaacgacccggccggcctggccaagatcctgcgctaccacgtggtgcccggcaccaactacaagctggaccagctgaccgacggcctgtggctgcagaccctggtgcccggcgaggagggcaagctgctggtgcacaagggcgccaaccagaagaagcccaccctgatgaccacctctggccagaaggtgcagatctaccagttcaacctggagaccaagagcggcgcgcagctgttcaccgtcaaggacgtgct

SEQ ID NO: 4068 - DNA, 320 bp, Chlorella sorokiniana
  Clone ID: LIB3602-047-Q6-K1-E10
ggcggggtggtgtttgcatgggggtgcagtaatgtacacatgacaagacccttgaaaggaaaagggccaccttgtttgcagttggccccaccggttgtgggtggcattgcggaaggcggtgtggctttaaaagcggatccggtttttggttcgtttcggttggaaaaacttaattagcggttcggcttcaaggaaaagggcggttgcttattgcccttgttaaaaatttggcttgaaaggaatggttagtttttccccccttttttggccagggaaaacggaattcgttgggcctttgcagggcaatcaattaaaatttt

SEQ ID NO: 4069 - DNA, 489 bp, Chlorella sorokiniana
  unsure (1)..(489): unsure at all n locations; Clone ID: LIB3602-047-Q6-K1-E11
ggcgtgggcaagtcatgcctgctgctgcagttcacggacaagcggttccagccggtgcacgacctgaccatcggggtggagtttggcgcgcgcatgatctccattgatggcaagcagatcaagctgcagatttgggatacggcgggccaggagagcttccggtccatcacccgcagctactaccgcggcgcagcgggggcgctgctggtgtacgacatcacgcggcgcgagacgtttgagcacttggccagctggctggaggatncncnnnancacgccaaccccaacatgaccatcatgctcattggcaacaaggccgacctgagccaccggcgcgcggtgaccactgaggagggcgagcagtttgcaaaggagcacggccttgtgttcctggagaccagtgccaagacggcactgaatgtggaggaggcattcatcaacacggcacgagccatccacgccaaaattgcgagcggcgcattcgacgtg

SEQ ID NO: 4070 - DNA, 409 bp, Chlorella sorokiniana
  Clone ID: LIB3602-047-Q6-K1-E12
ttccaagtggtgacgcagtacggcgaccatgacgtgcctcacgtgctggaggcctgcgagcgcatggaggcccacctgactgccgcagtggtgtccaacgacgtgcgctttgtgcagcacatcctgggcagcacggtcaacggcaccacatacgcaggcatccgcgcccgcaccacaggtgccccgcaaaaccactggtttgggccggcaggcgacccgcgtgccgcaggcatcggcactccagaggccatccgcctggtgtggtccacccacagggaggtcatcctagactacggcccagtgccgcacggcctgcagctgacgcagagctgagcagcaggcagccgctgacgcagagctgacgcgacagccgctgacgcagaactgacgcgacagcaacagttgcggc

SEQ ID NO: 4071 - DNA, 493 bp, Chlorella sorokiniana
  Clone ID: LIB3602-047-Q6-K1-E2
ggagcccctcccgttgcacatttggctggagcgtggctgcgcagcgacatggcggcctccctgtgcagctccttcagcacgctgcggctgcagcccgcccagctgagcagcggctccgccatgcgcggccagcagcttgtggcagtgcggccgcagcgcagcgtggcagcagcggccttcgtggtggaggccaagcagaactcgctgaagcggcagcgcacggccgagacggcccgcatgtacaacaaggcccgcaagagcgaggtggccacccgcatgaagaaggtgctgactgctctggatgccttcaagtccgcccctcccgcggccgaggctgacctggcccccgtgcagaccctgatcaacgaggcgtaccaggtgattgacaaggcggtgagcaacggcgtgctgcacctgaacaccgcggcgcggcggaaggcccggctggcaaaggcccgccagaacgtgctgatcgcggccggcctgtacacgc

SEQ ID NO: 4072 - DNA, 481 bp, Chlorella sorokiniana
  Clone ID: LIB3602-047-Q6-K1-E3
attggcctgcccaacggccgcaacgtggtgcttccagtgtccgaggcgacttgcggcgcgcatgtgaccgcctacgtcgcgccaatgctgggatgctctcccgctgaagtgcgcctgtggcaccctggtggcaaagctatgctgggggaggctgaccaagccattcccggccaccgcttccttgccaagctgccaaacctgccagttgcaggcctgatggtccgcagctgtttgtcaagacgctgaccggcaagacggtgacagtgtgcttcagcccggacagcaggatagaggaggtgaagcaagctgtcttcgagcaggagggtgcccatgtggaccagcagcgcctgatctttgaagggaaacagctggaggacgaccgcacgctggccagctacggcattgaagccgactgcactctgcacctggtgctgcgcctgcgcggcggtatgtttgccctctcatctggccgcgccggcaa

SEQ ID NO: 4073 - DNA, 262 bp, Chlorella sorokiniana
  Clone ID: LIB3602-047-Q6-K1-E4
aaaaaaagacggctttgttacaataaaaaaaaaaaaccttgcattttcccataaaagcatttccttttccataaaaacaccccggggaatgcccaacgggaaaaggggagggggaacacaaggggaaacaaacatggaacctggcccccgggggacggaaattcaaaaaacttcgaggcccgccccgggaaagggccccggccccccattttgtttaattttggggaaacataacaaaaaacaccggggcttggcccaaggg

SEQ ID NO: 4074 - DNA, 306 bp, Chlorella sorokiniana
  unsure (1)..(306): unsure at all n locations; Clone ID: LIB3602-047-Q6-K1-E5
ctttgtcaagctcatcagctggtacgataacgagatgggctactccaaccgcctggtggacctggccatccacatgagcaagtcggcgtaaggcggcaggcgccggcgggtggccagagagtgtgcaaatgagacttcctttttggcacgcgcccggtttccgaatgaatgtgcatgaacactcggcagcgtcacgttgcttttccgaccccaccagcccattggcggcgtcctgtgccccaagtgcagcccctccctctcttctatccttgcttgctctagcattgtaaggtcaacagcggnnaa

SEQ ID NO: 4075 - DNA, 493 bp, Chlorella sorokiniana
  Clone ID: LIB3602-047-Q6-K1-E6
gcggcctggagctgtacaaggtcatccagaacaagccagtggaggcgtaccgcaacacgtttgccaacctggcgctgccgctgtttgcgatggcggagcccatcccgccaaagagcttcaagttcaacgacctggagtggagcctgtgggaccgctggatcctggagggcgacctcacggtcaaccaggtgctggagtggttccgcgccaagggcctggaggcctactccatctcctgcggccagtccctgctgtacaacaacatcttccccaagcacaaggagcggctggacaagaagatgagcgagctggtgcggacggtggccaagatggagatccccgcagacaggagccactttgatgtggtggtggcgtgcgaggactaggagggagaggacctggacgtgccgctggtcagcatcaagttccgctgagtgctaagagagcacctctttgcaattctacagagcacgcggcaaccggcacggctggc

SEQ ID NO: 4076 - DNA, 486 bp, Chlorella sorokiniana
  Clone ID: LIB3602-047-Q6-K1-E7
gctttcagaggtcacggcagcagtaaccatgcaggcactcagcagcagcaagctcatcgcctctggcgtgcaggccaagagccagcagcagcgctctgctcgggctgccgtcgtggttcgcgcctctgccgagggcgtcgaccgccgcgccgccctgggcctgctggccgctgccgctgccgtcagcaccgcgcagccctctgaggccgcctacggtgatgccgcccgcgtgttcgccggcaacatcaccaacaagtccggcttcatcccctacgccggcgagggcttcgcgctgctgatccccagcaagtggaacccctccaaggagcaggacttccccggcgtggtgctgcgctatgaggacaacggcgacgccgtgaacaacctggtggtgctggtgcagaaggtgggcaagaacaacatcgacgagctgggcagccccgacaagttcctgcaggacaacgcctacctgttcggcgagtccgc

SEQ ID NO: 4077 - DNA, 488 bp, Chlorella sorokiniana
  Clone ID: LIB3602-047-Q6-K1-E8
gcgtgcggacaggtctgcgtgagtaagcccgcagcacactcacaatgactgtcggcagctgcacccccgtgcctgaggagtacctgccggtggaggccaagggcctcgtgttcgacctcgatggcacggtgctggacacgatgcggcaccactgggacgcctggaagcagctgtcccaggagtttggcttcagcctcacggtggagcagctgctggggctggcgggcaagcccagcaaggagatcatggagctgctgtgctcggagcaggggctgacccacatcgacatccctaaggcggtggagcgcaagacggagctgtacgtggagctggcgggggacaccaccgtcatcccctgcgtcatggccatcgcccacgccgccaagtccaagggcatgcccattgcgattgcaaccggcggcaaccgggcgcaggttgagaagagcctgcgggcggtggacatgctggagggcttcttcgatgccatt

SEQ ID NO: 4078 - DNA, 88 bp, Chlorella sorokiniana
  Clone ID: LIB3602-047-Q6-K1-E9
aaaaaaaaaaaaaaaaaaaaaaaaaaaaaaaaaaaaaaaaaaaaaaaaaaaaaaaaaaaaaaaaaaaaaaaaaaaaagagggaaaaaa

SEQ ID NO: 4079 - DNA, 480 bp, Chlorella sorokiniana
  unsure (1)..(480): unsure at all n locations; Clone ID: LIB3602-047-Q6-K1-F1
gcccttcgccggcgcttcgcacgccaagggcatcgtgctggagaagatcggcattgaggccaagcagcccaactccgctatccgcaagtgcgcgcgtgtgcagctgatcaagaacggcaagaagattgcggcgttcgtgcccaacgacggctgcctcaacttcatcgaggagaacgacgaggtgctcatcgccggtttcggccgccgcggccacgccgtgggtgatatccccggcgtgcgcttcaaggtggtgaaggtgtccggtgtgtccctgctggcgctcttccgcggcaagaaggagaagccccggaactaaacggcccgcgcccagcagcggcagcagcggcgcgcctcggcaacggngggcgccgcgtccgccagcactgcacctgcctggcggcggcttgggagggcgtgcagcgcatgcagcgtgcaccgncgcggcccttccgatagtttaggaccccacaaccagctccc

SEQ ID NO: 4080 - DNA, 457 bp, Chlorella sorokiniana
  unsure (1)..(457): unsure at all n locations; Clone ID: LIB3602-047-Q6-K1-F10
cggcatgaaggccattgaggcggccattgagcgcctgtccaagtgccaccccgagcacatctcgcagtacggcaccggcaacgaggagcgcctgaccggcaagcacgagacgtgcgacatcaacactttccgcttcggcgtggccgaccgcggctcctccatccgcatccccctgcccgtgcagctggccggcaagggctacctggaggaccgccgccccgccgccaacgtcgacccctacactgttgtgcgcctgctcatcaagaacaccctcctctgagcggcttgaccaaccctggtggtgtgacgcggcccgcggctggcattccgcgcccgcagccgcccgctcgctgctgcttcttgcaagcagcccctagatagcgagcaggcggcacggaagccgggcagccagccgncgcagcttacctgtccatgtgtgcgcctcggcgtgctgttg

SEQ ID NO: 4081 - DNA, 490 bp, Chlorella sorokiniana
  Clone ID: LIB3602-047-Q6-K1-F11
cggttttgggcaccaactggtctgtctgccgctgcccgccctgctcaatcatttttgctccccaccttccgtcttgttgtgctgcccgcagcggcgcgccggtagaaggcggtgaaagcaacattgtttggctgctaagttgggcggcctgctgcctacccacctgctgtctgcaccgcacttaatcccactgctgcagcggcgcgccagccgagggcgacgagttcaacactgtgtggatcctggactccgaccagctgggcttcaaccgcgcggagcagtaccaccagttccacaatgggctgggtgaggatttgcttgttgttttgattgatttttacagccaatatagctggccttcaaccgagcggagcattgccatcagatatgcattctgcaacggggtgggtgagtggtgcatcatagcattcgcaagcttggctccacttccagctcttccacaagacttgcacccaccacctttaacgcg

SEQ ID NO: 4082 - DNA, 347 bp, Chlorella sorokiniana
  Clone ID: LIB3602-047-Q6-K1-F12
agctgccgcccccgggaccacacctccctcatcatctgcgcccttgcagccgccaatgacgagaccagcaagctgacgatcgaggacctgagagacatgctgaacaacatagacgaggacgagtgagggctgctgcgaaaagcgctcaaccgcaccaactcgctgcaccgcacggcccacctgtcacatgtacctgcctgtacctgtcaaagccctgtgcagcgtttccgtttaccttgcacatgcacatctacattgcgctctttgcgccgctctccctctgatgcacggcgccagggcagctgcctagcgtggtcggctgccacccttgtaaatgcaaaccgcga

SEQ ID NO: 4083 - DNA, 490 bp, Chlorella sorokiniana
  Clone ID: LIB3602-047-Q6-K1-F2
gcgggcctacaggtcaccctgaagaccccctccggcgagcaggtgattgagtgcgccgaggacacctacatcctggacgccgctgaggaggccggcattgacctgccctacagctgccgcgcgggcgcctgctccagctgcgccggcaaggtggaggccggctctgtggaccagagcgaccagtccttcctggacgacgaccagatgggcaagggcttcgtgctgacctgcgtggcctaccccacctccgatgtgaccatcgccacccaccaggaagagtcgctgtactgagctcaattcttgggcctcggtcagtgtttggtctccaaacctggtcgctctgcgcacctgacgtcgtgcggcgtgcggccgcttgctaggcgaattgcatggcggcggcggcgcccgcgcagcagaacccccctctgtcccggcagcattgaatctgttttgttctgagagcagcacttcccattcttccttgccatgc

SEQ ID NO: 4084 - DNA, 491 bp, Chlorella sorokiniana
  unsure (1)..(491): unsure at all n locations; Clone ID: LIB3602-047-Q6-K1-F3
gagcggtgcccgccctgctggccgaattcccggccggactgctcacccccgcaggcaagtggcactgtgtaggtggccctttccctccccccagctctgtgggccgcctgcggccactctcagtgatcagcccttcctctgaggcctgctggccccggccatggccgcttcactgccgcccgattgctgcccgcaggcatggtggttgcgaatccaagctatgccgggctggagccccagctggagagcgggctgtaccgcaacttcacaaacggatccgtgatttggggattcgtggaggcgatgatggtggaaggtgggtgccgctccccctcatgagtgatcaccgtacagagcacaacccaccgcatgcatgccgggatacgccttgcttggtgttagctgtgtgcgagatgcgtggctggctgcagctgtgggcgacatgtcccctctgtacagctgcccnctctggcagatggccagctggcgct

SEQ ID NO: 4085 - DNA, 444 bp, Chlorella sorokiniana
  Clone ID: LIB3602-047-Q6-K1-F4
ccctggctgagctgaaggtcaaggagatcaagaacggccgcctggccatgctctccatgctgggcttcttcgtgcaggccatcgtgaccggcaagggccccctggacaaccttctgcagcatttggaggagcccggggagttcaacttctacgccctgtacgccaactccctggcgtaagcagcttgtttggagcacctgcggcggccgaggcggcggcgctgagctggcgcaaagcgcggttggcgaccgccgccgcctcacgctgttgcccttgaccctcttccctttacgcgcttgcatgcgttcccgactccgctgcatgttgcctgtgtgtgcaattgtgcatcaggcaaaagaaacgagaagaaaactccacccaaacaccattttgcctgttgtaccatcctgtacgaaaaggaggctgtagtggtgtaaaaacatc

SEQ ID NO: 4086 - DNA, 284 bp, Chlorella sorokiniana
  Clone ID: LIB3602-047-Q6-K1-F5
gctccatgcagctcacatccccctggcaggctggctgagcgcttaggctggtcggctgctgcccgttggcctctttgctctcggttttgctccctttgcttccacaacccgcttgcagcaacgttgctcgtgcactgctcccagcagttggtggtgctcaacgatggggtcacccggacacccgacctccgctgttgttgtttcattccagcattgcatgcccacgttgtgttgtttccagagccagtcagcctgtggaccaggcccagcctctgtaacccaag

SEQ ID NO: 4087 - DNA, 420 bp, Chlorella sorokiniana
  Clone ID: LIB3602-047-Q6-K1-F6
gcggtgggcactctgtgcagcgtggcacttgcaggtacatggaggagcctcgcacacagcgccagaccatgactgaccagcagcagccctccttgtcatcctttgcagcatccgcgtgggccgcatcgtcagctgcgagcggcaccccgacgcggacagcctgtacgtggagcaaattgatgtgggcgaggcggagggcccccgcaccattgtgtcggggctggtcaagtacgtgccgctggaggagatgcagaaccggtcggtggtgatcatcgccaacctcaagccccgcaacatgcgcggcatcaagagcaacggcatggtaaggcccagggacacagccgcagccagctgcagagccggggtcggataagctcccgtcggttggtcacccacaggaagtacatgatgagatggggt

SEQ ID NO: 4088 - DNA, 487 bp, Chlorella sorokiniana
  Clone ID: LIB3602-047-Q6-K1-F7
gcgtcaggttggtctggagcggctgcacacactagggcttcgtttgctgcaaactcgcaaggtctcctgactagcacaagctccggcgaagcctgagacagccggcaggcagcgcggagcggcagccagcaagcgaggcagcaggatgccccgagccaagacattcaaggaggagcacccgtttgagaagcggcaggcggaggcggcccgcatccgagacaagtaccctgaccgcatcccggtgattgtggagcgcgctgacaagagcaacatcccggacattgacaagaagaagtacctggtgcccgcggacctcacggtgggccagtttgtgtacgtgatccgcaagcgcatccgcgtgtcgcccgagcaggccatcttcatgtttgtgcgcaacgtgctgccgcccacggccgcgctgatggcggacgtgtatgcagaccacaaggacgaggacaacttcctctacatcacctacagcggtgag

SEQ ID NO: 4089 - DNA, 471 bp, Chlorella sorokiniana
  Clone ID: LIB3602-047-Q6-K1-F8
ggcttcgcccggcatctgggactaccacctgcagtctgagaaggctgagcgggaggcgagccacgacgtggcgcgcgccgccttcaagtccatgggcgcctccaccactccccaaggcgatgtgctggatgcctctgccctgcgcaagatgtttgcctcggaccgcgtggaccagctgatggccatggccgacaagaacaaggacggcaagatcgacttcaaggagttctgcgacctgatccgcaagtacccctgcgactgagcgatacataaggcagatgcacggaccaatccctgcaataaatgcaccgtttcacaccgggccacgggcgcggcgctgattgacgcgtccccaagtaaactcctctcccaagccagtggcgccacggcacagcaccacgtgcggctgaagctgctgctgccctcagccacttcctctgttttccccgtcctcagttttccagttcttct

SEQ ID NO: 4090 - DNA, 490 bp, Chlorella sorokiniana
  Clone ID: LIB3602-047-Q6-K1-F9
ttccagtgggccaccgacgccgccgaccgcctcgcattcgccgaggtgctgtcctccaacgagaccttcgccgccgacatgaccgagacgtaccgggtgctgggcgtggaccccgccagcgtgaccaccctggagacgtacctgcaggagtacttcagcgccatcctgaagaagctcaaggaggtgggcgcctcctccaagcaaaccaacttctacgtctgagcgaccgcccgcaccactgccagtctgccggcgtgcgcggcggcgtgcggcgagtgagccgcagccggcgcagcggcccttgcggccccggcatgcagccattggtgcagttggctccagcgcctgagtcagtgctgagcagctgtccctgtgggattgcttttaccgctgcccacgctgcacggctggcgcgtttgtttctgtgtcataagtcttgtgtgcgcttgctgtcctcctttcctttctctccgcccgccctgcaaccaac

SEQ ID NO: 4091 - DNA, 493 bp, Chlorella sorokiniana
  unsure (1)..(493): unsure at all n locations; Clone ID: LIB3602-047-Q6-K1-G1
gcggcacctacttgtttcttgccctgcaccagatctccaagcaacgatgcaggctgcccagctccaggctcgcgccacccggcccgccgtggctcgccgcaccaccgtgcgcgtgcaggctcagcaggccgcgccccgcgctcaggcccccaagccccagcagtttgctgctggcctggctgccgccttcgctgccgtgaccctggtgctggcgcccgccgccaacgctgctgaggcccgcgcggaagtgaagagcgtggtgtgcgccagcaaccccacctccaagatctgcctcaaggacagcgccaagaactgaggcgtgccagctggactgagcgagcgctgagcccttgctggccgcacctgaggcaggcagccattgctgactgccggggggcaccgggccgccacccgctgcccggcagcatgggcgaggcggcgtgagaaagagaggacttgtgcactgccacacagttntttggacacctgtgct

SEQ ID NO: 4092 - DNA, 488 bp, Chlorella sorokiniana
  Clone ID: LIB3602-047-Q6-K1-G10
cttcaagcccgtgttccgcgcccgcaccatgacgggcatgccgccgctcaaccccagcaacatctgctccgtgcagctcatgctcagcaagtttgagcaggacggcgagctgaaccccacattccgcgagggccccttctcgctgccgctgcagcgcatctccgggtatgtgtcggccggcggcccgccccgctttgttcacgtctcgtccagcggggttacgcgccccggccgcccgggcatcgacattgagaaggagccgcccgcggtgcgcatgaacgagatgctgggcggcatcctggactacaagctcaaggccgaggacgagctgcgcgccagcggcgtgtcctttgccattgtgcgccctaccgcgctgacggaggaggcgggcggcatgccgctggtggtggagcagggggacacgctcaagggcaaggtgtctcgtgaggacgtggctgagctgtgcgtggcgctactggagcagcccg

SEQ ID NO: 4093 - DNA, 379 bp, Chlorella sorokiniana
  unsure (1)..(379): unsure at all n locations; Clone ID: LIB3602-047-Q6-K1-G11
cacctgcggcgctgctgttcgtgcagcgccccgccggcgccccatccttcatgcatcatgatgcccagttttgacgccttttgcccagccccataccatacccgtacaaacacagccctttcatgcatgctctctgccccatgcgttaccgcctgtcaccactgctctggtctccccaatgccctccctgataccacgttccgctacactcctcgcaaggccggcagcatgcgccgctcccctgtgccacagccgccatctgctccttccagcccccgccttttcctccatcaagccccgcgctcctttgaaggaattccctgtgccaccatcatgctcccaaaccactgtcatgggtgtaaggcacgtcaacnnanaa

SEQ ID NO: 4094 - DNA, 489 bp, Chlorella sorokiniana
  Clone ID: LIB3602-047-Q6-K1-G12
gcacaccagaaatacaagtacattgaggcggagatcgtgcagcgcaagaagcggctctcattcaagcagcctgagattcgcaagtgcttggacgcagtcaccctgctgcttgcgcagcaagaggcgggcgagcagacggtgctggacttcagcctgagcgaccaggtgtacgcgcgggcgcggcttgcagacgtgtcgtccgtcaacctgtggctgggggcgggtgtcatgctggagtactctctagaggatgccaaggagctgctggtgcggcagctggaggggtgccagcagcagctggacgtggtgcagtgggagcacctgtacatcaaggaccagctgaccacgacagaggtgtccatggcgcgtgtttacaactgggatgtgcagcagcggcgagcaggggcagcctcatgagactgcaagtggcaaggcggctcacgcatgattcggcccagcagcgtgcggtacttgacgtcagcagctgtc

SEQ ID NO: 4095 - DNA, 376 bp, Chlorella sorokiniana
  Clone ID: LIB3602-047-Q6-K1-G2
aaaaaaaaaaaaaaaaaaaaaaaaaaaaaaaaataaaaaaaaaaaaaaaaaaataaaaaaaaaaaaaaataaaaaaaaaagggggagcaaataaaaaaaagaaacacaaaacaaaaggggcgcccagttttaaaggacccaactttacttccgcgagctttcaactaattactttttttttagggtccccaaattcaatttctttgcccgtggtttaacaccgccgagattggaaaaaccctgccttccccaaattaaatcgctttgaacgacatccccttttcgccatttgctgaaaaaacaaaagggcccacaccgttggcctttccaaacatttgcgcaccctaattggcaatggtgacccccctttaagcgg

SEQ ID NO: 4096 - DNA, 482 bp, Chlorella sorokiniana
  Clone ID: LIB3602-047-Q6-K1-G3
tggcagatcctgaccgcggcgctgggcatccccgccgaccgcctgcgcagcctggttcgcgagaagcccgccctgctgtccgacctcaacatgcgcgagctgcgcaccatggccggcctcagcgagtgaggcttggattgagctccccaataacagcggcttgcaggcctactgaccagcgcagcatggcaccagcatggcaccagcacagcaggcacaaccctgcactcgctgcccggttgcgtgccggcagtgcagctgcccgccgccgcttatggccctgccgcccctgctgtctttccaccccacccctgcccaactcaacaccgccataagatcccgcccatgtaatgctgatcccgcgtttgattagcccctgcctttacttgtttccctgaactgcgaatgtcaaaggctgccgccgctgatgcgtaagcaggccctgctgtcctttccttctccccgttttgcaacccccgctg

SEQ ID NO: 4097 - DNA, 470 bp, Chlorella sorokiniana
  Clone ID: LIB3602-047-Q6-K1-G4
gcggaaatggccgccccgtgcaagcggcagccagtgatattccaacgactcagcagcctcgcgtcagctcttaagcaagcggccgctgcctccctcgctgccgctgtgcgcagttgctctgcctgctatgctgcagcggggccggctggcccctctctcgtgccttatgtcacaggccttcttacatacacctctctatccccgccacgtatgctataatgggcaatgataatgcgtttgattccagcactcctgtatgcgcgtctcccttttgtcgctccttgccctgttccttttgcttagccagccgacccatgtcgcgctgtcgcaatgcatgctcaaccgtctgccctgcctgacctgcaatgcatgatgccccgccccgcctgaagcatcaagcaaacgaacctgcccttttgcaacttgttgtcctgtgttgtgctgcgccgctctgtaaggtgtccagcact

SEQ ID NO: 4098 - DNA, 258 bp, Chlorella sorokiniana
  Clone ID: LIB3602-047-Q6-K1-G5
ccccccaaaattcggggcgacccacacgcgcgggatgcaagcacgccgccctgacccgaaccaggatggtcttgcatccaatcagccgtctgcctatcgttcccttgcgggcgcctctcatcaacttcagtccctgcatttagatgagcctcacattcgccttcagcagtgtggcccatgccccgctgtacgtccagctctctcactgacgccgctacacattttccacccctgcgatcgctccccttatcatgaata

SEQ ID NO: 4099 - DNA, 245 bp, Chlorella sorokiniana
  Clone ID: LIB3602-047-Q6-K1-G6
cacacgcgtgcgcgacacaaaaaatacaagcacattcatgccagtcatattccaacgactcactatctctcgagtaacctcttaatcagggcgacctttacaacctcgatgccgctcaccacacatgctctatctactatacttcaacatcacctcctcaaccatatctcataccttatctaataacccttattacatacaactatctatcccccacaccaattctataatgcccactcttaatg

SEQ ID NO: 4100 - DNA, 458 bp, Chlorella sorokiniana
  unsure (1)..(458): unsure at all n locations; Clone ID: LIB3602-047-Q6-K1-G7
gcaagggcaaggagtgccgcaagcacaccatgcacaaggtcactcagtacaagaccggcaaggcgtcgctctacgcgcagggcaagcggcgttacgaccgcaagcagtccggctatggtggccagaccaagcccgtgttccacaagaaggccaagaccaccaagaagattgtgctgcgtctggcctgcaccgtgtgcaaggcccagcacatgcacgccatcaagcgctgcaagcacttcgagatcggcggcgacaagaaggtcaaggggctatactagtaaaaaaaaggagagcggcaggcggagagcatgaccgagaaatggaggcagcggcgcccgctcaccctgngcggcctgctccccgcccggcgcctcgctttggccgcctctggccactcgtacgcctccttgtccatgcccttgtgcttcctgagctgnccaaacctggcatgcaagcag

SEQ ID NO: 4101 - DNA, 65 bp, Chlorella sorokiniana
  Clone ID: LIB3602-047-Q6-K1-G8
aaaaaaaaaaaaaaaaaaaaaaaaaaaaaaaaaaaaaaaaaaaaaaaaaaaaaaaaaaagggggg

SEQ ID NO: 4102 - DNA, 484 bp, Chlorella sorokiniana
  unsure (1)..(484): unsure at all n locations; Clone ID: LIB3602-047-Q6-K1-G9
gccaagatgcctgctgcctctgctaagcctgctgcgccccgcgctggccccgctgctgcgccagcacgtgccgcctccccggcggccgccaagtgggaccatgctacgcgcgtcatgcctgctggcgccgctgtgcccgtcacccccaagatggacgctgcggcattcaagcaggcggccagcaagcccgctgctcccggccctgctcctgctggagtgaaccgctgggccgactttagcctgggagatcccaaccccagcaagcggggcattgacgtgactggcctgcccaccccgccctcggtccccgcccctgctgtggcgcccgcggctgctatgcgctgaggcgcctgctgcgcgtgctgtggctggcgcctcgacatgatggctggtgtgctgcccagccagcgcacctctccccaaggtggggctgggacagcgacatggccccatgacaaaacagctngtactggcaaaccacagc

SEQ ID NO: 4103 - DNA, 228 bp, Chlorella sorokiniana
  Clone ID: LIB3602-047-Q6-K1-H1
atcgccccccataaaaaaataaataacactttctaaccttccttcctattttaatcagggcgggccccaccaaaaaacataaatttttcaaaaaaaaaaaaaaaaaccccccccaaaccccccttccttggggaaaacccaggccaacatacccagggccacaaaaagattagtatccttccccttcctagacccccattaaaaagcccccctttaaaaaaaccaaaa

SEQ ID NO: 4104 - DNA, 216 bp, Chlorella sorokiniana
  Clone ID: LIB3602-047-Q6-K1-H10
aacttcattttttttattatttttttttttttttttttttttttttttttttttaatgtttcattacccttttttggttgcctttttaaaaacggggggaaaaggcaaaacaaaaaacaataccaactcacaaaaaaaaaaaaaacatattcaatgttgggtaacattcttgtgctttccccgacaaacgccccactccaaaaaaagcgcccaaaa

SEQ ID NO: 4105 - DNA, 365 bp, Chlorella sorokiniana
  Clone ID: LIB3602-047-Q6-K1-H11
attttttttttttttttttttttttttttttttattttttttattttgtgtttttttttcaccgagggcttttttttttataaaaaaaaaaaatggctgttgaattagcactttaaaaaaaactaaaggaaaaagggtatggaagggattgaagcgcattaaaaaaagggggccctaaaaggacgcaaaaaaaagagtgaacttagaaagggcacaaaaaaaaaatggggacaaaaacgtaaaaggtgacccccaaatggccaataaaattggcgtgcaaaaaattttttaaacaaaaaaagattttttttaaagggggtatttacagaaaacccggaaatagtatgaaacataagggaaggtgg

SEQ ID NO: 4106 - DNA, 130 bp, Chlorella sorokiniana
  Clone ID: LIB3602-047-Q6-K1-H12
cacgcgtccgaaacaaaaaaatatagacaaacaactgcagataaaaaaaaaaaaaaaacataatattatataggaaaaaaaaaaaaaaagaggcgcactgtgcaaaaaaaaaatattttaaattatcaag

SEQ ID NO: 4107 - DNA, 444 bp, Chlorella sorokiniana
  Clone ID: LIB3602-047-Q6-K1-H2
gcggatgtgggcggcctggagcagcagatccaggagattaaggaggcggtggagctgcccctgacgcacccggagctgtatgaggacattggcatcaagccgcccaagggcgtgatcctgtacggcgagcccggcaccggcaagacgctgctggccaaggcggtggccaactccaccagcgccaccttcctgcgtgtggtcggctcggagctgatccaaaagtacctgggcgacggccccaagctggttcgcgagctgttccgcgtggctgacgagcaggcgccatccatcgtgttcattgacgagattgacgcggtgggcaccaagcggtacgacgcgcacagcggcggcgagcgcgagatccagcgcaccatgcttgagctgctcaaccagctggacggctttgatgcgatgacggatgtcaaggtcatcatggccaccaac

SEQ ID NO: 4108 - DNA, 476 bp, Chlorella sorokiniana
  unsure (1)..(476): unsure at all n locations; Clone ID: LIB3602-047-Q6-K1-H3
atccggggcgacgccacgcgtgcgccaccccgcaactcaaaagcaccactcattgatggttcggtccttttcatcagcagtgcccattcgtgcgcctccctgccgcctgctgccgccacccacattccctcccggcggggcgccagcgagtttccggcccccgaccaggctgctgtaccactcaacaccccttgtgtgccgcggcagcgggagcggcggcgactgctcccgccgccgccatgcagagagtttttcctccccctctgcccgcctctgccctcttcagtcagttacgatgtgtccgcgctattaccactgtcttccctctttcagagcactgaccctctgatcccattcaggctgcaatccttactattgatggaccttgcctcgccttgcattgcctgctccgctgccgagcgcacccacggtctattttacaggcgccgcgcagcggactgtaaaacctcgcancg

SEQ ID NO: 4109 - DNA, 346 bp, Chlorella sorokiniana
  Clone ID: LIB3602-047-Q6-K1-H4
tacaaataaaaattaaataaaaaaaaataaataaaaaataaaaaacttaaaattaaaaataactcttacacactccttcttgtgtgcttatttttaaatggtggttccctccccctttttcttccttttatcttccccccccctccctctcttttttacccctcaacaccccctttttttcctttgcacttttatcacgcctttcttttatcaacatcttttttttaacatcttttcttctccctatctctctctcttattttttcacccattttttatcaacaccctctttttccaccttttttttctcttttacgaccctcttccacttttttatcactatttc

SEQ ID NO: 4110 - DNA, 296 bp, Chlorella sorokiniana
  Clone ID: LIB3602-047-Q6-K1-H5
acaggtggcaagacgcccgcacaagtggccctcaactggctgatttgcaagggtgcagtgcccatcccgggagccaagagccaggcccaggcggaatccaatgtgggagccctgggctggcggctgagcgagggcgacgtgtctgagctggatgagctggccatcgagggcagcctcaagtttgggcagcacggctagaaatggcactgattggcgtgtactcatagcagcctcaacctgtacattacttgtgaatctgtagttcaaaaaaaaaaaaaaaaaaaaaaaaaaaaaaa

SEQ ID NO: 4111 - DNA, 513 bp, Chlorella sorokiniana
  Clone ID: LIB3602-047-Q6-K1-H6
ggaattggcgggacccacgcggccgcaagaacccagacatctgcacgcagctgcagatccacggcctgcccaccctcatattcgtgggcatggacgccaacaagcccgcgctgcgcaccgagggcctgctgcccgcgcaggtgatccaagagattgtggaacgggacctggtggagggcgtgcagggcggcaagtgaagcagctgaccgtagaatcagcgcgggtgccatggctgaagcgccgcagcagcaagtgggagcgcagcggccacagcacacccccttgccgacgtccacataatggcagccaccaccatgcctgctggcgccagcgtggctgggatgctgcagggcactgcagtcgtgctgcagccgcgctgccgctgcgggtgcgccccccgcaacagacgccccgcccgcccgataacgaatgccagttgttgagagccgtgctgtgcggtgccaactgcccactggctcgcctgcaatgtacacttgtcaccctgtctgttcg

SEQ ID NO: 4112 - DNA, 108 bp, Chlorella sorokiniana
  Clone ID: LIB3602-047-Q6-K1-H7
aaaaaaaaaaaaaaaaaaaaaaaaaaaaaaaaaaaaagggcggacgctataaaaaaaaacaagcttacctacccatgggggccacgttatagatctcgtgtgtgggcc

SEQ ID NO: 4113 - DNA, 467 bp, Chlorella sorokiniana
  Clone ID: LIB3602-047-Q6-K1-H9
gcggctgtgggagagacaggcctggattacgaccggctgcatttctgcgacgccgccacgcagcaaaagtactttgcgcggcagtttgagctggcacgcagcagcgggctgcccatgttcctgcacctgcgggccgcggcagcagactttttggatattgtgcagcagcatgcagatgccttccccgcgggagtggttcactcctttgacggcagccaggacgagctgcaacaaatactgcagcacgacaagctgagcatcggcatcaatggctgcagcttgaaaacggaggagaacttgcaagttatggcggcggtccctctagaccggctgctgctagaaacagactgcccctggtgcgagatccggcccagccacgcaggcagcaagcacgtgctgaccaagtttgaagcgaaagataagaagagcaggaggagggcaagctggtcaagagccggaacgagccc

SEQ ID NO: 4114 - DNA, 386 bp, Chlorella sorokiniana
  unsure (1)..(386): unsure at all n locations; Clone ID: LIB3602-048-Q6-K1QA-A1
gtgccgccttgcctagcctgccnatgcctcncaacccgcgcttttacccagtgccaccatgtccagcaccgaccggggtcacgtgaccgctgagcgcctgagctacgcctaccattttttgtagcgcacatcctttatgttcatcgccacgggtgcgaccgtcgtccgtcggccgggcgccgaggaagacgacttcctgcccaccatcgccaccttctcctcatgccccgtcggccccagcagccacaagctgagccgccacagctacggtccctatttcctctgcagcccgaactccccgcgcgtggacgatgtgtggcgcacaggtcaagcggcggtgtatggcggctggttccgccccagcaccaagcccaagacgcatgggc

SEQ ID NO: 4115 - DNA, 389 bp, Chlorella sorokiniana
  Clone ID: LIB3602-048-Q6-K1QA-A10
ggcagccggcgggccagcagcgcgcgcccgcatttggcgagggcgccctggccaagtggcactgagggtggagccagccttgtgcttgctgttacctgtatccctgtgctgctgggcttaccacctgggccaccattgtggcctgcctctgttgacattatgcagctgtacatgcacctctgtaccttgtttgctaccacgcgagtttggaaaatgtgcccaaatgcttggaaattcactttactactgtttcccttctgcatgatgcaccgcccgcttgaagccgccatgccttgtcgcaggcatggccgctgcttcctttgattttggactgttggggatactttcggctacctacctgacgcacacacatgtaacataactggatt

SEQ ID NO: 4116 - DNA, 386 bp, Chlorella sorokiniana
  Clone ID: LIB3602-048-Q6-K1QA-A11
ccccgttagatgtccccctcacagactgacacaccaccaacagcgcgctggtgcacggcggcgtgcggcgccagcggcagcactcggtgctgcagcggcccgccgccaccaaccacactcccaccttcgccgggaggcgccaacgaggctgcttgggagcccctgtggcagcacacacggtgcaggcctgtaccatgagcgcttgctctagtcaagcaagtcaagctgttgccctgtgaagagaaaaatggttgtaacagaccgtgctgcaacaaacgattgaagccgacatgcacttgacacaagcatggccgctgcttactgggcggccggactgaaggagacacttttacgtacctacctgtcgcacacacatgtctcatatc

SEQ ID NO: 4117 - DNA, 97 bp, Chlorella sorokiniana
  Clone ID: LIB3602-048-Q6-K1QA-A12
aaaaaaaaaaaaaaaaaaaaaaaaaaaaaaaaaaaaaaaaaaaaaaaaaaaaaaaaaaaaaaaaaaaaaaaaaaaaaaggaaaaaaaaaaaaaaaaa

SEQ ID NO: 4118 - DNA, 355 bp, Chlorella sorokiniana
  Clone ID: LIB3602-048-Q6-K1QA-A3
gcgacgatagatataaataaaaaaacaaacaatataaaagataacaaacttacatacacaatgcatgcaaaaataataacatactaagggtggggtcacctaaattagagttcactgaccgtatttttacaacgaagggggggggagtttttgtggcccaaccttaccttaaccgcggttgcttaagatgtgggttttctcaggtgccggcctacttgaccccgccttttccctgtctgctgctgcctgggtgagaaaccccgtggggaacccaatttaccctgtttgggcacatttcccttttcgggagtgggggttattcgcaaagggaccgctccacttgcctttcccataa

SEQ ID NO: 4119 - DNA, 304 bp, Chlorella sorokiniana
  Clone ID: LIB3602-048-Q6-K1QA-A4
gcgaaaaaaaaaaaaaaaaaaaaaaaaaaaaaaaaaaaaaaaaaaaaaaaaaaaaataaaaaaataaaaataaaatattataaggaggatttaacataatgagggctgtatgcatttaatattttacttaccacctgggtcaccattgtggcctgcctctgttgacattatgctgctgttcatgcacctctgtaccttgtttgctaccacgcgagtttggaaaatgtgcccaaatgcttggaaattcactttactactgtttccccttttgtctttcctcttaactccttattttcaatttcct

SEQ ID NO: 4120 - DNA, 362 bp, Chlorella sorokiniana
  unsure (1)..(362): unsure at all n locations; Clone ID: LIB3602-048-Q6-K1QA-A5
ttaaaaaaaaataaaaaaaaatataataaaaaaaaaaaaaaaaaaaaaaaaaaaaaataaaaaaaatttttataattgggggaatataataatatatgggttattgataattaattttaatatatttttattttagggtttttgttttgnggttcttacttttttttcttttttttttttgtttttttttttttttattttcttttaatttttattttttgtttcttcttattttcttccttttatttgttttaatttttggttttctttttttttttttttttaattttttttttttttttgttatttctttttttttttttttttacttcctttgtttcttttctttttatttatttttt

SEQ ID NO: 4121 - DNA, 350 bp, Chlorella sorokiniana
  Clone ID: LIB3602-048-Q6-K1QA-A6
ggtggaccacagccgtggcggatgcagcacggccggcgcgcccggccgcggtgtttgctgcagcaccggcggcagccctgggtgctgcccccctcttagattgctgcaccgcacggttgtaacagaggttacaaaaaaaaaaaaaaaaaaaaaaaaaaaaaaaaaaaaaaaaaaaaaaaaggggggacaatataaaaaaaaacaagggtgcgccctcttagcgatccaaactttacatcttctatatagcgacctataattttttttttggggcccttaatataaaatccttggcgggaaaaaactaaggcgacacaaaggaaaacccttgtttaaccacattttttttc

SEQ ID NO: 4122 - DNA, 496 bp, Chlorella sorokiniana
  Clone ID: LIB3602-048-Q6-K1QA-A7
gtgccgccttgcctagcctgccgaggcctcgcgacccgcgctttcacccagtgccaccatgtccagcaccgaccgccctcgcgtgaccgctgagcgcctgagcgacgcctaccagcttgcggagcgcacccacttcatgtccatcggcacgggtgcgaccgccggccgtcggccgggcgccgaggaagacgacttcctgcccaccatcgccacctgctcctcaggccccgtcggccccagcagccacaagctgagccgccacagctacggcccctcttccccctgcagcccgcactccccgcgcgtgggcgaggtgtggcgcacaggtcaggcggcggtgtatggcggctggttccgccccagccccaagcccaagacgcatgggcagcagtgaggcggtgccggcgcacaacagccctggtcacggcggctcgcaagctggcttgccagccccacagcggcagggcaggtagcctcgctccatcttggcaccagc

SEQ ID NO: 4123 - DNA, 499 bp, Chlorella sorokiniana
  Clone ID: LIB3602-048-Q6-K1QA-A8
ggagacggactcgactgcagaactgaacaatgcgggcctgctgcagctgcagcagcaagtgatgtcgcagcaggatgcggcgctggagagcctggagcgcacggtggtgggcaccaagcacattgcgctgcagatcaacgaggaggcggagctgcacaaccggctgctggacgatttggacgaggaagtggacggcacacggtcgcgcctggcggcggcgcagcgccgcctcaagctggtcatgcggcgcagcggctcgtgcaagaccatgacgctcatgttcctgatcgcagtgattcttgtggtggtgctggtcattggcttcaaggttgcgctgcacctggcagttttcctgtgagccctccccctctcagccgtccaggaatgaatgcacacatgcaccctgtctccctgtcatgagcctgtgcgccttactgtatgtaccagtagcagaaccaaccttttctacagcacgccttgtgtatccttgtgcaccatc

SEQ ID NO: 4124 - DNA, 418 bp, Chlorella sorokiniana
  Clone ID: LIB3602-048-Q6-K1QA-A9
ctgctgccttttgtccgcgtccgaggtctgctgctcagccatcggctttcaggtggcgcccgccttccgacgggcggccgcgtctgctttcggatcgatcctctgttgtctgttgcccggcctttccgagactgctccccccgtgctgtccatccgccgtttccttttgctgggggcatgcgcaggccccggccgccttgcccccgccttttccccgtctgctgctgcctgggtaagttgggtcgataggcagcccctcaccccgctcgtgtgtcccatctctaccctccaaatactgcccctctattcaaagtttgtggacagcatgtcattgaatgctgccctccccccttgttgctgcttgcgtgtgcctgcacagctccgccagcggccgctgctccttttgccctgtgtaccc

SEQ ID NO: 4125 - DNA, 492 bp, Chlorella sorokiniana
  unsure (1)..(492): unsure at all n locations; Clone ID: LIB3602-048-Q6-K1QA-B1
caagcgccagtctcccagtgcctgtgaggcgagcaagcaccggtgtgccacaccagcagaaccagccatgtccctgcctggctacgagcggctggagctgtcgggggtgctagacgccaccacagcccagctggtgcagctggtcattgatgcggtgaagagcggcaagaagaaggtcaagattgaggtggaggttgagggcaagctgtccgaggatggcaagtctgttgagctggagatcgagatcgaggccaaggagggcgaccgcaaggagagccgcgagctggagtactcggtgcccctgtgataaaccactgaaccagcctcaaatctgtacagctgctgcataacacctgctggccatttgtagttgggcgtttgccactccacttgctgcaactggatcaggctgcactgcctgctgntgtgcgtgctgctcaaatgttgcctctcttccatgtgctggcatgccatgtctcgtgttgctttgct

SEQ ID NO: 4126 - DNA, 52 bp, Chlorella sorokiniana; identical to SEQ ID NO: 124
  Clone ID: LIB3602-048-Q6-K1QA-B10

SEQ ID NO: 4127 - DNA, 486 bp, Chlorella sorokiniana
  Clone ID: LIB3602-048-Q6-K1QA-B11
caaacctgttccacactgtgcctcaggtcaagctggccaagcggttggtggagagcagctttgcggaccgcgtgttttatgccaacaccggcaccgaggccaacgaggcagccatcaagtttgcccgcaagtacgccaaagtgcaggccggcctggacccgtacaacgcggagatggcagagaactgcgccaccgagattgtgtccttcaccggctccttccacggccgcaccatgggctcgctggcactcacctacaaggaccagtaccgaacgcccttcatgccggtcatgcccggcaacgtgatggtgccgtacatggacctggaggcggcggcagcggtcatcaggaagggcaagacgtgcgcggtgtttgtggagcccatccagggagagggcggcatcaaccccgccagccgggagttcatgcaggggctgcgccggctgtgcgacgaggcaggcgcgctgctggtgtttgacgaagtgc

SEQ ID NO: 4128 - DNA, 504 bp, Chlorella sorokiniana
  Clone ID: LIB3602-048-Q6-K1QA-B2
cgccgagttccccatcacccaggacagcatcaccacgcagcagctggtgtacctgcgcatggcgcgcctgcaggaccccgcgcagctggccaagattaactttgagcaggacaacatcatcacccaggagaacgagtacgagatcctgcagctcatgatgggagacctgcgagacaggctgcaggcttatgcctccgagtatgatgatgacgtgaaggacctgcagcggcgcgacctcacgccccagcagcgcctggcggcgcagctgcggctgggcgagaagcgcatcctgcgcggcaccatggacggcgtgcgccgccggctggcgcccatccgcggcatcccaaccaagtcgggcggcatgcaggaccccaacgccgacttgatcgagatcttcgacaccattgagcagctgtcggcggcccccaagaagctgctggacggctttgggcgctggctgagcgggaaggacgatcctgagtggaagcggtgacaagggctccc

SEQ ID NO: 4129 - DNA, 504 bp, Chlorella sorokiniana
  Clone ID: LIB3602-048-Q6-K1QA-B3
cgcgcgcaccggcggcacgatgcgccgcatcacgcccggcgccgagcccgctgtcgagaccgccgccgcggcccgcccagccagcgccgccgctgccaacccatcagtggaactcattccctctgcggccgcccagcccgccgccgagcctgctcccgtcagcactgctcccagcagcagcggcccaactgtcacactggtggagccggctccccgcgtgcaggcggcctcctctggccggccctgagtgctctgagtgctcgggcacctcttgagtgcagcctcatggctgagctcgccctagtgatccgcagaatgattgctgcaacctcacaagttaggcctgcatgcacccccaacaagttagcctcccatctgtttgctcgttccttgcgttgccttgctcttctcttgggtgtctgcacatgcacgtggcactgctgacaggattcctccatctgtttgtgcgttgtcgcgcccaggctgccgtttaagaagctcccc

SEQ ID NO: 4130 - DNA, 422 bp, Chlorella sorokiniana
  Clone ID: LIB3602-048-Q6-K1QA-B4
ggcgcgccgcatctgcgtggacgccaaggtcaactaccccgctgcatgcaacgctgaggagaagattctggtgcacgagagcctggtgggggacaagctggactcgctcgtcaaggcgctgcatgaagcgggcgtgacgctgcatggcggtgagcgggcggcagctgactctggggctgccagccgccctctctgcgcggcacgagtacagtagcctgtactgcacgctggagctggtgagcggtctggaccatgccatctaccacatccacacccacggcagctggcacacggagagcatcatcacagacgaccaggcagcagctgacgacttcctgcggcgggtggacagcgcgtgcgtgttccacaacgccagcacgcgcttcaacgatggctaccgctttgggctgggtgctgaggtg

SEQ ID NO: 4131 - DNA, 409 bp, Chlorella sorokiniana
  Clone ID: LIB3602-048-Q6-K1QA-B5
actccatgggtggttacatgggtctatcatcagccagggagatatgcacgtgaaatagtgagtttttgttacgtgtcgagatgcaaatagcagaagcacaagtgagtgcaaacggtatcaaacgagccccagtgtggcgcaggacgccagtggcaatgccagggctgggccaacttggcgaacgcgctcatgcgcactccagcctagagggtgatgcgaatgaacacttcctccagagtggctattgctgacgccccagtccaccagatcgacctccttgctggctttcactgcctccatgcgagcaaatattgcataaatggccgcctcctcaactggcagcttgtacttttgtgtgccgccaagaacttacaccaggcgcgccgagggcaacaggcttttcacgatg

SEQ ID NO: 4132 - DNA, 501 bp, Chlorella sorokiniana
  Clone ID: LIB3602-048-Q6-K1QA-B6
cacacgcccaggcagagccgcaggatcacccgctgcccacacacgacaccacgatgcagtgcgtcgccagcagcagcgcgtgcctccgccccgtggcggctgcggcccagcggcgggcggctgtgacttccgcacgccctctggcgggcgcccggcccctgcagcccgctgcacgccgctccgtggctgcggccgccagcagccagcccaaggactttgacgagttcctgatggtggtggccgacaagtttgagaaggtggacaacaagcccgtggtggtcggctggctggtggcggccttctcggccattgtgatcgcagagtggttcatccacctgcccctgttcaacgtcctgctgggcttccccatccagtttgtcggcctggtggtcaccccctacctggcgctgcgctactacgtgaacaaggacggcagcccggtttcggacgccgagttcctggtgaacaagtacactgagcaacttccccggcctgggcaag

SEQ ID NO: 4133 - DNA, 504 bp, Chlorella sorokiniana
  Clone ID: LIB3602-048-Q6-K1QA-B7
gcgcccgccttggcttcattgctacccctccgccccccgcccactgcagtctcgccagctggcatgagcgactatgcggacgagggcgcgacagagggcccctctcctctgaacgagggcccccagcccttctacacgcaacacctggctcagctggagctagcggcctcgctggagggcgggcacagcggcgacaacctgtcagacgcagcagagccaacacccgggcaagaggcagcggcggcggcggcggcgcgggtgcacgggctgagggacgactttgcaagggagcgaacatcataggcggctggccgcaggcaggcagcaagtagaggtttgctttggcccactgacaagccatgacagatacaagtcgctgttgcctttgtgcttgacagggctgcaccttacgtcaggttaaacatagctggtcaataggccttcatttcgttcattgcagcaattttggcaggcccgtaccgctctttaccatatcctttttac

SEQ ID NO: 4134 - DNA, 500 bp, Chlorella sorokiniana
  Clone ID: LIB3602-048-Q6-K1QA-B8
ggccgccctttttttttttttttttttgcatggctgatatgttacaaagagcagatgggccgccaacatcagtcgcagatagaatagggtgacgagcttggactcgtgcttggcttgctggcacgtctccagcagcagcgaggagtcgtggaaggcaaagcagatgacctgctgcacccggccaatgatgtctgtgttgcagatgcgtgacgcctccagcagcggcagcccgtcgttctgtggcatctctatgatgttctcaacctgctgcagcagctcctggctctccgccggctgcttgctcatcgactgcggcagcaccacggtcagcagctccggcttctccgcacgcagcgcaccccggatcaccgccgcgttggtgcccgtcgcaccacttgtgaagatgtggttgcccgtgagcagcatggcgtaggccagcacctcgatcagctgctggtgcatgaagcccatgttgcgcgtgccaaagaatcccaggttgc

SEQ ID NO: 4135 - DNA, 398 bp, Chlorella sorokiniana
  Clone ID: LIB3602-048-Q6-K1QA-B9
gcggtggagagcggcaaggcgcagtgcgtggtgattgcgcacgacgtggaccccattgagattgtggtgtggctgccggcgctgtgcaagaagatgggcgtgccctactgcatcgtcaagggcaaggcgcggctgggcaccgtggtgcacaagaagacggccaccgcgctggcgctgacggcggtgaagaacgaggaccagcgcgagttcgccaagctggtcgagtccttcaagaccatgtacaacgacggcccccgcgtcagctggggcggcggcatcatgggccccaagagccaggcggcgcagaagaagaaggagcgggctctggccaaggacgccggcctccgcgtgtaagcgggcagcacccacctgccgcttaccgtgcgccgggccgggac

SEQ ID NO: 4136 - DNA, 279 bp, Chlorella sorokiniana
  Clone ID: LIB3602-048-Q6-K1QA-C1
caagagcggcaagcaggcgtgaatgaataacaagtgagcactcgctggacgcacaccctcagcttccgatccacatttcgtttttgccttccgggatccctctgatctacgcatgccctaccaagcctcaggttcctctgccaacttttttgcactgagcgcaccgttgtgccgggcgtggcgccctcttgtgtggccggcgccagcgtgctgtaccttgcacacctttgaacgagtgaaaaatcgatctgatctgcgcacctgtaacttattgctagc

SEQ ID NO: 4137 - DNA, 402 bp, Chlorella sorokiniana
  Clone ID: LIB3602-048-Q6-K1QA-C10
caaggccaaggccaccgccgccagccagtagatgggtgctgcctgcgggcgtgcgccccccgcgccagcccacatgtaatgctcgttggccaaaaaaaaaaaaaaaaaaaaaaaaaaaaaaaaaaaaaaaaaaaaaaaaaaaaaaaaaaaaaaaaaaaaaaaaaaaaaaaaaaaaaaaaaaaaaaaaaaaaaaaaaaaaaaaaaaaaaaaaaaaaaaaaaaaaaaaaattaaaaaaaaaaaaaaaaaaaaaaaaaaaaaaatggggggggggttttaaaaaaataaaaatttaataatcggttttttgaaaattatatttttttttaatggagtaaaaaaataaatatagtgggggatatttaaaaaatatgtttaagtatgaaaaaaactctggagttccc

SEQ ID NO: 4138 - DNA, 499 bp, Chlorella sorokiniana
  Clone ID: LIB3602-048-Q6-K1QA-C11
attgggtgaagggccactactaccgcgtgcccaagtactgcaagaccaagtggctggcctaccccgtggagtgctccacttgctccggctactactaggcaactagctgagcaaggcagggcagcctgaaacaggctcccatgtgccgacgctgctggcggcatgaggcacagcaccaagaaaggcagctttcaagggcggcgttgtgctggagcaggcatggccgccagtctggagcgccagctacagcacgttgccgcgctcgatggccctgccaaccagcctcgacgcacagctgaagcgctgcaacacacccgtgacaaaccgtgcaacagcagccacacactgcgttgcttgaaccccctttccgtgacccaagacccgatccattccgtgatctctcccatctgcaacccagcacactcccccattccctggaccccatgcatgaccctcccccctccctgaccccgaaccattccgatgaatgaaaccaccc

SEQ ID NO: 4139 - DNA, 266 bp, Chlorella sorokiniana
  Clone ID: LIB3602-048-Q6-K1QA-C12
ctagagcggttacatggttcaaacatgggtggcttttagcaatcaaagtacagtgaggggcaaggggggctctccattctatatcatgccgaggggcccttggacggtccggccggccgcaacagggagcaaatgcaactgataaatgggtggatcactccctaagggcgggggggggggctccatctcatccacaaacaggtgggtgtacgcaggcagggacctgacacccttaaagggggccagggtccctgaagactgggggg

SEQ ID NO: 4140 - DNA, 503 bp, Chlorella sorokiniana
  Clone ID: LIB3602-048-Q6-K1QA-C2
agcaggtactgggcagccatgacggcagctgaggtcaagctgttcgggaagtggagcttcgaggatgtggaggtgaacgacatctccctggaggactacattgcggtcaagcccaagtatgcgcgcttcaccaatcacagtgcgggccgcttccagaagcgccgcttccgcaaggcgcagtgccccatcgtggagaggctgaccaacagcctgatgatgcacggccgcaacaacggcaagaagctgatggcggccagcattgtcaagcacgcgtttgacattgtcaacctgctgaccgaccagaacccggtccaggtgctcgtggacgccatcatcaacggcggcccgcgtgaggatgccacccgcattggcagcgccggtgtggtgcgccgccaggctgtggatgtgtcgccgctgcgccgcgtgaaccaggccatctggctgatcaccaccggcgcgcgcgagagcgcgttccgcaacatcaagaccattgcggagtgcct

SEQ ID NO: 4141 - DNA, 426 bp, Chlorella sorokiniana
  Clone ID: LIB3602-048-Q6-K1QA-C3
gcagcgccaagccaagctggacggcggtgcgggcagcggcaaggcggccggctctgccggcgcagaggaggctgaggtggcggcgcagccggaggcaaaggcggcggctggaaaggcggccaagggcaaacgggggcgcagccggagcgcgagcgctgaggtggaggcggagggcgctgccgctaagaaggtcaaggcctgaagcagggcagaaggttatggaaggatgcggagcgacacttccgtgcaatgaggcggccgcatgcgccgcgccgcaacggcgctgagacgcgcgcatgcgccggcccgtgcgcgcccaaacaactgacggcaagcagcaacttgtaggcagcggatggagatgcataggcaggctgtgttctgagttatcaattgcaatcatgagcaatgtaaagagctgcgacg

SEQ ID NO: 4142 - DNA, 412 bp, Chlorella sorokiniana
  Clone ID: LIB3602-048-Q6-K1QA-C4
ctgcagctggccgccgagggctgccgcaatggctcaacttggtggctgtccatgaatgagacgtgcccgctccaggaggagggctgggtctttgtggaggcaattgtggcctgggagggcagcagcccccctacccaggaactgcgcctggaggttgcgctgtctgccactgaaaatttcaagcaggaggagcctgtggtgtacggcgagccaaacctgccctgcgggggcccgggcgagcagtgctgctaccacgacttcgagtggaccggcaacgtgacgtgcggcgcgggcttggcatgtgtagcctgcccagactggggccgcccaatctgccagccatgcggcgagccgcagccgctgtttacacgtggcatgggcgtgcagggcgtgggcaggtgcctgtctgttc

SEQ ID NO: 4143 - DNA, 136 bp, Chlorella sorokiniana
  Clone ID: LIB3602-048-Q6-K1QA-C5
cgcagcggcaccgcaacctcgttgcacggctgtgggcagagctgccattgcctatgcagctgctcctgctcgcattggctccaccaacctgtggctttgtggctcgtccccttgcactctgtaatgcatcagtggc

SEQ ID NO: 4144 - DNA, 502 bp, Chlorella sorokiniana
  unsure (1)..(502): unsure at all n locations; Clone ID: LIB3602-048-Q6-K1QA-C6
cggagctgcagcagaaggagttcacgcgcgagaaggacggctacaccggaacgcgccaccagagggaggctgcaaccgggtacttcgatgccgtcagcgaggttgtgtcccagggccagtcctccaccaccgcgctcaagggctccaccgaggccgcccagttctaagcagcggctttggttggcactgccggaagcatattgccggccttgcgctcggttggcacggtgggcgccgcttggattggcggccgccccaaacgaacatacaccccccaaactcctgtcaggaaaatgcgttaatagcagtgcgtgagacgcacggatgatacccctcacttgctgcctgttttccgggcgttgtgtggcgcgggtctggcccatattgtgccggcccgccctgcccgcccgcgctgncgncgngcagcacccagttttgttcccccatgcatgggtcttctgccagcccaggaccacgctacgataagttgtaaacacacata

SEQ ID NO: 4145 - DNA, 502 bp, Chlorella sorokiniana
  Clone ID: LIB3602-048-Q6-K1QA-C7
ctctgtgcgagcggcttggagcacaggggcaccatgaagttctccagcaccgtgaccagcagccgcaggaagtgcaggaaggcgcacttcacggcgccctccagcgcgcgccggaagctgatgagcgcgccgctgtccactgagctgcgcaacaaatacggagtgcgctcggtgcccatccgcaaggacgacgaggtgtctgtcgtgcgcggcacctacaagggccgcgagggcaaggtggtccaggtgtaccgcaagaagtgggtgatccacatcgagcgcatcacccgcgagaaggtcaacggcgccaccgtgaacgtgggcgtggacccctccaaggtggtggtcaccaagctgaagctggacaaggaccggcgccagctgctggagcgcaagcgcgcgggcaagggcctggccgacaagggcaagttcacggaggcggaggtggcggccatggagaacgtggactaagcgccacgcccaccccgcagcagccagcagc

SEQ ID NO: 4146 - DNA, 500 bp, Chlorella sorokiniana
  unsure (1)..(500): unsure at all n locations; Clone ID: LIB3602-048-Q6-K1QA-C8
cgcaggccgctgccgcccagcccggatggcacgccgcgcacagaggcggcgctgatggtgcacttggacccccacatccccttcatccctgccttcctgctcaactttgtgctgggcgtgctggcgccgtacatcttcaaccagatgcggcacgtgctggacacgctgtttgccgatgagtcgggcacgtacatgcagcgcatcgctgcccagccgcacctctaccaatacgtgcgccagcgcctgtctcagtacgaagaccagctgcgccctcagaccgaagaggaggcggcggccgaggcagctgctcgaaagaagccgcgccgcaagagcagccgcaccgcctcccccgcttgagcctattccactccagccattcgtctgatgtgcatgccgaaaccgncaccatgccatccgccacagcacaatttgttcaacgctttatcactcagcacagcagcactgcttttcctgtagcccactgcaccgcccgcttgcgt

SEQ ID NO: 4147 - DNA, 448 bp, Chlorella sorokiniana
  Clone ID: LIB3602-048-Q6-K1QA-C9
gcagcccaactccgctatccgcaagtgcgcgcgtgtgcagctgatcaagaacggcaagaagattgcggcgttcgtgcccaacgacggctgcctcaacttcatcgaggagaacgacgaggtgctcatcgccggtttcggccgccgcggccacgccgtgggtgatatccccggcgtgcgcttcaaggtggtgaaggtgtccggtgtgtccctgctggcgctcttccgcggcaagaaggagaagccccggaactaaacggcccgcgcccagcagcggcagcagcggcgcgcctcggcaacggggggcgccgcgtccgccagcactgcacctgcctggcggcggcttgggagggcgtgcagcgcatgcagcgtgcaccgccgcggccctcccgatagtttaggaccccacaaccagctccctctgctcccactactgatgtaacacgcaact

SEQ ID NO: 4148 - DNA, 378 bp, Chlorella sorokiniana
  Clone ID: LIB3602-048-Q6-K1QA-D1
gcgcccacgcgtccgataaaaaaaaaaaaaaaaaaaaaaaaaaaaaaaaaaaaaaaaaaaaaaaaaaaaaaaaaaaaaaaaaggggaaaaaaaaaaaaaaaaaggaaaataaaaaaaaaaaaaaaaaaaaaaaaaaaaaaataataaaaaaaaaaataaaataaagggggggggtctttttaagggccaagttttttcttcggcgttttggaacgtatttgttttttttttgttgcccctaaattaaattttaggggccgggttttaaaaccgttgggctgggaaaacccttggtttccccaattttattgcttttgaaaaatttccttttttcccaatttggattaaaaaaaaaagggccggatcggttgtcttttc

SEQ ID NO: 4149 - DNA, 488 bp, Chlorella sorokiniana
  unsure (1)..(488): unsure at all n locations; Clone ID: LIB3602-048-Q6-K1QA-D10
acgccggcaccttcacgatccagcgggaggaccacaccgtgggcaacctggtccgcatgcagctgcaccgcgacaagaacgtcgtgtttgcggggtaccgcattccgcacccgcttgagtaccagatggtgatcaaggtgcaaaccaacgggcgcaagacgcccattgcggcggtgcaggactccctcaaggaccttgaaggagaggtgcaagacatccggcagcagttcatgcatgcggtgcagcggtatgatgccggcggcggtcctggcatgtactaggctgctgtggcatgagcagcctgagctggaaccactctgccctctgactgccccctgaccttgaccttcagcactgtttgaccaccccgcttgactgtcctttctgctgcccgctgccttgctgccactttctcttcactctntatctgctgagcttcatgttaaagaacacactcntttnataaaatattatattaattttatttt

SEQ ID NO: 4150 - DNA, 62 bp, Chlorella sorokiniana
  Clone ID: LIB3602-048-Q6-K1QA-D11
gttgcacagaataaaaaaaaaaaaaaaaaaaaacaaaacaaaaaaaaaaaaaaaacaaatgc

SEQ ID NO: 4151 - DNA, 471 bp, Chlorella sorokiniana
  unsure (1)..(471): unsure at all n locations; Clone ID: LIB3602-048-Q6-K1QA-D12
ggagggctgcgcctcgtgcaccgagacgagctgctcctactgcctcagcggctacgcctttgccgacagcagcgagaaggcctgcaccaagtgcgtggatggcgacaagcgcggcgactgccagcctgtcaactgagcgaggtgcagcgagcgtaatgcaccctacaatgccgtgccagcaccaacgagagtgacaacccacgcctgggcggctctgttgtaagcttttcatgagggcgttatattgcatccaagacacgctgccacaaaatcatccgtccgacccccccgccccccctctgcttgatttctctccactcctgattcctgccacccactgccgattcctcgtgatctgtttctgccgcccccgcgctgcccgcactacaagcgaccaccaggctgcanaaccaagcttttttgctcctgccccttttaatatcatgcaccctgatgtaaccttactctcac

SEQ ID NO: 4152 - DNA, 499 bp, Chlorella sorokiniana
  unsure (1)..(499): unsure at all n locations; Clone ID: LIB3602-048-Q6-K1QA-D2
cgcagaaaggcagaccgcccatggctctggtatgctgtggcgatgcgcttccttgtaggcgagctgcgcctgtgcagccgcagcatgctagggcacctgtttcataccaagcaagcaagccatagcttcgtttctgcatactgcacagaacaagcttccattggttaatcccgtcctgccctggtgtcgggcagccaagccccgtgtattgggcccccttgcccagttcattgcaactgctattgcacatgttggcatctgtacgacaaccattggtctgctgttttccccaaggcccgcatcccattttgcatttcttgcgctctcccctgcattgagtcctcggttcattcgtgttcctgccctgttcggcctggcgcctctcgtcctgtcttccatccccaagggtttacgaaccctcgtctgctggggttttcttagccacatgtncgctacgtgtcagcctttcgtgttcctccctgtcgctcgtcagccttct

SEQ ID NO: 4153 - DNA, 272 bp, Chlorella sorokiniana
  Clone ID: LIB3602-048-Q6-K1QA-D3
attatatcaactcttgttcaggggcactattttaagatggggttctcaaccaagaattcaacccataaaaagaaaatccatactgaaaaaaacaagctcccaaagaataaaccaacctgccctccagtccgactgtcaagccccccctattgagaaacaaaactgagcccatttcaacttgtatggcccacgttgccatatagaccacaacaattggtctactgactaccccaacgcccgcataccataacgcaattagtaagcactctcca

SEQ ID NO: 4154 - DNA, 497 bp, Chlorella sorokiniana
  Clone ID: LIB3602-048-Q6-K1QA-D4
cggacgcgtgggcgcgccgtgtacgtggaccccgagaccggcaaggaggaccccgccaagaagggcatctgctccaacggcctgtgcgacgccaagcccggccaggagatcaccatgaccggccccaccggcaaggtgctgctgctgcccgaggaccccaacgccgtcatcatctgcgtggccaccggcaccggcattgcgcccttccgcaccttctaccgccgcatgttcatggagaacgtgcccaactacaagttcacaggcctgttctggatgttcatgggtgtggccaactccgacaacaagctgtacgacgaggagatgcagaccatcgccaaggcgtaccccgagcagttccgcctcgactacgcgctgtcccgcgagcagaagaaccgcaacggcggcaagatgtacatccaggacaaggttgaggagtacgccgacgaggtgttcgacctgctggacaacggcgcccacatctacttctgcggcctgaa

SEQ ID NO: 4155 - DNA, 419 bp, Chlorella sorokiniana
  Clone ID: LIB3602-048-Q6-K1QA-D5
gaaaaaaaaaaaaaaaaatatacaaaaacaaaaaaaaacaaaaaaaaaatctaaaaacaaaaaagacatctaattcagggggctctaattaacttgcgctttcttcaaccacctttttctttcttatctgttcggctttttttttgccccaggttttcttccccttccttctccttttatacctcttctttggccctccttattttacttttccttgccccgctcttttacacctccgtcaccttgtaaaacctcctgctttccccccctttttttccttttcatctctccccctttttcccattttgatttgccccaagaggcccctcatcattcccctttcccatttctttcgctccctaattaccatttgcccctccccttttttcagctctttcccctcgcgttttttttttttt

SEQ ID NO: 4156 - DNA, 499 bp, Chlorella sorokiniana
  unsure (1)..(499): unsure at all n locations; Clone ID: LIB3602-048-Q6-K1QA-D7
gctgcgcgggctggagaaggtggtcaaggcgggcaaggtgcggtacgtcggcgtgtccaacgagacgtcgtacggcgtgatgcgctttgtgcaggccgcggagcagctgggcctgccccgcattgtgtccattcagaacagctacagcctgctggtgcggggaccttttgagacagacctggctgagacgtgcgcgcagcggcagtgcaacgtcgggctgctcgcgtacagccccctggcaggcggcgcactgacagggaagtacatcgagggcaagaacattgagaaggcgcggctcaacctgttccagggctacatggctcgctacaacaagtcgctggccaaggaggcggtggcggcatacgctgatgttgcgaagaagcacggcctcacgcccacgcagctggcgctggcctgggtgcacagccgctggattgtggcgtncaccatcattggcgccaccaccatggagcagctgcgggacgacatcgaggccttc

SEQ ID NO: 4157 - DNA, 493 bp, Chlorella sorokiniana
  Clone ID: LIB3602-048-Q6-K1QA-D8
cggacgcgtgggcggacgcgtgggtcccgcgccgcctccccgggcggccccgccgccgcttctcagccggcatggggcccctctactgcgcctcaggcggcagaggccgacctagcggctgtcatcacgcagcagctggcagccacgcagcacacgccgtgcagcgaggagatcaggcggcactggccgcacgtgcaggagcgctaccaagagtaccggcggtgcatggcagagcagcagctgagccccgtgcgccttcgagcttttttcaagcacactgacgagcgcggcgtgccggcgctgtgatggaaattgattttaacttggcaatcattggcagcctgcgtcaatgcaagcagtactgttggaatactgggctgcctcctgctgctgaatcgggtgtcctttgcaaagcacgttttttcccagcaaattgactgcactcaaacaacgagtgaatgtaagcatgcacatacaaaagaaaaaaataaaa

SEQ ID NO: 4158 - DNA, 502 bp, Chlorella sorokiniana
  unsure (1)..(502): unsure at all n locations; Clone ID: LIB3602-048-Q6-K1QA-D9
cgagttgaagtatttcaagcccaagccggatttctacccgctgctgactgtggtgggcgtggcggcttccactgtggtctactgctcctaccgagccctggcacacaaccccgacgtgcacctgagcaagatccacaagcacgacgagctgagcgagagcgcggagcacatggagcgcgccgaaaagtactggcacagcatcttccgcaaggcgtggcttagccgcgtgcacgacggggacgtggtggacgcccgcatgatgcgcgtctaggcagtcgagacgcgtctaggcctggaggcagccccccgcctctgtgccacaccatgccaatgttaattgaaccccgccaacatacagcaacttcgagcgagccactcacaacaagacggcagcagctggagcgcgcnctgttaggaagccgncgtgcccagctgcatccaactactggcgagatgatgccacaaacgcatcagccgtgtgcttcatgtgaagtgctccctt

SEQ ID NO: 4159 - DNA, 503 bp, Chlorella sorokiniana
  Clone ID: LIB3602-048-Q6-K1QA-E1
cgtgacctccatgcgccgcaccgtgaaggccaagcccgtcaagtccgacagcgtgtggtacggcccggaccgccccaagttcctgggccccttctccgatggcctggtgcccgcctacctgaccggtgagttccccggcgactacggctgggacacctctggcctgtccgccgaccccgagaccttcaagaagtaccgcaccatcgaggtcatccacgcccgctgggccatgcttggcgccctgggctgcatcttccccgaggtgctggagaagtacagcggcgtgcagttcggcgaggccgtgtggttcaaggctggcgcccagatcttcgctgacggcggcctgaactacctgggcaactccggcctggtgcacgcccagtccatcgtggccaccctggtggtccaagtgctgctgatgggcgccgtggagatctaccgcgccaacggcgagggccccaacggcttcggcgagggccaggacaccctgtaccccggcggcg

SEQ ID NO: 4160 - DNA, 486 bp, Chlorella sorokiniana
  Clone ID: LIB3602-048-Q6-K1QA-E10
ggtacgcgtgggcgcatccagatcacgcacagcggcatctgccactctgacctgcaccagatcaagaacgagtggggcaacagcaccttccccatggtgcccggccacgagattgtgggtatcgtgaccgaggtcggctccaatgtcaccgacttcaaggtgggcgagcacgccggcatcggctgcctgatcgacagctgcggcaagtgcgagcagtgcgcggtgtctgaggagcagtactgcaaaggcggcatcttcacgtacaacggagcctaccctgacggcaccgccacccagggcggctacagcactcactacgtggtgaacaagcgctttgcgctgcacgtgcccaagagcctgccgctggagggcgccgcaccgctgctgtgcgcaggcatcaccacttactcccccatgcgctactacggcctggacaagcccggcacgaaaattggtgttgtgggcctgggcggcctgggccacatg

SEQ ID NO: 4161 - DNA, 208 bp, Chlorella sorokiniana
  Clone ID: LIB3602-048-Q6-K1QA-E11
tgttgctcctgccaatgcctgcactctgtggctccaagtgccgcccatccaaattttgctgactctgcttgtttgggcgtttcctcgccactccggcaccagaaccatcagaccgcctcaacgctgccacactcccatctgcttcctgtttagctgactcttatgatcaacggatgctccttaacagcagctgtaagcctcagcgtgc

SEQ ID NO: 4162 - DNA, 361 bp, Chlorella sorokiniana
  Clone ID: LIB3602-048-Q6-K1QA-E12
gcgacccgctgcaccagggcctgattgtggcgcgcgccaacctcaaggcccgcgactaccagatcgacctggcgggcgagctgaacaagacgcagatggtgtcggtggccatgccgctgagccagcaggcgggctactactgcaacgtgtgcgattgtgtgctgcgcgactcgcagtcctacctggaccacatcaacggcaagtggcacaaccgggcgctgggcatgagcatgcgcgtggagaagtcgaccgcggagcaggtacggcagcggctggaggaggcgaaaaagcgcaaggagggcggcagcagcagcgcggcggactttgcgccagatggctttgagcagctggcccagaagga

SEQ ID NO: 4163 - DNA, 500 bp, Chlorella sorokiniana
  Clone ID: LIB3602-048-Q6-K1QA-E2
gtgatcgcgtgcaacgttcgtcaccaaggcgcgtagggggacgcgggagtggtgcctgtgcgacgtgccgactgcgccactccaacctgctgcacgacgcaagtcgcatgttgagggcactcagcagcagggccgtcgtctatcagcggagcacgcttgtggcagtgcggcggcaatcggcagtgcagcagcagcgcacagtcatgagcgcagcagcaagcagcaccggcgtgagcctggtgtttgtgactgtaccttcggcagatgttggacgcaagattgccaactccctggttgagagcaagctggcggcgtgcgtcaacatcatccctggcgtggagtccatctacagctggcagggcaagattgagaacgaccaggagctgctgctcaagatcaagacccgcaagcagctgctgccggagctgacggagcgtgtgaagagcttgcacccatacgatatatgcgaggtgacggcagtagacgtgactggcggcagc

SEQ ID NO: 4164 - DNA, 503 bp, Chlorella sorokiniana
  Clone ID: LIB3602-048-Q6-K1QA-E3
gccccggagtactgccgagagtattgccagaacacgctggggggcgacacgttctacgtgggagaatactttgtggacctgcactggaatggctctgacctggactacaaccaggatgcggcgcggcagcggctctgcgactacatcaagcgggcggagtacacaaccctgtttgacttcccaacgaagggcatcctgcaggaggcggtgaagcacacccaatatgaccggctcaaggacagccagggcaaggcgcccggcctgctgggctggtggcccgagaaggcctgcacctttgtggacaactatgacaccggctccacgcagcagcactggcccttccccagcaagcacgtgatgctgggctacgcctacatcctcacccaccccggcataccctgcctgttctgggagcacagctttgactggggactggccgcagagattgacaagctggtggcgctgcggcagcgggcgggcatccaggccaactccaagctgga

SEQ ID NO: 4165 - DNA, 434 bp, Chlorella sorokiniana
  Clone ID: LIB3602-048-Q6-K1QA-E4
gcgatctaccagttctctgctcctgtgggcggccacatgaacgaggaccatgcggatgcgacccgtgccatggtcaagcactatgtgggcattacagtggacaaggcgctgatccagagcctggaccggctgggcatgacagtggtgtgcgagcggggcaaggacgcgctcaagtgccgcctgcccttcccccgccccgccaccgaccgcaagtccatcaaggagctgattgtggagatgacgcaggcctcggcgggcgcctttgcgtgagaaagggcagcctgatgcagctattacgtccgccggcgagtgcgtggctgcattgctgcctgcgagcttggtccatctgattatattatctccccccttcggtcctaaactcccgctcggtcaccccctcagagcactgctcagcttgcattggtgtaaaatat

SEQ ID NO: 4166 - DNA, 458 bp, Chlorella sorokiniana
  Clone ID: LIB3602-048-Q6-K1QA-E5
gacaccatgcacatggtcactcagtacaagaccggaacggcgtccatctacgcgcagggcaagcggagttacaaccgcgagcagtcctgatatgggggccagaccaagccccagatccacaacaaggtcaagaccaccaagaagatcgagctgcgtatggactgcaccgagtgcaaggtccagtacatgcacgccatcaagcgctgcaagcacttcaagatcctcggcgacaagaaggccaaggggctatactactcaaaaaaaggagagcagccagcgcagagcatgaccgacaaatggacgcagagtgcgcccgctcaccctgtgcgggctgctccccgccatgtgactatatttggtcgcctctggccacttatactcctgcttgtcatgcccttgaatacctgagctgtccacctgtcatgcaacggcctgtccgctgtaatgcattgcgtgtg

SEQ ID NO: 4167 - DNA, 500 bp, Chlorella sorokiniana
  Clone ID: LIB3602-048-Q6-K1QA-E7
agcacttctctatcccccaccgggctgccccgcgtctacgaaatatatgcacaccccgaacccaagcaccggtggcgggcgagctgcctatgctgcggcgctgataatgcccctctaatagctactcccaattccaccagaccagctcatacccctcccctcttgtcactgccgtgcgtcgcgccgccccgccccccaacggcggcgccagccttttcccaacgaccccgtccccccgtgccgcgccgcccgcattgccagcgacgccgtcgccgagtccatttttgccactgccctgccgaatccgcttttccccacttttcaacaacagaagcccccgcaaaacgcctttgcaaattgtcgaccctgcccagctggtttttgggtgcgtgcccgttgatacggtaacatttcccccttccttttttcccatgcacgtcccgtgctgctgcttcagggtgagcgagtccccacacagccctttcatcccctcttttccc

SEQ ID NO: 4168 - DNA, 326 bp, Chlorella sorokiniana
  Clone ID: LIB3602-048-Q6-K1QA-E8
gccaatggcttgaagcggaaagccgcactggtagttttaccgcatcccaccaacaacatgtgctagccgctctacggccaatgttcacacggcatggcaccgcgaacgagatagcccgtgctgactggcgcccagacaggacgattgcgcataacccgtatgcctgatgttgcttgcagaacactgcacgcaaccaaccatgccttttcccgcactgaccctcagccaacttttattatgcccccccgcccggctcactggcttgcatctgtactcttgccgtcatgtaaacatcactgcgtgcaaaataaaaataaaaaaagaac

SEQ ID NO: 4169 - DNA, 74 bp, Chlorella sorokiniana; identical to SEQ ID NO: 648
  Clone ID: LIB3602-048-Q6-K1QA-E9

SEQ ID NO: 4170 - DNA, 347 bp, Chlorella sorokiniana
  Clone ID: LIB3602-048-Q6-K1QA-F1
ggcaaatggataccgggacttcacgggccacatcgggcaggccaacgtggccaactttgcaacgccgcgcgagggctccgctgctccctatcgattcctgttccatgcccaggcagcaggcagcgggtcgcacgtgctggtgcaggtcaccgtcagcaaggcgccgccggcagcagccgtggtgatcaagggcggtgacgcggcggcggctgcacatgttcaggaggtgctgcagacgctgctgcttacgctctaaggcagaggcagcagcccacgcttgcatgttagcagcagccggcgcccccaagtatgtgactgcggcatgtaattgtaatgcatcgtattgt

SEQ ID NO: 4171 - DNA, 445 bp, Chlorella sorokiniana
  Clone ID: LIB3602-048-Q6-K1QA-F10
cagctccgtgtcgtcgctgcccagctacggcagcggcggctggcgcagcggcaagccggcgggcggatcacccgccggctcctcgcctgctgggtcctcgcctggctgcctcaccccgccgcgcttcgacctggtgtctccctgagggtcttttgcacagtcagtcccacgccgaaggcctgttgttggcctgccaagtctctaggtgctgaggccacgtgtcgcctaccgcagttgccggcggcgcctcccccttcaacccccactcccatcgtgtgaacgctaatctgccaaccatggatgattatatgccatgccgaccaaccaacctctgtacttttccgcggctccccggcacgccgttcatttcagtttaatctggacggccgctgcctgctgtactgcctttgccgctcaatgagcccctttgcccccggcgcatgtg

SEQ ID NO: 4172 - DNA, 489 bp, Chlorella sorokiniana
  Clone ID: LIB3602-048-Q6-K1QA-F11
ccgaacgttacttccaagcggacagccccaaccccttgcacagatgcagcccacgctgccatctcaaatctgcccacgcgaaaccaagaaacattggccgtcctggctaccttatgcccacgcatcccccgaatcctgcttttgacagcccttagtgaatcccatgcaatccagttttccttttcgctgcacccacccgcacccgatttcattccatcgcaccgcatgccccagccgcctgccgccacgctgtccacgcagcgctcagcccaccccaacgcactcctgcttcaatcagcccaggccccccaggcacccccagttttcggcatcttgaaacccttccttgcttgctcaatccctgatgaggacagttggcgctgctgcgtggtttcctctcaccctaccagcacagctccccaagcttcttcacgttggtgcgcgtgcactccgcactgctacctcaacccaaagccaccttcatttgcg

SEQ ID NO: 4173 - DNA, 208 bp, Chlorella sorokiniana
  Clone ID: LIB3602-048-Q6-K1QA-F12
taaaaaaaaaatataaaataaaaaaatacataaaaaattaaaaaaaaaaaaaaaaaagttttccttttttttatttctggggttaaatccaataaaagttccccgtttttactcttttttatcctctctttaattcaagtcctgtttttttttaattatccctttttttcctcccttcccccttggattaacctttttttttcccttt

SEQ ID NO: 4174 - DNA, 500 bp, Chlorella sorokiniana
  unsure (1)..(500): unsure at all n locations; Clone ID: LIB3602-048-Q6-K1QA-F2
agctggcaggctggtcgctgtgctaaagcagttatcatgcctctgcgcgcacccttgcaggccctggcatcggcggcgcagtgaaggagctttggaagaagaagtgaaggcggcacaactggctgctgcacacgtggcaaacttggctgctgccatggccagccacacgaagcttcttagttagtgccaaacacgtccgcccacatgcaacccatgaaatgaaccaacaatgccagcggcagctgccggagtggcgggtcacaagcagcggtagccgggccggtgcttggagagcagcagggcggcggcagccagggaagcaggcctgaggccacctctcggatgctcgccccacgatagctgcgcccggcccccgcgccagcctgctgcggttgcttgcccacttttttctcccagcgaacaacgcaagttgcaccgngcccnccttgccgcacccatcctgtgtaacatatgctgtacctgcgctgcggcatgctgct

SEQ ID NO: 4175 - DNA, 383 bp, Chlorella sorokiniana
  Clone ID: LIB3602-048-Q6-K1QA-F3
gcgagaaaaaaaaaaaaaaaaaaaaaaaaaaaaaaaaaaaaaaaaaaaaaaaaaaacaaaaaaaaaaaaaaaaaataaaaaagggggggaaaaaaaaaaaaatggagaataaatgggggcgccctttttagagttcccaagttttcgtacccttgcttgcgacgttatactttttctttagggccccctatttttatttctctggccctgtttttataacgttgtgattggaaaacccctggcgtcccccattttaatccctttcaagacattccccttttcgccagttggtgtttttgcaaagaggcccgcccctttcgcccttccaaacatttgcccaccctgattggggattgtacccccccttttatcggctctttaac

SEQ ID NO: 4176 - DNA, 423 bp, Chlorella sorokiniana
  unsure (1)..(423): unsure at all n locations; Clone ID: LIB3602-048-Q6-K1QA-F4
aaaaaaaaaaaaaaaaaaaaaaaataaaaaaaaaaaaaaaaaaaaaaagaacacccactataaaaaatccaacctaccgggggctcccttccaaactgggtgtctttccttttttctcccctcttcttcactcttttccccgtcttctttctccgtcttttcttctatattccctctctccccccacctttttctcctcttctctcttcctccttccttcgcctcgcntcctctccccagccccccctctttccctcccccttaaaccccccttccatcatgtgcactcttttccccccctcctgcatctcttttttccctgccgaccatccaccctctctccttttccccgtctccctcttcctcctctcctttccacttactcctgacggcctctcccttttttttcttgccttttccccc

SEQ ID NO: 4177 - DNA, 281 bp, Chlorella sorokiniana
  Clone ID: LIB3602-048-Q6-K1QA-F5
gaaaaaaaaaaaaaaaaaaataaaaaaaaaaaaaaaaaaaaaaataaaaaaaaaaaaaaaaataaaaatgacaatcgttgggggggcctctattatagggccttgctccccctcccttccttgcctttatttgttgtctcctttaatgcaacctacatttcctttgctttgctcctttcttccctgcgaacttcctgtcaatccccatctttttcccattttactctgtttccattcccccctcttttgtattgctgatgtggcccccaccagtccccctc

SEQ ID NO: 4178 - DNA, 309 bp, Chlorella sorokiniana
  Clone ID: LIB3602-048-Q6-K1QA-F6
gcggctcggtgtcccgctcctgcgtcacccagccatggcggcgatttccaagacccgcaaggccgtcgccgatggcgtctgggtacgctgaactcaacgagctcctcatgcgggagctgggcggggagggctactctggtgttgaggtccgcgtcacccccatgcgcacggaggtcatcattcgtgccacgcgcacgcagaatgtgctgggcgtcaagggccgccgcattcgcgagttgaccagtgtggtgcagaagcgcttcaagttccccgagggcttctgtgagctgtccgccgagaaggttgcca

SEQ ID NO: 4179 - DNA, 230 bp, Chlorella sorokiniana
  Clone ID: LIB3602-048-Q6-K1QA-F7
caaagaatggccccaccctggcgctttacccatccttctcaaccccaaaccattttcttcagccggcgccccgtggcgcgcctgccccaaaactgctgattgtgctcccaaatcagacgcttctcagtgcttgccctgccctgacccccgcatttcctctatttcgttagaaaaggcagcatgatagatggctcggccttgactcctccctcggaaccatgtgtaacctc

SEQ ID NO: 4180 - DNA, 214 bp, Chlorella sorokiniana
  Clone ID: LIB3602-048-Q6-K1QA-F8
caacacactgtattgctagagtatgcgattttgctgaattgtgacaaagccggccaaaaaaaaaaaaaaaaaaaggagaaaaaaaaaaaagggggggggtgttcgttataaagatgcgtgcttactgtagggtacataatatttcttatgttttgttgcgtgttaattattttttgttggctggacgtaaatttaatacactggtgagtggttt

SEQ ID NO: 4181 - DNA, 285 bp, Chlorella sorokiniana
  Clone ID: LIB3602-048-Q6-K1QA-F9
cacaatcgtgcatgttcccacgctgcgtgtataacacccccctcaccaggcactcccgtgtaccttgttgcccctgccccaccctctgacctcggcccactgcctgtgccctctgctggcgcgcgccacggctgcaatgcacgctggccgctggccgccgccagtcagcagcccccccctgctcccagcttcttttttatttcttgaattgcctctttgcccgctccaagcaccctccctccgaggccggcaaaggaacgcatgacccaatgtaactgtatccgg

SEQ ID NO: 4182 - DNA, 120 bp, Chlorella sorokiniana
  Clone ID: LIB3602-048-Q6-K1QA-G1
cgctcaacaaacctctttgtaaacctgccgctgaaaaaaaaaaaaaaaaaaaaaaaaaaaaaaaaaaaaaaaaaaaaagaggaaataaaaaaaaaagggcagtctactctgcggcccctt

SEQ ID NO: 4183 - DNA, 71 bp, Chlorella sorokiniana
  Clone ID: LIB3602-048-Q6-K1QA-G10
cccgcagaaaaaaaaaaaaaaaaaaaaaaaaaaaaaaaaaaaaaaaaaaaacaaaataacatacactaaac

SEQ ID NO: 4184 - DNA, 369 bp, Chlorella sorokiniana
  Clone ID: LIB3602-048-Q6-K1QA-G11
cgccgtggccctgaagcagcaggcgttcgctggcgcccgcgtggctgcccgcccctcgctgctgcccgcgcgcgccgcccgccgcgccaccgtgcagcccaaggccctggccggcttcactgaggttgcccagctcgccgagtccgaggctggcttcatcttcggcgtgtccggcgtgatggtggccattaccctgatcggcctggcgttcggctttgtgctgctgcgcgtggagtcccttgccgaggagggcaagatctgagcggtcttcccgtcccgacctaccaattttttcgtcagccctgatgcatcttatttggttccgaggcaagagaatttcccccattgacctgtaacgttacagcacgc

SEQ ID NO: 4185 - DNA, 500 bp, Chlorella sorokiniana
  Clone ID: LIB3602-048-Q6-K1QA-G12
gagatcctcaactcgccagagcgcgcgtgccacctggccaagcaggcgtttgacgaggcgattgctgagctggacacgctgggcgaggagagctacaaggacagcacgctcatcatgcagctgctgcgcgacaacctcacgctctggacctccgacatgcaggacgccgagcagggccgggaggcgggcggcgagggcgagatgaaggaccaggagtaagggcgggccccgcacggtgcgccctcatgggctcaccgccgctgtcggccgcagctgcacagccccgcaccgccggcgcggcccgccatcccgctgcgcgggcgcgcggagggaatgccttcccacaccacgacaacacttgagtcacgcaatgtacagcggcggccggtctggcggcgaggcagctccagctgacatgccgctccgctcgttgcatgcttgctcccctctctcagcagctgcagttcctgcctgacgctgcctaggttacactgctccct

SEQ ID NO: 4186 - DNA, 502 bp, Chlorella sorokiniana
  Clone ID: LIB3602-048-Q6-K1QA-G3
tgcttggctaccagacactcgccaacatgcaggccgcccttgccaagcccgcagccctggtggccaagcccaccgccgctcgcagcagccgccgctccactgtggcggtgcgcgcgcagcgtgacctgtggttccctggtgtggcggctcccggctacctggatggcagcatggcgggcgaccgcggcttcgaccccatgggcctgggcgccaaccccaagatgatgacctggtaccgccaggctgagctgcagaacggccgctgggcgatgctcggcgtggccggcatcctgggccaggagatcatcaaccccgcccagtggtggtacaccgcgggcatgcccgagaacctgccccgcttcgacggccagcccgtgaacatgggcggcatcctggcttgggagttcctgctcatgcacttcgtggaggtgcgccgctggcaggacatccgcaagaaggactccgtgaacgcggaccccttcaaccccaacctcaaggtgcc

SEQ ID NO: 4187 - DNA, 107 bp, Chlorella sorokiniana
  Clone ID: LIB3602-048-Q6-K1QA-G4
cttacgtgtattgctggcctgtacccatggctttcgtttgctgctgctccctccgcatgggcaccacggtgccacccgttgcaaaaaccgataattgctcttcgcac

SEQ ID NO: 4188 - DNA, 499 bp, Chlorella sorokiniana
  Clone ID: LIB3602-048-Q6-K1QA-G5
gcggacatcagcaagcagggcctgaactccatccagaatgagaccgtgaagctcaacctgatgggcaagtccaagaccatggagagcaaggactgggtggacccccagggccgcaagggcaagggctacggcgtgtaccgcttcgccaacaagtacggcgccaacgtggacggctacagcccgatctacacccccgacacctggtccgagtctggcgactcttacaagctgggcaccaagggccttattgcttgggccggcctgattgtggtgctgctgggcgtgggcatcaacctggtgatctccacctctgccctgggccagtaaatggcgacgccccccgcgtcggcagcagcagcagcagccagcagcattcccttgcagctaccccccgagaagacaaaccctcaccctaccctagctggcggcgtcaccatgcgccgctcccttgctttccgtttcactgtccctttcgttcctgcgttcgtttagtggagga

SEQ ID NO: 4189 - DNA, 170 bp, Chlorella sorokiniana
  Clone ID: LIB3602-048-Q6-K1QA-G7
aaaaaaaataaaaataaaaaaaaaaaaatataaataatataaaaaaaaaaaaaaaaaataaaaaaaaaaaaaaaggggggtatttttaatatatatattaaaataatatatctttattatttttttcatatttactttattttttttccattatttaaattttttttttt

SEQ ID NO: 4190 - DNA, 197 bp, Chlorella sorokiniana
  Clone ID: LIB3602-048-Q6-K1QA-G8
tccacacccataactctgctacttctccccgcccggtgcgctacacccacccctccccgtctccatgccatgctggggcccccaccctctctgtgccgcccattttgtcagcagcctttctttcattcctcggctgtgcggcagcgccgagtcctgcagtcattctgcatggcaggcgggtgtaatagcgaggcgtg

SEQ ID NO: 4191 - DNA, 501 bp, Chlorella sorokiniana
  Clone ID: LIB3602-048-Q6-K1QA-G9
ctcgtgggacaactaccgcgagctgttctcggtcattttgaacagcaacatgaacatggtgctgcccaacctgtggctgtgggacatggtggacgagtttgtgtaccagttccagtccttctcgcagtaccggggcaagctggcgggcaagtctgcggacgaggtggagctgatcaagacggcagaggcgcagggcgtgtgggagcccaaggcggtcattgccttcctggacgagctggccaagcgcagcgcgatccgcgaggagctggcgcagccgggcgccctggacaagctgtaccagaccgagggctacggcaccatgtccaacgtgcgccgcatgctgggctactttgcgctggtgggcctgctgcgcgtgcacagcgtgctgggcgactacgccaccgccatcaagtccatggcgccgctgcaccccttcctgcgcaagagcctgttcaccaccaagatccccatggcctgcatcaccatgttctactacaccgg

SEQ ID NO: 4192 - DNA, 493 bp, Chlorella sorokiniana
  Clone ID: LIB3602-048-Q6-K1QA-H10
gtgacgagcgctgcacagtctgctcttgcttgtgactgcgcaagactagcaggccccgctagcagcctttcagcagcagcagcaggcagcggggcaggatgagccttccggtggaggtgcacgagcagagctggcccagccgcatcggcgcgggtgtcggcgtcggctttgcggcgggcgcgctgactggtgccgtggcctccaactggggagacatcaaggtgcccacggcctggcccgcactggtgcgcaccggcagccagatggcgcagtacggcaccacgctggcgctggtgggcggcaccttcgccactgtggactgctttgtggagagcgctcggggcaagaaggatgcctggaacggcgtgctggcgggcgcagcatcgggcgcggccctgggcctgcggattggctccctgtcggcggctgtcaaggcggcggcggcgctggcactcgcctccgcaattgtggacctctcgggcggccggctggt

SEQ ID NO: 4193 - DNA, 392 bp, Chlorella sorokiniana
  Clone ID: LIB3602-048-Q6-K1QA-H11
atgaacttcgcggagctcaagcgctggcaggacttcaaggagcccggcagccagagcaagcagtacttcctgggcctggaggccgtgttcggcggctccggcaaccctgcctaccccggcggccagtggttcaacatgctgaacctgggcaagacccccgaggagatgaagaagctgcagacaaacgagatccgcaacggccgcctggccatgattgcgtgcctgggctgcgcggcgcagggcgtcatgacgcagaagggccccttcgccaacctgctggagcacctggccgaccccgtgtccaacaacctgctgggcaacctggccaccatcctgaagcagtaagcgtgctgccccaagccccggcctgggtgtgaaggctgccagggcgg

SEQ ID NO: 4194 - DNA, 473 bp, Chlorella sorokiniana
  Clone ID: LIB3602-048-Q6-K1QA-H12
gcgcggacgcgtgggctgcaggcaggactcgcaccactcacccgcctgacccatctggtcctatccgaacttaagtacgtgccctcctggccggccgcgattgctggaatggcagagctgcacacactttccggggcgcccatccaggcagaggcactgctgccaaccggcccatacctgcgcagcctgcgcagcctgcacatgccagcgcactccttggcaccaaacgcgggcacgcttgcagcgacagctcagctggaaacactggagctggactggccatgggggtggcggcgcaacacaccggttgatatcagctcgcaagaccttgaagccctgcgctgcgcagccggcctccccaggctgcggctgctgcgcatggaccttcacaaggcaggggccccctcgtgctctgttcgatgctgtggtttcgccggaccgtaccaccccctgcatgtttgtatcgaatagcg

SEQ ID NO: 4195 - DNA, 519 bp, Chlorella sorokiniana
  Clone ID: LIB3602-048-Q6-K1QA-H2
aaataaataaataaaactaaaaaacataataaaaaaaaaaaaaaaaaaaataattaaaaataaataaaaaaaccataaagggggcattaaataatcattggtttcccccccccctcctctctctctccccctattttaatggccccccccctcttaatatccctttttttttcccccctcctcccccctttttccttttttttttgcccccctaatttcttttcccttcccccttttttcccccccttttccttaaaaaccccctcccttccccccttttttcccctttccacccttccccctttttcccccttgcttttttttcaaaaaccccccccccttcctccttcccccccttttcgccccctcttattcccaatttcccccccccctttttccccccctttctccccccttgtttttgggttttccccccccagtttcccccctcccttttccagccccccttccccccccttcctttgccttttttcccccctcccttttctcccccccctt

SEQ ID NO: 4196 - DNA, 484 bp, Chlorella sorokiniana
  Clone ID: LIB3602-048-Q6-K1QA-H3
gcgcggacgcgtgggccgagcatcgactcactccaccccagcagccatggccgccacctgcgtcgcctccagcgccttcgtgcgctccaacacccgcgtgggccgccccgcccgccgcagcagcgtgaaggtgcaggccaaggccggcaactggctcccgggcagcgagacccccgcctacctggagaacctgcccgccagctacggcttcgaccctctgggcctcgccgctgagcccgcctccctggcccgcttccgcgagtctgaggtgttccacggccgctgggccatgctgggcgccgccggcgtcctgggcgtggaggtgctgggctacggcaactggtacgacgcccccctgcccctggttcagggcggccaggccacctacttcggtgcctctgtgcccttcgacctgggcaccctggctgccatttgaggttcgcttgccaatggccggcgctggagtcccttccccgcggcgctg

SEQ ID NO: 4197 - DNA, 222 bp, Chlorella sorokiniana
  Clone ID: LIB3602-048-Q6-K1QA-H4
gcgcgataatggcgatgacaatggcgacgacaacgacgacgacaactgaatccgttgatatgctcgctctggccgcctggtggccccagccttgcgcgcctggggacaaccccccttcagcgtttgtactgccccctacgtacagagcccttctgcactttctgactgtcaactcttttgcccaccagttgaacagcaaccgatgtaaactaaactgagcac

SEQ ID NO: 4198 - DNA, 427 bp, Chlorella sorokiniana
  unsure (1)..(427): unsure at all n locations; Clone ID: LIB3602-048-Q6-K1QA-H5
gcgatcccccgcaagtgctcgtggaccaacaagctgatcacggccaaggaccacggcagcgtgcagatcaacattggccacgtggacgagagcggcgtgtacaccaactcgttctccaccttcgcgctctgcggccaggtccgcgtcaagggcgaggctgacagcgctctggaccatctgtgggccaagaagcgggctgagatcggccagtgaagcgctgctgagttctagccgccagccggctgggctacacagctgccagccggcggtgggccagccagccttgggtcggccagtgatgcgctgcgaagcaaagtgctgagcgggcgggcgctccggcgcgccgccgccagccacgcagtgcaagctgtaacgcgcctccttgcaaantaaaaaanattaaaattattttttttttaaaaaggcg

SEQ ID NO: 4199 - DNA, 357 bp, Chlorella sorokiniana
  Clone ID: LIB3602-048-Q6-K1QA-H6
tccccggcgaccacacacgtcgcgctggcgtccctgatgaccctctgctggagcaccaccccagcttgccttgcccacagctactcagcactacccactgcggcggagctgctgttgccggaccgtagcggcgttgcacaggagctgcgcaggaggctgacgccccatcctgctccgtgcacgttgcacagttcccccagctttgttctcctgtttcgctgacctctccttgagtacttcacactgctgtaactgccgtctgagaaaaaaaaaaaaacagtcaaaaaactgaaggccaaccagacttgaaaaaagacaaagatacactaaaaaaaaaaatagataaaaaaacaaacg

SEQ ID NO: 4200 - DNA, 390 bp, Chlorella sorokiniana
  Clone ID: LIB3602-048-Q6-K1QA-H7
gtggagaacaagcgcacgaaggacctgactgaggaggagctgaccacgctgcgtgaggaggtggacaagtacaccggggagggcgacctgcgccgcttcaactcgctcaacatcaagcggctgaaagagattggctgctaccgcggccgccgccactacaacaacctgccggtccgtggccagaggacgaagaacaacgcgcgcacaaggaagggaaaggctaagcccattgccggcaagaagattggccgcaagtgagcgcggcgctgcggcggcgcatgacgcgtcacgggtgcatgccattgcagccccctccagccccactccctgcctttcttcctttcatgtgttcagtttagcatgcaacaggctgtaagaccattctatcaa

SEQ ID NO: 4201 - DNA, 469 bp, Chlorella sorokiniana
  Clone ID: LIB3602-048-Q6-K1QA-H8
ctccataatgcaccgaaagtgcttctaagcgggtggtatgtcggtaccgtccggcccggcgtagacaacgtgcaggcggccgacgggcagtgcggcgccaaacccctgatcttgctgcgccatcaccacaacacttacaccctcggctgccgttcgttcatgatccctgctgtttatgccactctcaataggatctatccaaccatatgtaatgtatactctggcaccatagacaacaaaaagatagaacgaaagtgaacgcagaactaaaacagaacaatgacacgtaacggatgcatgccattgcaaacccctccagccccactccctgcctttcttccttaaatggggtcagtttataatgcaacaagctgtaagaccattctatcaacaaataatatttttttaatttttaacccaaatttaaatttcggggccggggtttttaaaaaaatttaaaacgggaaaa

SEQ ID NO: 4202 - DNA, 497 bp, Chlorella sorokiniana
  Clone ID: LIB3602-048-Q6-K1QA-H9
atccgctcagtcaagcccatgccggcagccatcttccagccctgctgagcatgctgagcgtgctgcggtcgcggcatgctgtgcatgctgcggcaagccggctgcagcagccatcttccagccctgctgagcgcgctgtggtcatattcagccatgctgtgctttgctgcggccccaagccactgcgcgtttcggttcgagctaaatgcctgccccctgccccaaatggcggcttggcttgccgccctcaatccgaccctgcaccatatccaacagtcgccaggctgccgcatgctgagcagcggtggcatgactgcaggccgcagcggcacctttgaggttccaagcttgttcttcaagttttcaagctgctctgtgcgttgcatgtactcatttccagcttcagtcgtccgtgtcccctccctccttgccaattttgctgtgccctcagtcccctgcttccctgccttgctgctctcacattcagctgttcatga

SEQ ID NO: 4203 - DNA, 446 bp, Chlorella sorokiniana
  Clone ID: LIB3602-050-Q6-K1-A1
cggacgcgtgggtgaccctgggtctgcccgtggccgcggtgatgaattgcgccgacaacagcggcgccaagaacctgtacatcatctcggtgcacggctggggcgcgcgcctgaaccgcctgcccgccgccgcccccggcgacatggtcatggcgaccgtgaagaagggcaagcccgacctgcgcaagaaggtcatgcccgcgattgtggtgcggcagcgcaaggcgttccggcggaaggacggcacctacatctactttgaggacaacgcgggcgtgattgtcaacaccaagggcgagatgaagggctccgcgatcaccggccccgtggccaaggagtgcgccgacctctggccccgtgtggcggcagcagccaacaccattgtgtagagcggcggccgtccggctgggcgtcgcggcagcgcggaccacactgcagtacccacc

SEQ ID NO: 4204 - DNA, 402 bp, Chlorella sorokiniana
  Clone ID: LIB3602-050-Q6-K1-A10
cctgcccgccgctggcgacgatgaggagtacctgaaggagaacatcaagtcggccggcgcaatgaagggccaggcagtgttctccattgccaaggtggatgctgccaccggcgagattgctggcgtgtttgagtctgtgcagccttacgacactgacctgggagccaaggcccccaaggacgtcaagatcactggcctctggtatgctcagctttcgtaagcgctgccagcgcccgtcgtttggagaagagaattacagctttgtcgctcgacctgtttgtcagacgtagaactgctcatgtaacataagcgcgcaaaagagatcgaagcagaaagctgcagccagaggcgcaggggttcttgccagcgcccctcttgtctttgatgttcactaccgtatgg

SEQ ID NO: 4205 - DNA, 453 bp, Chlorella sorokiniana
  Clone ID: LIB3602-050-Q6-K1-A11
accagcggcaccatttgcattgacggcctgcacacgagcggcgtggcgctggacgcgctgcgccgacagatcgccatcatcccgcatgaccctgtgctcttctcaggcacgctgcgttccaacctcgacccttggggcaactttgaggatgctcggctgtgggaggtgctgcgggcggcgcagctgggcggtgcagtgtcggcgctgggcgggctggacgctcgcatgcaggaagcgggggacaacctgagcgtgggccagcgccagctgttctgcctggcgcgtgcgctgctgcaggacgccgacgttctggcacttgacgaggcgacggccaatgtggaccgagcgacggatgcgctgatccagcaggctgtgcgcgactgcaccaatggcgcgtttggcgggcgcaagcgcacgctgctggtcatcgcgcaccgcatagacaccatcatg

SEQ ID NO: 4206 - DNA, 452 bp, Chlorella sorokiniana
  Clone ID: LIB3602-050-Q6-K1-A12
accagcggcaccatttgcattgacggcctgcacacgagcggcgtggcgctggacgcgctgcgccaacagatcggcgtgatcccgcatgaccctgtgctcttctcacgcacgctacattccaacctcgacccttggggcaactttgaggatgctcggctgtgggaggtgctgcgggcggcacatctgggcagcgcagtgtcggcgctgggcggactggacgctctcatgcaggaagcggaggacaacctgagcgtaggccagcgccagctgttctgcctgacgcgtgcgctgctgcaagacgccaacgttctggcacttgacgaggcgactgccaatgtggaccgatcgaccgatgctctgatccaacaagctgtgcgcaactgcaccaatggcgcgtttggcggtcgcaagctcacgcttctggttatttcgcaccgcatagacaccatcat

SEQ ID NO: 4207 - DNA, 453 bp, Chlorella sorokiniana
  Clone ID: LIB3602-050-Q6-K1-A3
catgcaggtacagcgtgcagcaggacgcgctgtaccgcgactatctgctgatggcgaccggggacgaggcggaggccgaggcggcggacgagcgggtggatgacgacatcgagattgagggcggcccgcagctggcgcccaatgccaagtgccccatcaccgccaagccgatcctggagctggtggaacctgtgcaggatgccatgggcgtggtgtacgagaagagtgcggtggttggcttcttccgcacgctcaacccgcgggcaggcggccgcgccatcatcgtggcaggcagcacgcacgaggtcaccctggcagagctggtgccggcacaaaaggtgattcgagccaagaagattgcggagcggcggcggcgctttggcggcgcaggaccagcagctgcaggcggcggcgcggcggcggatgatgatgtgctcgacgtgtgactgcggc

SEQ ID NO: 4208 - DNA, 424 bp, Chlorella sorokiniana
  Clone ID: LIB3602-050-Q6-K1-A4
gggctactgccgcctcacgagcctgaccactagtgctgtggtttgtgagcagggcaagccggaggccgggtttcggggcgccctggaccaagagtttgaccgacgacaacacgctggcaggggggccatgcacgatcggcagtgccaggagcacatgaaggcgcgcacggagattggcactgtgtgcgcctacctagaatgtgatctgcaccgggaccaccatgatgccatggatcccatggatgcgtgcgctgaaatgaaggctgcggggtgcccgccacctgaggtggatctcgacacacaatgcgaccgtgatgaccctatgctggcggacaagagccacctgtgggacgcgcattgagccagcccagcccgccgtcgtcagcggaaagatcaacctgatggcggatgccgacgacgtgcc

SEQ ID NO: 4209 - DNA, 458 bp, Chlorella sorokiniana
  Clone ID: LIB3602-050-Q6-K1-A5
ggcgtgtgccaattgaaggtcgtctgctagcagcagctcgtcaccatggcggcagtggctgaggagcttcgcaaggagaccgtggaggatgtggaggaggatgttgatgatgaggtcagcagcgacgacgacgatgtgccggacctggatgaggccggcgaggagggcggcgcgcgcggcaagcagagccgcagcgagaagaagagccgcaaggccatgcagaagctgggtatgaagccggtgcccggcgtgatgcgcgtgcagatccgcaagagcaagaacatcctgtttgtgatcaacaagccggacgtgtacaagagcccctcttccgacacctacgtcatctttggcgaggccaagattgaggacctgtccgcccaggcggccggcgcagcagcagagcagttccgcatggcggaggccatgggcgcggcgggtgccggccccgcgcccgcgcg

SEQ ID NO: 4210 - DNA, 324 bp, Chlorella sorokiniana
  Clone ID: LIB3602-050-Q6-K1-A6
aaaataaaaaaaaaaaaaaaaaaaaaactaccaaaaaattaaaaatccaaagcaaaaaaaagccgaagacctcataaaggggagctttgtaacaatagtgggacattttaataaacgctttaactgcgaccatgccctatcgccagttctaggtgaagttgaatgagcgcacggatctcgccactttctgcaccgacctaaaattaaaactggaccggccctacaattattccatgtataccaaggacctgccgtcatatacgaacatatccagatgaccaacatcctgatgtttttgattacacaagacttacactcttcatg

SEQ ID NO: 4211 - DNA, 452 bp, Chlorella sorokiniana
  unsure (1)..(452): unsure at all n locations; Clone ID: LIB3602-050-Q6-K1-A7
gtgctccgctgtagccactcagcaccgcggctgcctgcggctagcacgcctgccgcccaggcagcgaccgcctgcgtagcgtgcaggccgatgaaagctgctgccacctagcgactggccgctgaaagctgcggccacttgcctctatcagacatccccaactcttcagccagccgatttgctgctgattgctgccctccctgctctgctctgccctgtgcaccgctgctgctccccacccttgcaccatcactccctctccgcgcatatgcggccacgcaacactgccccctcatgcccaccccccgcccctctcccggcgcatgtccccctctaacctctatccactttctccgtccactgactggcccttgtgctgngcaccaggactccattgacagcacgctctcctagcccgcagcctgccactgtgctggcaccatttactgccg

SEQ ID NO: 4212 - DNA, 337 bp, Chlorella sorokiniana
  Clone ID: LIB3602-050-Q6-K1-A8
aagccaccctggaagggctgccagcggagctgctgggccgagtgaaccagagcgggcgctggtcgttcaagcagatgctggcggacatgccaggcggcggcggcgatgggcgcacccctcccaaggcagagctcaacggcgtgccgggcggattcaaccgccgcctgcccgccgccgccggcacgcagcagcagctgagcgccgcgcaaaaggcggcgatgcaggcggtgtcgctgctcaccgggggcattgccgcgcacaggagcagttagaggcagcacggctgtgccgcaattatcacagtttgctccggagcgctgccaaagctcggcaaacc

SEQ ID NO: 4213 - DNA, 439 bp, Chlorella sorokiniana
  unsure (1)..(439): unsure at all n locations; Clone ID: LIB3602-050-Q6-K1-A9
cccacgcgtccgcggcggctaaccagtccgccaaggcgcacaagaacggcatcaagaagccgcagcgccagcgctacgtccagccgcaaggggtgagcacagactgctgcagcagtaggggctgcagggcgggcccgtcacgttgcctacacgctgcagcggcaatccccgtgccctgcagcatggctttgtgtagcaccgctcgaatccttgtgccaattgtgccccactctgctgctgtgcccccactctgctgcagcatggaccccaagttcctgcgcaaccagcggtacgccaagaagcaccaggccgccaagaagtgagctcgagcagcaggctgcagccagaggcgcagcggttcttgccagcgcccctctgcctctgatgttcactcccgtgtaatgcttcgttnacaaaaaaaaaaaataatgagaacaaa

SEQ ID NO: 4214 - DNA, 457 bp, Chlorella sorokiniana
  Clone ID: LIB3602-050-Q6-K1-B1
agaaaaaaaaaaaaaaaaaaaaaaaaaaaaaaaaaaaaaaaaaaaaaaaaaaaaaaaaataaaaagaaaacaaaaaaacatggggataaattcacaaaaatgggcggtccttttgggtgccccaggtttccttccccgtgcttgcgtcttcctattttttctctggggaacccttgtttgaacccattgtcactcgttttacaccgcattccctttgaaaccccttgcttttcccagtttagtccccttccgatcccccccctttccccttcctccattagtaccgaaatggcccgcccttttcacccttcccatcagttgcgcagactgtgtggctactgggacccgccctctttcgctcccttaacccctgcggtccgctgtttccccccattttttcccttactcttcccattcccctacttccccctcttatcgcttaattccctcctttttt

SEQ ID NO: 4215 - DNA, 459 bp, Chlorella sorokiniana
  Clone ID: LIB3602-050-Q6-K1-B10
aatgaaaaaaaatagaaaaacatggacgcaagaacaaagagaaccgatacaaaaagaaaagaacccagagaagaccaaaggggagtccctgtaccaccggcggattcttggaccccctttgtctggctgacgaccccgacaccctggctgagctgaaggtgaattagattaagaacggccagactcaccatgttgtccatgttctgatacttcgtgcaggggctagagaccggcaagtccccactgaaaaacctggctgaccaccttgcttatccgcctgtgaacaacggcttaaagggcgccaccaagttcctgtccctgacctgaacgccgccggaaagctgaagcgacctcgccatgccatattaacttaagccaggcggttttggacaatctcacacaacatatgatattcctaacctgcctgctcactgcttgtaacaatcctggctccctctt

SEQ ID NO: 4216 - DNA, 452 bp, Chlorella sorokiniana
  Clone ID: LIB3602-050-Q6-K1-B11
tggcgccctccaacgaggccgagctgatcaacatggtggccacctgcgctgcaatcgacgaccggccctcgtgcttgcgcttcccccgcggcaacgggctgggcatcgaccttgccagcgagggcatcacgcctgatctgaagggcacccctctaccgattggcaagatgcgtctgcggcgcagtggcagtgatgttgccctcatcggctacggcaatcccgtgaacgactgcctggctgcggccgaactgctgcagcaggcaggagtgtcggcgaccgtggtggacgcacgtttctgcaagccgctggacactgacatgctgcggcggctggccaaggagcacgctgtgatgatgactgtcgaagaggggtccattggcggctttgcggcacatgtcatgcagttcctgtgcctggagggcctgttggacggcaacctgaagttccgccct

SEQ ID NO: 4217 - DNA, 455 bp, Chlorella sorokiniana
  Clone ID: LIB3602-050-Q6-K1-B12
tgcagctctccaacttatcatactctgtctgggttcgtgatcaggctgcgactcttgcacaaagaggccttgcaggctgcgcaaaagagccgacccgcttgggaacagggccggcgcccgcctgcgcaggccagcagcaggtggccgcaagcatggcggaggtcattgggccgagtgggcagcgcatcaagtttgctgcaacaaggacggggctgctgcagctgccagaccctttgccacagccgctcgtgcagctgtcggagctgatgcaacggctggaagcaattggcatggtaccgatcttggatgacgggctggtgggcggcaactgcgcctgcaccgctggcctgtgcggcatgcatggcggcgccagcgggagcagcatcttggacgggtgcggcgagagcagcaatccagctggcagctgcgaaggcagcagcagcgctggggcaagc

SEQ ID NO: 4218 - DNA, 454 bp, Chlorella sorokiniana
  Clone ID: LIB3602-050-Q6-K1-B2
gctgccggagatctaccgcacactaggcaccgactacgcagagcgcgtgctgccctccatcatccaggagacgctggagagcgtgattgcgcagtacaacgcctcgcagctgctcacgatgcgtgaggtggtcagccgcgacatccggcggatactgacgcagcgggcgcgctacttcaacattgtgctggatgacgtgtccatcacgcagctcaccttcagccgcgagtacacgggcgcggttgaggccaagcaggtggcgcagcaggacgcggagcgtgccaagttcattgtggagaaggcggagcaggacaagcagagcgcgatcatccgcgcgcagggtgaggcgcagtcggccatgctcatcggccaggccatccagcagaaccccgccttcctgacgctgcgcaagatcgaggcggcgcgcgaaatcgcgtccaccgtgtccgcctcc

SEQ ID NO: 4219 - DNA, 460 bp, Chlorella sorokiniana
  Clone ID: LIB3602-050-Q6-K1-B3
gataaaaaaaatataaaaaaaaaataaaaacaaaaataaaaaaaaacaaataataaaaatacatcatacaaaaaacactgagagacaaaattacacagagggactgcctcaaagctgctctcttttctatgaggcggtcttcccccacctccgccttttactgactcattttttttttctttttccgcatttttcttttatcacctgttcatcacgcaactcactttcggacacgactctcttgcccttccttaagaccccttttgcgccctctccttttcttggcgtgccggcttcattgggtggccctccccccccgcctttcttatagcgatcatactggctcattgtgatttgcacccccctattctcgtcgcttttccattctgcggattcttttcttctcacgtttccccttatcttttccccgccctttttcgcgtttacctttttttttttt

SEQ ID NO: 4220 - DNA, 446 bp, Chlorella sorokiniana
  Clone ID: LIB3602-050-Q6-K1-B4
cggacgcgtgggcgacccgccctgctgccagcagtacctgtgctgcgacgggcagtgcatccagcctgacgaccaagagtgcggcaactgtgctgcagaggggggaacgtgcccagagaaccagatttgcgcgctcaacaattgcgttccggcaccgtgaccctgagttgagggtgcgtaagttcatgaccctccctgggtgctgcaacctgggcggcagggccagaacaggggcatgtggtcctgtacgctcaccatctttcctcctcatctgctggcttagctagacgcgggagctgcctggcaacaagccaagttgttatgccaacgcagtttgggcgcccccgtttgtctgccgcacgcctggtttgcagcgtgctaactcaccctcttttcattcaagcaaccgttccacaacccatcaccaacaccatgcttgccttaca

SEQ ID NO: 4221 - DNA, 463 bp, Chlorella sorokiniana
  Clone ID: LIB3602-050-Q6-K1-B5
agaacacaaaaacaaacccaacctgctaccaacaaaaaccaaaaactaaaacaaaacaaaaaaaacaacctaacaaaccaggagggcaacaacataaactgcaaaagggggaacaaacccaaaaaaggggggcccctctctaaaaacccagctttccggccccgtcaccccgaattaatggttctttatttgatgaccctaacttaaatctcctgcccgggctttaacacccataacactggaaaacccctctgtccccccaccataattcctttgaaacacatccctttttagacaccgggggtaactggcaacaggccccgcccttacgccctcccaaaaagtgcccccccctaaatgtgaaagggaccccccctttaacgggctaattaaccccgtgggggttgggggtaccccccaacggacccttaccatttgcaggcccccttaaccccattttttt

SEQ ID NO: 4222 - DNA, 457 bp, Chlorella sorokiniana
  Clone ID: LIB3602-050-Q6-K1-B6
gcgcggtggcggtggctgaggcgctgcttgatgcaggtgcgcccgtggatggccggccggtatctgaagcgcccgcggctggagaaggtgggagcggcgaggagccaatcgcgccgcccagcgacactcccctgcatgtggcagctagccagggccacacagccatggtgcagctgctggcggcacggggcgcagacctcaaagcgttgagcacgaacgggcagcgccccttggcgcgcacagggcgccaacccacagtttacggattcgttcggccagaccgcgctggacgcagcggcgggtggtgatgccgaagcacgccgtgctttgaagcgggaagcggcggcgcggcgcgtctgtgcctgctgcggcgccacgccggcagatggggtgcgcctgaagcgctgtgcgcgctgccgcctggtgcaatactgctcttccgagtgccaggcacggc

SEQ ID NO: 4223 - DNA, 453 bp, Chlorella sorokiniana
  Clone ID: LIB3602-050-Q6-K1-B7
ccgcccgcgagcgccgtaagccggctcaccaggactgagcgcgagctcaagcctgggctgagcctggcctgcggcggcgcctcggtgcgctgagggcgcacaagctcaagctgctcagtgtacgtagcgcaatcaagccccccacaagctgctgttgagagcatccacccacctgaacccacctgatcgctgcgccacatacaaccccgctttgatgcctgagagcgtgtctaatcgctgctgccgccgtcgcccggtggcggcaccatgcaagcaagctggctttcattaaacccactacctacatgctgcggacgctgcgccaaggatgcgagagtgtctcgggcgcccgcccgctacccattctttcctgcacacacctaccattgtcccgctgagcaaacgaacgacgcatttcccctctgaaacaaacctgcacctgtgcccacccat

SEQ ID NO: 4224 - DNA, 453 bp, Chlorella sorokiniana
  Clone ID: LIB3602-050-Q6-K1-B8
ggcgggctcggcggcggtgctggcgcagctcagcggcatgcccggcgtggtggcgcagcccaccaagtgcctcagagagtgccggcgctgcgtggcagtagagatggcatccggaggcggcggccgctgcgccgcagatgcgctgtacacgggcgtcaacgccgccaatgcggcaggcgtgctggccatgcaccgtgccaatgcagcgccctgcgcgcctgcgatgccgtgagcctgccacgccagccaggccagccgcccttagcgcaactgcccacccgccggcctgccatagcgccacctgtgctttactagcccctcgctcgctgccaagttttcccggctgcttttcccggctctgttgtacccgctgccttccgcttcaggctcccaagtaagcccgcttttccttgcctcccagccggccctctgcccctgcctgctggctgcctt

SEQ ID NO: 4225 - DNA, 452 bp, Chlorella sorokiniana
  Clone ID: LIB3602-050-Q6-K1-B9
gctgacccagctggtgatcatgggcgccgccgaggcgtaccgctacagcggcgagggccccgtggagaccagcggggactccctgtaccccggcggcttcttcgaccccctgggtctggctgacgaccccgacaccctggctgagctgaaggtgaaggagatcaagaacggccgcctcgccatgttctccatgttcggcttcttcgtgcagggcctggtgaccggcaagtcccccctggaaaacctggctgaccaccttgctgagccgtctgtgaacaacggcttcgcgtacgccaccaagttcctgcccctggcctgaacgccgtcgtcaacctggagcgacctgtgcatcccatattaacggcggccagccggttttggacaagcacacacaacatatgagattcccaacctccctgcgcactgcttgtaacaatcctggctccctcttg

SEQ ID NO: 4226 - DNA, 454 bp, Chlorella sorokiniana
  Clone ID: LIB3602-050-Q6-K1-C1
ccctgattctgggcatctggggtggcaagggccagggcaagaccttccagtgcaacctggcgtacaagaagctgggcattgcccccattgtcatgtccgccggtgagctggagagcggcaacgcgggtgagcccgccaagctgatccgccagcgctaccgcgaggcctccgacatcatcaagaagggcaagatggcgtccctgttcatcaacgatctggatgctggtgccggccgcatgggtgacgccacccagtacaccgtgaacaaccagatggtgaacgccaccctcatgaacattgccgacaaccccaccaacgtgcagctgcccggcgtgtacaagaacgaggagatcccccgcgtgcccattgtgtgcacgggtaacgatttctcgaccctgtacgctcccctgatccgcgatggccgcatggagaagttctactggaaccccacccg

SEQ ID NO: 4227 - DNA, 457 bp, Chlorella sorokiniana
  Clone ID: LIB3602-050-Q6-K1-C10
gcggggcctggccctcaacttctccgtgttctactacgagatcctcaactcgccagagcgcgcgtgccacctggccaagcgggcgtttgacgaggcgattgctgagctggacacgctgggcgaggagagctacaaggacagcacgctcatcatgcagctgctgcgcgacaacctcacgctctggacctccgacatgcaggacgccgagcagggccgggaggcgggcggcgagggcgagatgaaggaccaggagtaagggcggcccccgcacggtgcgccctcatgggctcaccgccgctgtcggccgcagctgcacagccccgcaccgccggcgcggcccgccatcccgctgcgcgggcgcgcggagggaatgccttcccacaccacgacaacacttgagtcacgcaatgtacagcggcggccggtctggcggcgaggcagctccagctgacatgcc

SEQ ID NO: 4228 - DNA, 455 bp, Chlorella sorokiniana
  Clone ID: LIB3602-050-Q6-K1-C11
ctttgccctgggggccgggcccatcccctggctctacatgcccgaaatcctgccggtcgaaatcctgggggtggctgaggccttctgcacctgcctcaactggacctccaacctgctggtgtcggccaccttccccatgctgttgggcacgctgggcatcgcgggcagctactgtgtgtacgccgcgctgaacgcaatcgcgggcctgttcctggcgaaaaggatggtcgagaccaagcagcagccggtggagcgcatccgagcactgctcatgggcgaagacagctgaaaaagcccacaaattcagcagctgtccatacaggaatagacgaaatgctctgctgccctgctatcctgccctcgccatgctctgccgtttcaattacttgcaagtacccgctcgtacaaacttagacggccaatgcccctccccggccacagctctctcccagccg

SEQ ID NO: 4229 - DNA, 237 bp, Chlorella sorokiniana
  Clone ID: LIB3602-050-Q6-K1-C12
cctgggccaacccatccctgctctacatgcccaaatcctgcgtcgaatcctggggcgggagcctttgacctgctaacgaacctcaacctgtgtgcgccaccttccatgctgtggcacctggcatccggcactactggttaccccctgaaccaatccgacctgtcctgcaaaagatggcaaccaacacaccggggagcgcatcgtcactgtatggctaaaaagctgaaaacccacaaa

SEQ ID NO: 4230 - DNA, 454 bp, Chlorella sorokiniana
  Clone ID: LIB3602-050-Q6-K1-C2
cgctgattctgatgctggcagacaccaccctgccgcccgagcagtgccacagctacatgaacgcgttcaacgcgctgggccgcattgtgaaggacgagggcgtgaagggcctgatcaccggcgccggtcccaccgtcgtgcgcgcctgcgcgctcaacatgggcatgcttgcgttcaacgaccaggccaaggagatgctggtggacatgggctatgtcaatggcggcaccgccctggttgtggacggcgccaccattgccggcttcttcgacatcgcctgctcgctgctctttgactatgtgaagacccagatgcacaagatgatgcccgacctcatcaccagcgagctgaccttcagcagctccatggactgtgtgtttaagacgctatgcaccatgggccctctggagttctacaccggcttcctcacgtactgcttgcgcatctccaccca

SEQ ID NO: 4231 - DNA, 433 bp, Chlorella sorokiniana
  Clone ID: LIB3602-050-Q6-K1-C3
cggcagcctgatggaggacgacgccaagatcaccgtctccccccggtaaattggcagcccttgtagcggcgccgcgcgcatttgtgcgcgcgccagcagcagcagcagcagcagcttgtatcatgactgcggccgtgggaggaggccgcggcgggcaaaggcctgagagctaaccaaccaagctccctggttaaggcctggggagcgccggggtcggcgccgcgcagcaccccgccgctcgaacctggcggccgagcagcggagcagcaggggcgccgtcccgccgttccctagcaggccctgcctcccttccgggggcggcgggccggcgcatgtgtgtgtgtcaaacctgtgttacctagttcaaccctgagaagattcaaacacccctcacgaatcacatatgcttttttgtgtgtaaacgcaagccgcc

SEQ ID NO: 4232 - DNA, 407 bp, Chlorella sorokiniana
  Clone ID: LIB3602-050-Q6-K1-C4
cgccaagaaatatattgagtcgggcgcgcacggcggcaaaggctccgacccacacaaagccgctgttaccggcgacacggttggcgacccagccaaggactgcagcgggccctcgctgcacgtccttatcaagatggtgtcaactatctctctagtgctggcgccgcttttcctggattgacgcagcatcggttgacggcatcaattggcggcaagcgccagaagcgtcctctgccggatgcatacttcttcactgcaccctctatgcggcagccagctgcaatgcaatactgccacgccacccatcactttgtaaacctgcatgaattcccattataccctccatgtaaggctgccgctccaaaaaaaaaaaaaaaaaaaaaaaaaaaaaaacaaaaaacagggag

SEQ ID NO: 4233 - DNA, 457 bp, Chlorella sorokiniana
  Clone ID: LIB3602-050-Q6-K1-C5
gtgcgctgcctggtgattgcggggcccggcttcgccaaggacgagtttcgggagtacctggacaaagaggcgcagcggcgcgaggcccgcgtgctgctgctcaaccgctccaagatcctgctggcccccgcctcctctgcctacaagcactccatcaaggaggtgctggctggcacggtggtggccgggcaaatcaaggacacaaaagcggcgcgggaggtgcaggccctccaagacttcatgacaatgctggggcaggacccgagccgagcgttctacggtccagggcacgtgcacgctgcgcacgagatgggggcaatacagacgctgctcatcacggattcgctcttccgcaccaccgacatcaagaagcgcaaaaagatggttgctttggtggacgaagtgactgcaggcggcggcacggtgcacgtgttcagcggcatgcacgccagcggcg

SEQ ID NO: 4234 - DNA, 453 bp, Chlorella sorokiniana
  Clone ID: LIB3602-050-Q6-K1-C6
ggcgatgatgcggcagacagcggccacaagccctggcccacccagtttgatcgagtgctgctggatgcgccctgctctggtaccggagtgcttgccaagcgggcagacctgcgctggaggcgcactcccgagcagattgagcacatggcatcgctgcagggcgagctgctggcggcggcagccagcctggtgaagcccggcggcgtcctggtctactccacctgcagcctggaggcatctgagaaccagcagcaggtggctgctttcctggccgcccaccccgactttgctgttgagccgccgcccgctgaggcgggtatccccgcccactgcctcagcccagagggatacctgttgatgctgccccacgtgcacggcacagacggtgcgtttgcggtgcgcctgcgccgcagcggtgacaatgagagcagcagtgcggcagctgaggaggcg

SEQ ID NO: 4235 - DNA, 400 bp, Chlorella sorokiniana
  Clone ID: LIB3602-050-Q6-K1-C7
gcacagcatgcctgcaggggcagcatgcccagctgccgccttgcggtgcggccacccagccagccctttggcaaagggcccccacccacatctccatccccttgtttgttgtaacatgacccctagctcgcaagccatgggccatgctggcttgctgaccggcaatttcatttcaccgccgcattcacattccatttggtttgtctgtaccacgcgcccattgccccatcttcaggctttgctgctctgcgcagcatgtatctcctccccctgtgtcttcctcccggcccatcccgcagttcaaaggaagtgcgctgcaccctttgcaacccaggcttcgttgcatgccatctccttccctctctcgctttgaacggcccgctgtaaagcagccttcccc

SEQ ID NO: 4236 - DNA, 343 bp, Chlorella sorokiniana
  Clone ID: LIB3602-050-Q6-K1-C8
cggacgcgtgggtgacgccccctgtggcttttgctcacgtgagtttcgccgtattgtgccaccccttgctttgccggtctgcctttcccactcctcccgcccgatctgctctgcctgcccttcccctccttggtggttcccttccccttcccgacttgcacttgtgtcgctgcccctcctgggcgttgcttgatgcagtgcatgaccttcgcagccggccttgggtaagccgtgttgttccccgcccgtgcgatgctttgcgctcgctcctcgctgttgcattggattcattcgatgtcgcagtgggcagcacaggattgtgctgaatggctgtaacccacgc

SEQ ID NO: 4237 - DNA, 456 bp, Chlorella sorokiniana
  unsure (1)..(456): unsure at all n locations; Clone ID: LIB3602-050-Q6-K1-C9
gcggacgtgacggtgaaggacattacccccatgggcggcttcccccactacggcgtggtcaaggaggactatgtgatgagcaagggcgcctgccccggcgtcaagcgccgcgtcatcaccctgcgcaagagcctgttcccccagaccagccgcaaggcgctggaagatatccgcctgaaattcatcgatacgtccagcaagttcggcaacggccgcttccagacctcggaggagaaggccaagatcctgggccgcctcaaggcctgagcccagaaggcgtgctgagcggggagcgcagcgcgcacagnacgccgcccgcccgccggcggcggcggcgctctgcgcccgcccagctagattgcggcgcangcgtangcggctgggccgctgcgccggccgcctgagtgccctgcagcagctgtgcatgcatgcctgggaggagcatgtaacaaacct

SEQ ID NO: 4238 - DNA, 454 bp, Chlorella sorokiniana
  Clone ID: LIB3602-050-Q6-K1-D1
tgcaccccaagcgcgttgtgttggtcaccgccagcagcgccagcgctggcagtgcagaggaggctgcactgctgcgggcctatctgcagccgctggagtttgcgcaaggcttttctggcgaggagacaatggagtttgcgcggcagctgtggagcggtcgtgacaaggtgccctacttcctcaaagtgcggtcgcgcccggcattggacacctgcagcagcagtagcggcgatgcagcagccgctgccgcctccctgtggacagagctgctgcagcagaactggcgtgtgcaattagatgcggggctgggcagcgacgcgccagacagcgaagcactgctgcttgtctgctcgccagacgcagcacggcagctgctggcagctgccggcgtccccgcaagcagcgacagcagcagcagcgcagcgggagcggtgtttctgctggacgtgggcgg

SEQ ID NO: 4239 - DNA, 453 bp, Chlorella sorokiniana
  Clone ID: LIB3602-050-Q6-K1-D10
accaacccagaggtcatgaccggcagcccagcaacagctttagcggcaattggctgggcagctgacgagctgggtgtggcagacccagcagccttctttggcctggcacccaccctgctgtccagtgatgtgtccaccctgcagcgcaaccttgacagcctgtagcaggcgcttggtttggcagctgagcaggcgcggcagctggcgctgaagcagcctccgctactgggtttcagcccagacacagtccaaacggcgcttgcctggctgcagcgatacatgtcagatgcagagcagctggcagacgtgctcagccgcggcgcacacctgctgaccaaaacagagcagcacctgcagggcaacgctgccgccctgcagcaggcgctgggctggcaggacggcgacggacagctggcggcttttgtggctgcctacccgcagccctttgccatc

SEQ ID NO: 4240 - DNA, 451 bp, Chlorella sorokiniana
  Clone ID: LIB3602-050-Q6-K1-D11
ggatgccgttcgccaggcaggtctccatcgggcgcgtggcgctcgtccagtacccggaggcggaggccggcaagctggtggtgattagcgatgtggtcagccccaacgcggacctggtggacttccccggccagacgcgtcgcgtgatcagcttcaagcggctggcactcaccgacttcacggtggacatcccccgcctcgccaagaaggcggtgctgaagaatgcgctggaggaggcggaagttgaggccaagttcgccaagagcgcgtggggccagaagctggccaagcgcgcggccaaggcggcgactaccgactttgaccgctacaaggcggcggtgcagaagatgaagcgcagcgcgcaggtgcgccgcgccttcaactcgttgaataaggccaccaagtgagcggagctcctcgtatccgcagtagccgcccaattcattgcgcc

SEQ ID NO: 4241 - DNA, 459 bp, Chlorella sorokiniana
  Clone ID: LIB3602-050-Q6-K1-D12
ctcggtcgtgccatgcccacctgcctacaacgcgacccttgatcaaccatcacccaaccgatgcacctgccaagcgggcactcaccttccgatgcgccacaacctctgccacccactcaccacccatcacccgctcaacgccctccatgcaccatcctacccattcaccaaatctgacaccccaaacgcacgtccgccgctgcaccacctggcggcccctcacccggacccatcttacacccgccacctttcctgccgctcaccgacgcacatcctacctgccacacctcactccatgtgcacccttcacccgcgcttcacacagcggctgctgccatgcaaagctgatgacaaacccatccatcatgctcgcacacgcactcactcacacgtacaacgtatccagacccattttcaaggcccgactgtacagagcctttctgcgtacttatgccgatc

SEQ ID NO: 4242 - DNA, 455 bp, Chlorella sorokiniana
  Clone ID: LIB3602-050-Q6-K1-D2
cgattccatcgcggacggcctgggcaacgctgcatcggccgtgggcaacgcagttaccggtgccgcaaatgctgtgggtggcgctgccaccgacgcctgggacaaggtgtctggctggagcgaggacgcctggaacaagaccaaggacacgtttgtgggagcttaccaatggacggagtgcaaggcagtggacgttgccggaatcgacctggacgcgtgctggtccgccccgccctctaacccctgcaccgaggcctgcaaggctgccgtggacaagatgccccaggactgcctgaaccgcatcatgacccaggtggtgaacgatggcaacgaggccagcatcgcgcggctggaggcgcagttctctgcctgcaacgtgaccttcaacatcctgccggctgatgtcaccgtgccgctgtttgacaacagcattgttggctgcgagaccgtggact

SEQ ID NO: 4243 - DNA, 441 bp, Chlorella sorokiniana
  Clone ID: LIB3602-050-Q6-K1-D3
gtgcaaggacaagtgcgagtgtggcgccaactgcgattgcaagggcaactgtggctgctgcggcggcaagtgagcggtaaaccatcgctggtcagggcagccgctgctgcctgaacccccctaaactcctgagagcgagtgagagcgcgaagtgcctttatgaggcttctgcctggagttaccggagcactgcccacccttccatgcctaaagatgtccattcagggcgcactccttgcaaaacacccgcccactgctgaaaaagaatgaccactgccaaaggccaagtcaaacccttgactgagcctgagcactgagtgcctacccccaacgcatgcccactttgctcctgtgctgctgactcctggcgcagccagtcttgcccccattcattaacagctgagctgacccaatgagatatgtaaggcttacgtactgcat

SEQ ID NO: 4244 - DNA, 458 bp, Chlorella sorokiniana
  Clone ID: LIB3602-050-Q6-K1-D4
gctaggcggcagctgcggcggctgccctacaacagcagctggccacggctgcctccaagagcgtctaccaatccaaggtggccagcctggtgctcctgatcaagaaagcgaaggcagccgccgatgtgccagccatggcggcacacattcctgcatctgcagcaggagacgcaacgcagccagcagcagggccagcagcaggagcaggacaggcagtacagtctgcggcagtgtctgcggaccaactgtcggcatcaggtgagcgaagccgtgcgtctagcggtggcggcaggcggcagtgcatgcgaatcaccgtgagcagccgcggcagacctgcaggctctggcagtcctgcccgtgacggttcagctgatggagcagacgggcgcatgcaaagccattcagaagctgcccaagcaccctgtggcgcctgtagcatcagcggatggggcttgcgt

SEQ ID NO: 4245 - DNA, 457 bp, Chlorella sorokiniana
  Clone ID: LIB3602-050-Q6-K1-D5
gccctaccgacaggccgagttgaagtatttcaagcccaagccggatttctacccgctgctgactgtggtgggcgtggcggcttccactgtggtctactgctcctaccgagccctggcacacaaccccgacgtgcacctgagcaagatccacaagcacgacgagctgagcgagagcgcggagcacatggagcgcgccgaaaagtactggcacagcatcttccgcaaggcgtggcttagccgcgtgcacgacggggacgtggtggacgcccgcatgatgcgcgtctaggcagtcgagacgcgtctaggcctggaggcagccccccgcctctgtgccacaccatgccaatgttaattgaaccccgccaacatacagcaacttcgagcgagccactcacaacaagacggcagcagctggagcgcgccctgttaggaagccgccgtgcccagctgcatccaa

SEQ ID NO: 4246 - DNA, 272 bp, Chlorella sorokiniana
  Clone ID: LIB3602-050-Q6-K1-D6
gcgaggcgtgtggcctgttcatgcagtccacggacagcgaggcgcggaagcgggaccacatcgagggcaagcagtggggaggctggctggccattcgtgagaagcacgaggagctgcaccaaaagctggggcctgcgggcggcgcatacccaccgatgagtgccctgaggcgagaagcgggacgaaggtgaggtgcctgaagcgcaccatcacagactacaaagaccgctcacgctcacgctcccacagccaggaccacgaggaccacgatc

SEQ ID NO: 4247 - DNA, 76 bp, Chlorella sorokiniana
  Clone ID: LIB3602-050-Q6-K1-D7
ggcggtgaagcacatcgcctgttactacgtccaaccgtcctaagagcgctgtaatccggactacatcacggtcccc

SEQ ID NO: 4248 - DNA, 415 bp, Chlorella sorokiniana
  Clone ID: LIB3602-050-Q6-K1-D8
cccacgatgagagccctgtagggctacttacccacatcggagccagggatggcgaccatacagatagccatcagcggggagtactcgcagcccctgagaccaaccattgaaccagccttaacactgtgcaggtgctggataacacacatgctcgccatcttccaaggtgcaccgtttcttcactccacctagactagcaacttggcactcaggcataggacatgcctgcgtggctggcgccgcgcctgatgcaacatgcatggccgtctcatctcctatgcatctatcaatgccatgctctagtgtcgctttgctgctctgttgattaaggtgcatacgttatggcagagacatgtaaacactgtcaaaaaaaaaaaaacaaaaggagcagggccttatgaaaagaactaaagag

SEQ ID NO: 4249 - DNA, 375 bp, Chlorella sorokiniana
  Clone ID: LIB3602-050-Q6-K1-D9
gccagaaagacccgcctgtaggcattacaccaacggcagggctcccccaactgcttcgctcccctcaagttccatgtgagggtcttgcacagtggacgcatccagctcctgacagcgtgcatccaacgaccgtatctttgcttaatctgctcgcaatcacaatggccggcctgctggtctaactcgtatccactgaaaaccacatggcgagctgcatgtcacactggcacacctatatagacattaagcttggtgcaccaatagcaaagacagcgggagcagatcgtcattcccaagaaacagtgcgcactccatgagcatatcatccactcccatgttcgctccattattgatgtggcatgttgtgccatcgct

SEQ ID NO: 4250 - DNA, 380 bp, Chlorella sorokiniana
  Clone ID: LIB3602-050-Q6-K1-E1
gcggtgaccaagcagccgcctcacaagccggcctgcaagaaacgcggtggccgtaaggccagcggcatctgcaatgccatgttctgctttaaagccagtggcacgggccgctacagctgctgcattggcatcggcttctgcaggggcagctgtgggctgttgggtggtctcaagttacacttgctgcacttcctgcctactgtttccgtgttgtgctttacaattcatatgcaatgtttcaacatgtgacacgtggtaaaccaagcactcgcttggtgtcttgagctcttagtgtgcaatcatgagagaaagaaacttcccctttgacttttaaattcatgcctggttttttttagttgttttactattttttttttttt

SEQ ID NO: 4251 - DNA, 457 bp, Chlorella sorokiniana
  Clone ID: LIB3602-050-Q6-K1-E10
accaagggcacgatcacctctgaggagtctgacaagctggaggacccgaacacacgctttgtctgcgtcttcgacggcgccttcgtctaggcgaacagccccccccatctgcccccggggcaacaaccggcaaccgcaaccctccctcgccaaaccgcatgccccgcaagccacggccgcgccctgctgcgccagcctttgcacacaacccctagccgtcagttcatgcaaccccaaccatcagccgtcgcaccgtgatacccccgttgcaccaatcctccccgccagagagcgcgctgctctcacgcccacatttcaagctaacacttgaccctgcactttttgccgcccataatcccctccgtcaatgaaacgaatgttatactgcccttctgcacccttcattttgcgcactggcacagttttgccctgatgctctcaattcgcgagcgcttcc

SEQ ID NO: 4252 - DNA, 455 bp, Chlorella sorokiniana
  Clone ID: LIB3602-050-Q6-K1-E12
tgaactggcggtagagcggctcacagttgtggccttgggcgcgctgggcgggcggttggaccacacgcttgtgaggctgtccaccctgcactcttatcgagacctcaacctcatcctcatgggggagggaaacctagcccgcctggtaccggcgggccgctcgctcatccggccgctcagagatgtggaagggccgacctgtggcctggtgcccaccgctgggcgcgcaatcaccagcacacggggcctgcggtatgacatggatcgcatggagatgcgtttcggcggcttggtcagcagcagcaatgcgatcgaggcggacgaaatagaggtggaggttgatgtggacattgtgtggaccaccgaactccagttgcactgatcccatggaccgacacaagcggcacaaacaacgacacagacagtgtacctagctacacaatgttgtgatgcct

SEQ ID NO: 4253 - DNA, 188 bp, Chlorella sorokiniana
  Clone ID: LIB3602-050-Q6-K1-E2
aaaaaaaaaaaaaaaaaaaaaaaaaaaaaaaaaaacaaaacaaataaaaaataataaaaaaaaatcatttacaaccccgtggttccaatttaaaaatccttctctatcccccttcctcttttttttcctctccttttatcctctcccccaattttttcattcctctacttttcttttttcttcttatt

SEQ ID NO: 4254 - DNA, 454 bp, Chlorella sorokiniana
  Clone ID: LIB3602-050-Q6-K1-E3
cccttgctcctcaccgaccaggaaccaggaccgacagaggccaaaccatgcaggctgtgtcgtgcaaggccaccttcgcccgcccggcggcccgcaccgctcgggtgagccgccgcggcgccgtggtggtgcgcgccgactatcttggctccaccaccaaccagatcatggtgctgtccaccttcctgcccctggtggcgggccgcttcggcctggcccccacctccacccgccacaccaaccagtctggcatcaagctgctgccggctgagaagtccgccggcctggtgtccaacgaccccgctggcttcaacgcggtggatgtgctggccctgggagctcttggccacattttgggctgcggcattgtgctgggcctcaagagcaccggcaacctctgagcggctgccgcgcggacccacaagaaaccttgtttctagcctgtaactagaag

SEQ ID NO: 4255 - DNA, 448 bp, Chlorella sorokiniana
  Clone ID: LIB3602-050-Q6-K1-E4
cccttgctcctcaccgaccaggaaccaggaccgacagaggccaaaccatgcaggctgtgtcgtgcaaggccaccttgggccgcccggcggcccgcaccgctcgggtgagccgccgcggcgccgtggtggtgcgcgccgactatcttggctccaccaccaaccagatcatggtgctgtccaccttcctgcccctggtggcgggccggttcggcctggcccccacctccacccgccacaccaaccagtctggcatcaagctgctgccggctgagaagtccgccggcctggtgtccaacgaccccgctggcttcaacgcggtggatgtgctggccctgggagctcttggccacatattgggctgcggcattgtgctgggcctcaagagcaccggcaacctctgagcggctgccgcgcggacccacaagaaaccttgtttctagcctgtaac

SEQ ID NO: 4256 - DNA, 430 bp, Chlorella sorokiniana
  unsure (1)..(430): unsure at all n locations; Clone ID: LIB3602-050-Q6-K1-E5
gcagcaacagcaggcagaggatgcggcgtcgctgtcgatacagacacaggcggctgcaccagaggatggcacgcagagagcagaaggtggcagcagacactgcatctgcagcaggagcagcggcggcaggagcagcggcggtagagccgggcgccaagcgtgagggctcccctcgagctgtgctgatgcaggagcagagcagccatgatagtgatcagcagtccctgcctgtgaagcaggaaggcgcggcagtggcggcagcagcagcagcagcagcagcagcagcagcagcagcagcagcaaccacgtgaaggccactcttcgtccccttgcatgtctgtcgcatttcttgcatcatttcattacgcatgcactgattggctgcatgcacgaactgccttgcattcaaataagacatccacnanaaaaa

SEQ ID NO: 4257 - DNA, 414 bp, Chlorella sorokiniana
  Clone ID: LIB3602-050-Q6-K1-E6
gccccactagtttgcttatgattctttgtctctgtctatacatacacatgctgttgcaccagaggatggcacgcaggggcggaggtggcagcagacactgcatctgcaccaggagcagcggcggctggagcagcggcggtagagccggcgccaagcgtgagggctcccctcgagctgtgctgatgcaggagcagagcagccatgatagtgatcagcagtccctgcctgtgaagcaggaaggctcggcagtggcggcagcagcagcagcagcagcagcagcagcatcagcagcagcagcaaccacataaaggccactcttcgtccccttgcatgtctgacgcatgtgttgcatgattttattacgcatgcactgattggctgcatgcacgaactgccttgcattcaaataagaca

SEQ ID NO: 4258 - DNA, 450 bp, Chlorella sorokiniana
  Clone ID: LIB3602-050-Q6-K1-E7
gggatccagctgggcctcaactttgcctggtccccgctcttcttcaagctcaaggacctgcgcctggcgtccatggagatcaccgcgctggtgggcatggtggcggccacgatctatgagttcagcaaggtggacacgctgtcggcgcagctgctgctgccctacctggcctggacctcctttgctgcggcgctgaccatcaacatctaccagaacaaccccgacaagcgaaagcctgccagcaaggcgtcttgagcggcagcgcagcgtgcctgccccccgccactcagcccatgccgcccccaggagggccggcctgccaagaaggcggtcaaggaggtggcaggcgccaaggccgccctgcaagacctgcaagaagcgatggccaccaaggcgcgccaggcgggagaggcggcgcacggcggcgcctctgccgccaccgccacggct

SEQ ID NO: 4259 - DNA, 327 bp, Chlorella sorokiniana
  Clone ID: LIB3602-050-Q6-K1-E8
gcggctggtggcgctgcggcagcgggcgggcatccaggccaactccaagctggagatcctggccgccgagaaggacatggacgtggcccgcatcaacggcaacgtgacagtgaagcttggtccccgctatgacatgggcaacctgttgccccgcaaggaggacggctggtcgatggccgcctctggaaaggactttgcagtgtgcgagaagaagtgaggtgggcagtcgctcagggctgctgcggtgcggcatgcacgcattgtgtgcatgtgctgctgccattttcgctgacgtcaaccacagctgtgtgttggaccttcgtgccc

SEQ ID NO: 4260 - DNA, 454 bp, Chlorella sorokiniana
  unsure (1)..(454): unsure at all n locations; Clone ID: LIB3602-050-Q6-K1-E9
accaagggcacgatcacctctgaggagtctgacaagctggaggacccgaacacacgctttgtctgcgtcttcgacagcgaccttcgtctaggcgaacagccccccccatctgcccccggggcaacaaccggcaaccgcaaccctccctcgccaaaccgcatgccccgcaagccacggccgcgccctgctgcgccagcctttgcacacaacccctagccgtcagttcatgcaaccccaaccatcagccgtcgcaccgtgatacccccgttgcaccaatcctccccgccagagagcgcgctgctctcacgcccacatttcaagctaacacttgaccctgcactttntgccgcccataatcccctccgtcaatgaaacgaatgttatactgcccttctgcacccttcattttgcgcactggcacagttttgccctgatgctctcaattcgcgagcgc

SEQ ID NO: 4261 - DNA, 130 bp, Chlorella sorokiniana
  Clone ID: LIB3602-050-Q6-K1-F1
aaaaaaaaaaaaaaaaaaaaaaaaaaaaaaaaaaaaaaaaaaaaaaaaaaaaaaaaaaaaaaattaacaaaatattaacgtgtaactttttcaaaaatggcctttcccctctatttttctaagttttcct

SEQ ID NO: 4262 - DNA, 80 bp, Chlorella sorokiniana
  Clone ID: LIB3602-050-Q6-K1-F10
gttgatggcacgctggacacatccatgtaacgctgctgcgcaaaaaaaaaaaaaaaaaaaaaaaaaaaaaaaaaagagag

SEQ ID NO: 4263 - DNA, 329 bp, Chlorella sorokiniana
  Clone ID: LIB3602-050-Q6-K1-F11
aaaaaaaaaaaaaaaaaaaaaaaaaaaaaaaaaaaaaaaaaaaaaaaaaaaaaaacaaaaaaaaaaaaacaaacaaagtgaagaaatttaaaaaaaggggcccgttcttttatttcctcccctcttcttttttcgttgtcccattttttttcttttttctttcttccaccttctttttttttggtcgcccctttttttcccctcccttccctggtttccccctgtttctcccttttttagcctttttccctttcctcctttttcctccgtttggctttccccttggcccgccccccttgatctctatttcccccttctcttctttcttt

SEQ ID NO: 4264 - DNA, 311 bp, Chlorella sorokiniana
  unsure (1)..(311): unsure at all n locations; Clone ID: LIB3602-050-Q6-K1-F12
gcgaacaaaacaccttatcaacctctcaaacacgacccccgcttacctctagcaatctcccacgcgcgccaagcctacgccttccctcccacagactgcgccgatccctacctgcgcctgtcancaacnatatatgccggtggcgctagcaagatctcccctgaccgcgcgggctgccgtctccagcgcccacctgcagccccaccgtgcctccaaccacctgctgccacaactgctagtggccgtggcaatgctctcccaaggagcggcttccctccacttccttaccagcttcgtctgtttctacactg

SEQ ID NO: 4265 - DNA, 214 bp, Chlorella sorokiniana
  Clone ID: LIB3602-050-Q6-K1-F2
gctgggggcgcccgctccctgccgctgtatgctgcctgtactcccgagcgagaaaatttccaccaccgtcattgttggaatctatgaaattcaaaagaaaaaaaaaaaaaaaaaaaaaaaaataaaaaaaaaaaaaaaaaaaaaaaaaaaaaaaaaaaaaaaaaaataaaaaaaaaaagaaaaaataaaaaaaaaaaagggcggccgttttaaa

SEQ ID NO: 4266 - DNA, 458 bp, Chlorella sorokiniana
  Clone ID: LIB3602-050-Q6-K1-F3
ggccaggccagcgaccagcagtttgcggagaacatcgggctcaagttctacacgccagaggagcagttcggggagaggcagctgggcgacaagctggcgcccagcaccgacagcacgggcctgaacaccgagctggccactgtctttcgcaagctggccgagaaagtcgcaggcgagcccttcaaggcagccgccttcaagaaggtcgccgacatcatcgatgccttcccagaaaagatcacctccgcctcccagctcaaggactccaagggcgtcggcaagagctcgcttgccaaggtcacagagtggcttacaaccggcaccctggcaatccttgaggaggctggcgctggggtgaacgcgccggaggacaagtcagcggaggtggccctcaagttcctgtgaggggctctggagtcgccccgctgccctggtgtgcggccatgcttcagccagcg

SEQ ID NO: 4267 - DNA, 462 bp, Chlorella sorokiniana
  Clone ID: LIB3602-050-Q6-K1-F4
aaaaaaaaaaaaaaaaaaaaaaaaaaaaaaaaaaaaaaaaaaaaaaaaaaaaaaaaaaaaaaaaaaaaaaaaaaaaaaaaggggaaaaaaaaaaaaaaaaaaaaaggggcccccctttttaggggatccatttttacttccccgtctttgcaacttaatattttttttttggtgcccccaaattccattactgggcccgtcttttaaaaccgtggtgtctgaaaaacccttggcttccccaaattaaatccctttgaaaaaaatccctttttccccatttggctaaaaaccaaagagccccacacaaatcccttttccaaacatttgcccaccttaaatgcaaaatggccccccctttttacccgcactttaagcccggggggtggggtgtttccccccagggtcccctatacttttgccagccccttagcccccgctttttccgtttttttcctttctttt

SEQ ID NO: 4268 - DNA, 456 bp, Chlorella sorokiniana
  Clone ID: LIB3602-050-Q6-K1-F5
tccctgaacagcctaagtgtgatcaggcagcaaacccgacaccccgacaaccctgtgggcgccggggcctgcccagtgcgccaccgggcttcgtgggacgccccgcgcaccatcgtgagcagcagagcccaaggaaatggcggccggtggcaacgccagcttccctgttaccacgggctcggcgcccgggccggcggcgctgccgctcgctgacgccgctctggacatttttccgtctctcaacgacactgatctggcgcacgaaattgctgccgacctcgggctagtcagcaacctgaccactgcggcgcaggcgtccagccgtggcggcacgcctggctggaccactggcctgctagcagccctgataagcgtggctgtgatcatttctgtgatcacagtcttcgtgctgatccaccgcaatctgcggcgccagcggcgggaggtgctggagtc

SEQ ID NO: 4269 - DNA, 212 bp, Chlorella sorokiniana
  Clone ID: LIB3602-050-Q6-K1-F6
ggttggaccgcgtttggggagcccaagatggtggcggacaagaaggccagcaaccccatgcgggagatccgcgtgtgcgggctggtgctgaactgctgcaccggcgagagcggcgatcgcctgcagaaggccgccaaggtgctggagcagctgactggccagcagccggtgtttggcaaggcgcgctacaccgtgcgccattggaccattcg

SEQ ID NO: 4270 - DNA, 453 bp, Chlorella sorokiniana
  Clone ID: LIB3602-050-Q6-K1-F7
gcggagcagggcgtggcctccttctggcgcggcaacctggccaacgtggtccgctacttccccacccaggccttgaggtttgcgttcaaggacaccatcaagggcatgttccccaagtacaactccaagaccgacttctggcccttcttcgccgtcaacctggcgtcgggcggcctggccggcgccggctccctgctgattgtgtaccccctggactttgcccgtacccgcctggctgctgatgtgggctccggcaagagccgcgagttcaccggcctcgtggactgcatcggcaagaccgccaagcgcgcgggccccatgggcctgtaccagggcttcggcgtgtctgtgcagggcatcatcgtgtaccgcggcgcctacttcggcctgtacgataccgccaagggcgtgctgttcaaggacgagcgcaacgccaacttcttcgcgaagtgg

SEQ ID NO: 4271 - DNA, 438 bp, Chlorella sorokiniana
  unsure (1)..(438): unsure at all n locations; Clone ID: LIB3602-050-Q6-K1-F8
gcggtttgccatgcaatccctgcgttgctgctcgactgcagctggccccgccgctggccgccgccctgcgcccgctggcggttggttcctgtgtcccgccgtcgggcgccccacaccatttccagccgcgcggcccagccccagcccaagcgcgcccaggcgctgcctgcagacgcggccaccagcaccacagagacggcggaagcgggatgcgggcgcaagaagctgtttgatgacctgngcggcgcagaaggcatgaagctggcggttgacaccttctacgataaggtgctggctgacccggagctgctgcccttcttcgagtccctggacatgcaagagcagaagatgaagcaggtcaagttcatgagcttcgtgtttggcggaacagaccaatacaagggccgaagcatgtacgacgcacacgcccatctggtc

SEQ ID NO: 4272 - DNA, 87 bp, Chlorella sorokiniana
  Clone ID: LIB3602-050-Q6-K1-F9
aaaaaaaaaaaaaaaaaaaaaaaaaaaaaaaaaaaaaaaaaaaaaaaaagaaaaaaaaaaaaaaaaaaaaaaaaaatagggggacat

SEQ ID NO: 4273 - DNA, 454 bp, Chlorella sorokiniana
  Clone ID: LIB3602-050-Q6-K1-G1
aggagatgcaggaggccatgctctcacagaacctggaggggctgaacctgggcggcgagggcggcgaggagggcgccgcggcgcgcggccccggcggcatgcccggcatgcccggtatgcccggtatgcctggtatgcccgctatgcccggcgtggaccccagcaagtacatgcaggcgatgcagcgcgtgatgcagaacccggagttcctgcaggcggcggagagcctgggccgcggcctcatgcagcaggtggcggaccccgagatgctgaccatgatggagctgttctccaaccccgacaaccaggcgctgctcaaggccaagatggaggagatgaaggacgacccggagctgaaggaggtgatgcaggacattgaggagaacgggcaggcagccatgatgaagtacatgcaggacgaggaggtgatgagcaagctgggcaagaagttcca

SEQ ID NO: 4274 - DNA, 454 bp, Chlorella sorokiniana
  Clone ID: LIB3602-050-Q6-K1-G10
gccagcagcagcggcggcagcgtcggccccagtgcctggagcgatgacatggcgagtgtgctggttgttgattaccgggagcctagcgaatccagtgaagcggcagcaggcagctctgctgcagctgctcccgccgcggctgaggctgcacgagctgaggctgttcaagctgcgcctgcgccagctgagcctccggcttggcagcgcagcggcattgtgggcagcagctttgatatgggagacgcctcgagcagcagcagcagcggcgaagacgactggagcagccagctcagcgcgctcagcgggcgcagcggtcacagcagccagcgcagcggctcagacagtgacagtgagggccgcggcaacggcagcggcaatggcagcgctcagggcggcaatggcagcgtggaggctggttttggctttgatgagcagggtgccttcgttgagaccc

SEQ ID NO: 4275 - DNA, 309 bp, Chlorella sorokiniana
  Clone ID: LIB3602-050-Q6-K1-G11
cccacgcgtccgatttgaatacatctttttcctgctcacttgtcacactcatgccttgccttcctgcttgctcctgtgccatccctcaccctgccgctctctgctgctgctgccattccagcctttcgttcattttgttacaagttgcggcaaaaaaaaaaaaaaaaaaaaaaaaaaaaaaaaaaaaaaaaaaaaaaaaaaaaaaaaaaaaaaaaaaaaaaaaaaaaaaataaaatataaaaaaacacctaaagcaaaaaaaaacagcggcgaagactaactggagcaaccagctcagcgcgctcgggg

SEQ ID NO: 4276 - DNA, 341 bp, Chlorella sorokiniana
  Clone ID: LIB3602-050-Q6-K1-G12
gccccaaactgaggttacaggaggggggcggggcgtctgcatgcgccatgcacagaaggcagcgggatgcggcagggtggtatgtgtgtatgtgtgtatccatcgggcatcgacatgtgtgcgggttcagttttgcgagcatgcatggcatcactcttgggggggatcaacgttgcagcatgggggcaggcgcatgagcaggggcgctcaggcagcagaaaacttgctgcagggccgcctgctcagcggcagccccacaatcagcgagcaggagcaagcagcacaggcattcgactgtcgcacgcgctgcagccacagggcagtagggcagcagagtgtgc

SEQ ID NO: 4277 - DNA, 420 bp, Chlorella sorokiniana
  Clone ID: LIB3602-050-Q6-K1-G2
aaaaaaaaaaagaagaacaatgctctaacagaacactgaaggagatgaacctgagacagagagggcagcaaggaaggcgcggcggaacgcggacacggcggcatgcccggcatgcccggtatgcccggtatgcctggtatgcccgctatgcccggcgtggaccccagcaagtacatgcaggcgatgcagcgcgtgatgcataacccggagtttctgcatgcggaaaagagcctgagccgcggcctcatgcaccaggtggcggaccccgagatgctgaccatgatggagctgttctccaaccccgacaacccagcgcttcttaaagtccagaatggaggaaattaatgacgaacccggagctgaaggatgtgatacaggacattaaggagaacgggcaggcaacccatgattaagtacatt

SEQ ID NO: 4278 - DNA, 452 bp, Chlorella sorokiniana
  Clone ID: LIB3602-050-Q6-K1-G3
cgtcgaaacccgcttcctcccccctgcaccaccacaccccttgagaaaatgaacgcttgcgactgcccatcctgtggtgcgtgtgcccgcaaggcatggcccgctctccccacccaaacccgactttgtccttgtctgcgtatctgatctgattggtgagctacccttgaaggggcggcctctgggccgccctcttgtcctactatttactaaccgtgttctctcggtgtattcattgtgcactgtgtgcctgcgtacttactacttgtgcccgtccttgtctgtccctgtcttgtctgcctgtctgccgcccgtttgccttggtctctttggtctctcgtgttgatcgtccgtcgtctgctcgtcgccgcgtccattctccacccctgcatctgcacacaatccatcccatctcatctcatccaagccacaaagctacttgctggctctcg

SEQ ID NO: 4279 - DNA, 457 bp, Chlorella sorokiniana
  Clone ID: LIB3602-050-Q6-K1-G4
gccgctctggcggcgctgcagcacgcgctgcaggagcttcacacaggggtgctgggaggatattgggatccacagcggtggcacgtgctgaaccactaccgcggtctggagccagagccccgagcactttgggctggtgcagagggccgagctgagcatgcacaaggacttgagcatcgatgcactgctgggctacatcagcagctggagctcccttgctgcctaccgcaggcgacatccgccggcgccagacccgctgctggccttcaagcagcagttgctggcagtgctgcaattgggcacagatggcactgctgcaggcagcagtgcggagccagtggtgcggctcgagtggcccgtgttcctcattctggccaagcagcctgtgctgctggccgcctgatgccgcatgccgcacgaatctgcggcgcaaagcgctgtgcctgcgctgccttga

SEQ ID NO: 4280 - DNA, 346 bp, Chlorella sorokiniana
  Clone ID: LIB3602-050-Q6-K1-G5
agcgaattggcagtcttacaaggcggcctgcaaagaggtgcaacgacagcggtcggcagctgagggcggcggtgggacgcctgcatcggcggcatccggttgagcggcggttgggaggtgaaggcactggcgcacgcacatccgtccagcgccaggctgtcgacagaggctacacctgctgcatcttttgaaagcacgcataggcattgtaagagctctgattttaccaaaagcaacatacgacgaacgccaagacccgatgctggccttaaagcaacaattgctggcagtgctgcaattgggcacagatggaactgctgcaggcagcaatgcggagccagtggtg

SEQ ID NO: 4281 - DNA, 451 bp, Chlorella sorokiniana
  Clone ID: LIB3602-050-Q6-K1-G6
agcaaaataacaaaaataaacaaagacaaactgcaaaaaagtacaaaaaacagcaaacaaaaaaaaaaagacagaagagggacgcgctactttaaaaagcatcgcggttgttcggccgctttgatgctgtccgcactgctcccgctctttcgtccatcgcctggttttccttcagaggctactcctgctgcttctcttgcaagctctcatacgcattgtacttgctctgattctaactttacccactttaagcgctttcccatttttccctttttcgaaatttcgattattcccgaacatgtccctctttgataaacttttcctatacttttgctccccttttggtgtcccaattttgcctcccctttttacggctttctagtttgggggatttttgaagttttctcctattcgtttccttcccctttccggccccttctttcccgttcct

SEQ ID NO: 4282 - DNA, 456 bp, Chlorella sorokiniana
  Clone ID: LIB3602-050-Q6-K1-G7
ctacaattatgaagattacaaggtggacagcctgtaggtgattgcggtgcgcatgcgcgacctggccaagaaccgtggggacttgagtcgggtgtacaagggggaccgtgcgttgttgcgtggaacgtttcgagacctgctgtgcatcatccaaggcgagtacgtgcctgagcagaaggtgaagctgctgctcggagacgcgctggtggtgcgcgggctgcccgacaacatgcgcttaaactacctgcgctctgtacctggcctatgccttccagtcgcacctgcagtctaacgagctgctgcactaggtgttccgcttaagactctgggaggagccgtaggagcggctcacgccgctggagaagcgcctgttccgctccaagtcctccaccgacatgcgcgaccgcaccgagcagcgcaggaaggagcgcgccaccatgtcgcactacaagcacg

SEQ ID NO: 4283 - DNA, 455 bp, Chlorella sorokiniana
  Clone ID: LIB3602-050-Q6-K1-G8
ggaccgcacccgcgaggtggtgcccggcatggtcatctgcggtatggaggtggctgagctggacggctgcccccgcatgggccccacctttggcgctatgtacatgtccggcctcaaggctgcccaggtcgcgctcaactccctgcgccggcagcaggaggaggaggcggccgctgaggcaggccaggagggcaaggagatggtggccgcctaagccagctggactcgccacagctcctcgcctttcaagcctttcaggctggcgtagcgctgtccgcagcagccgccagtcagctgcaagtgtacttcagcctttgttgaactcgctgccgcctctgattgcgccagtcagcagctactttgcccaacacacgccggggggttccctgggcgggcttccatcccgagcaataatgccatgcagcgctgaacgccacacgacacacccctttcag

SEQ ID NO: 4284 - DNA, 270 bp, Chlorella sorokiniana
  Clone ID: LIB3602-050-Q6-K1-G9
cgagctcacatggcctggcggtgaggtgtaacgtttgccaggaaaaaaaaaaaataaaaaaaaacagatgaccccggagggacacaaaacttgggggctatgttcatggaccccctcaacgctccccagcatgcgctcaactccctgttctatcaggacgactaggaggcgttcgctgacccacgccttaaaggcaaggaaatggtaaacccctaacgcagctcaacttaccacacttgctcccctttcaagtctttcaagctggcgtaa

SEQ ID NO: 4285 - DNA, 91 bp, Chlorella sorokiniana
  Clone ID: LIB3602-050-Q6-K1-H1
aaaaaaaaaaaaaaaaaaaaaaaaaaaaagacaaccaatataaaaaaaaacaaacttacatacacaaacaatacaaaaaggtggctatatt

SEQ ID NO: 4286 - DNA, 455 bp, Chlorella sorokiniana
  Clone ID: LIB3602-050-Q6-K1-H10
gcaccgaggcgatcgacatgtgcatcctggaccacggcggcgtgcacctgatcttcgaggcggagggcagcgccgagccgctggactcgcccagcatcctgtttgtcacggacgtggacagcacatgcgccatcctgattgacggccaggagctgcgcaagggccagcgcacgcagctcaagccgggctgcctcatcgacatgggcgaggaggcgcggtatgaggtgcagcgcaacgtgtttgcccacgcctaatgaaagaggaagcctgacaagtggcccagttcatcatctggcgcaccattcgcatcccacagccagccggttgcaagctggctgcctgttttgctgccacagtagcgactgcctcagcaaccccgtctgcccgcccaaccaactgaacccaacgatgatcttgaaacgtttacagcaagctcagcaagagcgcccctgttt

SEQ ID NO: 4287 - DNA, 422 bp, Chlorella sorokiniana
  unsure (1)..(422): unsure at all n locations; Clone ID: LIB3602-050-Q6-K1-H11
ggcaccactcgcccagggccgggccccacctccctccatcctttcagccatgggcgacccagcctgtcctgccctggctaggtgtctcttctttcatcctgccatgatgccatgccttgacccaacgccttgccgaatacgctcccccaccccccagattctttcgttcggccgccatccaggcccccgacaggccggcctgcctcactgacacacccgcctgaccacacttgccttctctctcctcggaaacacgccctctgntacacttcctgcccatgcctctcctccctgccggcacccaccccgcccgcattcccaatgcctcaaacagccactgaggtacttgcacagaaaagaaccgtccgcaaccagcttgactgccatgaatacgctctcacctgtgacacacatatgcaacc

SEQ ID NO: 4288 - DNA, 448 bp, Chlorella sorokiniana
  Clone ID: LIB3602-050-Q6-K1-H12
cgaatgttatactgcccttctgcacccttcattttgcgcactggcacagttttgccctgatgctctcaattcgcgagcgcttcgatccgtctgtcctttgttccgagtgagtgttccttttttccccgctcctcctaccatgtgtattcttgggtcatatgttgtaacatagagttttcaaacccaacacaggcacagactgcctcactgacacacccgactgaccacacttgccttctctctactaggaaacacgccctctgctacacttcctgcccatgcctctcctacctgccggcacccaccccgcccgcattcccaatgcctcaaacagccactgaggtacttgcacagaaaagaaccgttcgcaaccagcttgactgccatgaattcgctctcacctgtgacacacatatgcaaccaaaaaaaaaaaaaaaaagggcggccg

SEQ ID NO: 4289 - DNA, 460 bp, Chlorella sorokiniana
  Clone ID: LIB3602-050-Q6-K1-H2
aggacacaagaaagccaaactgacggtggcgagaagactttaaccagatacaagacggccatggagaagtgcccgcctgagcgggccatcttctcgcggctggggctgagagagacgcacatgctggacaagattctgtacgaggaggaggtgcggcagctgatcaacacgtacgagcagcagttccactacggcgtcttctacgcctacatgcggctgcgggagcaggagatccgcaacatcatgtggattgcggagtgcgtggcacatgatcagaacagccgtgtgcaggacagcattgtgtttaccttctagatagtcccgcacagtggctgccacattcacccaaatgcgccgctcaaatacaacagctgcagttttgcttgtgctcaccgctccccgctgctccccttatggacgcctgtaccctttactctcgctgcccactgccaacaccctg

SEQ ID NO: 4290 - DNA, 154 bp, Chlorella sorokiniana
  Clone ID: LIB3602-050-Q6-K1-H3
aaaaaaaaaaaaaaaaaaaaaaaaaaaaaaaaaaaaaaaaaaaaaaaaaaaaaaaaaaaaaaaaaaaaaaaaaaaaaaaagggaaaaaatggccggccggtttagaggttccatatcttcttacccttgcttgcttctttttggtttttttttt

SEQ ID NO: 4291 - DNA, 457 bp, Chlorella sorokiniana
  unsure (1)..(457): unsure at all n locations; Clone ID: LIB3602-050-Q6-K1-H4
ccttgttacttgccctgcaccagatctccaagcaacgatgcangctgcccagctccaggctcgcgccacccggcccgggcgggctcgccgcaccaccgtgcgcgtgcaggctcagcaggccgcgccccgcgctcaggcccccaagccccagcagtttgctgctggcctggctgccgccttcgctgccgtgaccctggtgctggcgcccgccgccaacgctgctgaggcccgcgcggaagtgaagagcgtggtgtgcgccagcaaccccacctncaagatctgcctcaaggacagcgccaagaactgaggcgtgccagctggactgagcgagcgctgagcccttgctggccgcacctgaggcaagcagccattgctgactgccggtgggcaccgggccgccacccgctgcccggcagcatgggcgaggcggcgtgagaaagagaggacttgtgcactg

SEQ ID NO: 4292 - DNA, 454 bp, Chlorella sorokiniana
  Clone ID: LIB3602-050-Q6-K1-H5
gcggctacgccaaaagtgattggggcgccccgcatgcagccggcgatgccagccggtgctgctgctgctgcgggcgcgggcgcgggctcgggcgcggacgacctcgatacgaacgcaacccgccgcctgtgcaccagggaggaggccacgcacatgctcaaggccctgaacaaggacatgaagaagatggagaacgtgtacaagcagctgtatcctagcgggtgctccttcaaaggaggctggcacccgcgacgcatgctgcttgaagccttcacacaaattctgtcaagctgactggttcaatagcaaatgacttggcgaatcaacacacacccaacaagcaggatgctgtcaaacggtgagggaaggcgcatcgcgtgacaaagtcgaaaccataggcgtcaaccaagcatgccgcgggcacggcgtcggcagcggacacagagtcggcagc

SEQ ID NO: 4293 - DNA, 459 bp, Chlorella sorokiniana
  Clone ID: LIB3602-050-Q6-K1-H6
gcgggcgcgcaacaccaagctggacggactggactccgtgctctccaagatgggcgccagcgagatcaccaagaactttgtgggcctgctgtcggccaacaaccgtctggtggagctgggcaagattgtgtccaagtttgaggagattgccgcggagcagcgcggctaggtcaaggcgatggtcaccaccgccgagggcctgagcgcggaggagatcgaggagatcaagaatggcctgaagccgctgttgaagcccgcacagaagctgaccctgtaggaggtggtggacccctccatcatcggcggcgtcatcctgtccctgggcgaccggtacatcaacctgtgcattctggcgcgcgtgaagaagctgcagcagattgtgcgcgacgccgtataagcgtccaccctgcttgccactgcgcgcctcgtgcgccgccgcatcgggggcgagcgcgctag

SEQ ID NO: 4294 - DNA, 358 bp, Chlorella sorokiniana
  unsure (1)..(358): unsure at all n locations; Clone ID: LIB3602-050-Q6-K1-H7
caccggcggggcagcccatgctgcctgatgatttcggcggctttggggggatgggcggggcggcggcggcggcggcggcggcggcggcggcggcggcggcggggcagggtgctgccgcctcgtccggcccagacccttttgccgacctgctcaagtagacttggccacttgcagtggagcagcagcagtggagcccagttggcggtttggcagctggctcagcctgttcctacacacctggcttttgatggcttgcttgcacaaaccaacagttgtaaagcaggcggcgtcnaaaaaaaaaaaaaaaaaaaaaaaaataaaaaaacagaacaaaaacataaacatttcttaactccat

SEQ ID NO: 4295 - DNA, 383 bp, Chlorella sorokiniana
  unsure (1)..(383): unsure at all n locations; Clone ID: LIB3602-050-Q6-K1-H8
gcctgccccacatgcaaattttgacgcctctggccctgcctgccccgtgccaccctgagagcctgcttgcttctgtgcacccctgcccgccagtgccccgcctgccctgcccctgcctctgcccatctcgaagactggctgcctctgccctttcgccacctcttggatttattctccccacattcttgggcccctgtaaacacacagcacggtnaaaaaaaaaaaaaaaaaaaaaaaaaaaaaaaaaaaaaaaaaaaaaaaaaaaaaaaaaaaaaaaaaaaaaaggcggcgtataaaaaaaaaaaaaaaaaaaaaaaagataaaaggggaatcgcggcttgtgtcattcgtttaattcgccaattttggaaggggggccattt

SEQ ID NO: 4296 - DNA, 187 bp, Chlorella sorokiniana
  Clone ID: LIB3602-050-Q6-K1-H9
aaataaaaaaaaaacaaaaaaaaaacacatataaacaaaaaaaaacaagaaccaccaataaaaaaacaactaaatataagggcgccaatgaccgacagagccccgcctgccctgaaccctgcctctgcccatctacaagactgtctgtctctgccctttcaccaccttttccatttattctccccaa

SEQ ID NO: 4297 - DNA, 363 bp, Chlorella sorokiniana
  Clone ID: LIB3602-051-Q6-K1-A1
cggtccgtattcccgtctagacacgcgcgcgggacaagaaggccagtttattatgcttaacacggacatgtggatgctctgggacaaaaagtttaaactctacacgcgggaatacgccaagaacggaggacactttttttccaactttgactttgcatttgccaagctgctggagctgagccgtccctttcccgagggcgcacaggacgtgtaatgcagacttggtatccgagaatgcagcaaccagctgggccatgcaatcttggcggatgtacaaggcaacgagcggttgccccgctcgatgaatccgccactcgctccaaatgaattgatagaaggtctaccgttccccgtgtaacaaac

SEQ ID NO: 4298 - DNA, 259 bp, Chlorella sorokiniana
  unsure (1)..(259): unsure at all n locations; Clone ID: LIB3602-051-Q6-K1-A10
gcgcagatcagcagttttgccagccgttgcagatgagcagcacttatggccagccaaccaacatgagccgaccggcaaagggttgcagtgcttggatcgtgcagaaaatgccttgaatgaatgacctgcctctcgtgtgggcacccatgcctggctgctcaggcttgcttggttggcaacacccgtggcttgcaaaagcctgcttgttagacagtgcttggaaaaccaaaaccaccaanaagattgggctgagtctggt

SEQ ID NO: 4299 - DNA, 337 bp, Chlorella sorokiniana
  Clone ID: LIB3602-051-Q6-K1-A11
gcggatagaaatacatctggacgaggagggtgatgagaagatcttcagtgtacacgaggcagatgacctgatcgcgggagggatggacaagtaagaggtgggctaacacggatccggttgctgatgtgcgtctcctgcatgcacccagccgttgatagtgcgccttatgcagacacaagtaatagagcgttcgacaaccgtgctgggtggagagcccttcatgcacaggccggaccgcaatcaccctgcccatgctgtaccaccccttgcttgatagttcaacgccccacactgctttgatacacgcacacactttttcccgaacacccaaaactga

SEQ ID NO: 4300 - DNA, 328 bp, Chlorella sorokiniana
  Clone ID: LIB3602-051-Q6-K1-A12
gcgctcaaactacctctcaagcagatccacaataacatccacaatcacgcgacctgacatctgtactatatgatctactgaagtaactacaatatccaggacattacacagaccttaatcataaaaccaaacagaaacccaactgaatagcctagcaaaacatctagctttatatagatgttttaatagctaaaatgctagcacagatccacctaccaaacaaactaacaaactcaatggcaaactgaacgcccaatggaacggcacattaagcacaacattaatcacatctactttcaccagttacccctacacttaccattacact

SEQ ID NO: 4301 - DNA, 80 bp, Chlorella sorokiniana
  Clone ID: LIB3602-051-Q6-K1-A2
aaaaaaaaaaaaaaaaaaaaaaaaaaaaaaaaaaaaaaaaaaaaaaaaaaaaaaaaaaaaaaaaaaaaaaaaaaaaaagg

SEQ ID NO: 4302 - DNA, 503 bp, Chlorella sorokiniana
  Clone ID: LIB3602-051-Q6-K1-A3
ctcgtgcacttgcgcgcggcgccgcgggccccagcgtcgtcagaccagtgcttcccgagcaagctgcggcggcgagcggcggcagcaagcagcaggcggcagccatgccgtgccctctgcgttttgtgctggcgggcgtgtcggcggccgtgctggccacgctgttctttatgggtcgttctgacccggccctagagaagcagaaggcggcaagtgaggacagcgccggcagccgcgcgcggcagtggctgcgcctcctacttgacttcttcacaggcaaatacctgtacgacacgtggagaaagagtggcagcagcagccatgccagcagcggtgcagcaaataaagccagcggctgtccctttgcccggctgcatggcggcggcaccggagcagcggatgcccagacagcggcggcggcagccggatgccctgcgcacaagcatgcagcggcagcggcagcggcaggcagcgaccggcaagggctgcacaaagaataggca

SEQ ID NO: 4303 - DNA, 423 bp, Chlorella sorokiniana
  unsure (1)..(423): unsure at all n locations; Clone ID: LIB3602-051-Q6-K1-A4
gcggcgagctcggcaggaggaggagcgtcgaaggaaggaggagcaggctcggctggcgaagcagcagatggaggaggccatggcgcacctgatgcagaagcgcatgcaggcagacggcccctgaggcaggcgggtggccgccgtgtgctggcctggcccggaatgcgggcaggcagaccgcaaggcgggctttgggtgtgaccagctacacatatggcctgcacatcagtcaccgtgctgctcgccgggcacatctgctaaggctaaccattcagccacgtgtaccaactcctcacagcagccaggtttgcttctccctgctacctgttgtactcttgccagcaccctccccttgatgtacgccttgcgctctttgacagcggcgcatttgaacacgcacgccananaaaaaaaatgataaat

SEQ ID NO: 4304 - DNA, 379 bp, Chlorella sorokiniana
  Clone ID: LIB3602-051-Q6-K1-A5
aaaaaaagctaaaaaaagaggaggagcgaaaaaagaaaggaagagcaggctcagaatgacgaagcaacaaagggagggggccatggagcacctgaggcaaaagcgcatgcatgcagacggaccctgatgcaggcgggtggccgacgtgtactggactggcccggaatgcacaccggcagaccggaaaaaaccctttgggtgccaccagctacacatatggactgcacatcacttaccgcgactggtcgtcggacacatataggtacaggctaacaattcactcacaaacagtaactcactcataaaaggcaaatgggattctccctgttacctggcataatatgggcagaaccgtgcggttactggacacctttgacct

SEQ ID NO: 4305 - DNA, 469 bp, Chlorella sorokiniana
  unsure (1)..(469): unsure at all n locations; Clone ID: LIB3602-051-Q6-K1-A6
gagcgacggcgggctgctgctggacccaaccgcggcagaggaggcggcagcggcggccaccgctacctttgccggcctgccactgctggcaagtagcggcggcggcggccaggacggtaccggcagcagtgatgggctgcagctgctgacctcccagacaagagggcggctcagcaccgaccagctgctggatatgatggaggctgccaagcagggagctgatcggctggccgctttcatgcagcagtcggcacgccaggcggccggcccgctggcccagtgaggctgtctgcactgctgggcgtgattgtcgcctcttgcggttgctgtgttgctgccgtgcttcacgcatctctgcccgaatgtcaatgttgaatgtcaagcagccattagctgcatctttgttacacatgactaatgccnaanaaaaaaaaaaaaaaattaacccaaaaaagataaaataaggggg

SEQ ID NO: 4306 - DNA, 326 bp, Chlorella sorokiniana
  Clone ID: LIB3602-051-Q6-K1-A7
ccaccggcggccacaacaacggccgtgtgggcaccattgtgcacaaggagaagcacaagggctccttcgacattgtgcacatcaaggacgcggccggccacacctttgccacccgcgtgaacaacgtgtttgtgattggcaagggcgacaagcccatgatctcgctgcccaagggcaagggcatccggcagagcatcctgcaggagcaggccaagctgtacggcaagtctgcctaagcgcaggcgacgccacatgagctgagccgacgccggcgagggccgcccgccggcggcccccacggcagacgcgcagcagcagacggggcg

SEQ ID NO: 4307 - DNA, 325 bp, Chlorella sorokiniana
  unsure (1)..(325): unsure at all n locations; Clone ID: LIB3602-051-Q6-K1-A8
cgaaaaaaaaggacaaaacaacaagacgagagggcaccaaagagaacaaagagaagcacaaggggcncccnncaacggggggcacaccaaggaagagggcggccacaccnnngccacccgcgngaacaacgngnnngngaaaggcaagggcgacaagcccaagaacncgcngcccaagggcaagggcanacggcagagcaaccngcaggagcaggccaagcngnacggcaaggcngccaaagcgcaagcgacgccacaagagcngaaccgacaccggcgagggccggccgccggcgggccccacggaagacgcgcagcagcagac

SEQ ID NO: 4308 - DNA, 505 bp, Chlorella sorokiniana
  Clone ID: LIB3602-051-Q6-K1-B1
gggggcaaagggagagaccctttgacgttgaggccaccaaggaagaggacttccacgtggaccaggcgaccaccgtgagggtgcccatgatgaggcgtttaggcatgtttaacatctaccactgtgagaagctgtccagctgggtgctgctgatgaaatacctgggcaatgccaccgccatcttcttcctgcctgatgaggggaaactgcagcacctggaaaatgaactcacccatgatatcatcaccaagttcctggaaaatgaaaacagcaggtctgccaacttacatttacccagactggccattactggaacctatgatctgaagacagtcctgggccacctgggtatcactaaggtcttcagcaatggggctgacctctcgtgggtcacggaggaggcacccctgaagctctccaaggccgtgcataaggctgtgctgaccatcgatgagaaagggacttgaagctgctggggccatgtttttagaggccatacccatgt

SEQ ID NO: 4309 - DNA, 276 bp, Chlorella sorokiniana
  unsure (1)..(276): unsure at all n locations; Clone ID: LIB3602-051-Q6-K1-B10
gcgggggggacgcgtgggttgtgcactacgaccagtgggcgcgcgactgggtggcgcagcgcgtggagaatggcctggcgctggcggcatgaanggcgccggaccgccatgatgcctgccacacacacatttttccgcatctcttccgctgctacatcttttcccctgttgccatttgcatgggtctccatcctttcattgaatttatctttggcaccactatgacgctgtgagctacagctacagtaagctcgagtgcttttaaaaaaaataaaa

SEQ ID NO: 4310 - DNA, 508 bp, Chlorella sorokiniana
  Clone ID: LIB3602-051-Q6-K1-B11
gcgccgccatgcaggctcgggtgctgctccgcacgcctgtgctcacagcttcctcagtccctcgcctcaccgcccgggggacggtagccaccatggcgctgcagttctgggccgccccggtctgcccctatgcgcagcgcggctggatcgcgctcaaggagacgggcgcccagcacgagtacaagacggcggacctgcacgacaagagccccgagtttgtggagctgtaccgcaaggtggcgcaggaccccgtggcaaacgccaaggtgccggtgctggttgacggggagctggagattacggagagcccggtggtggccgagtacatcctgaacaagtttgggccctccactggcatcctgccctcggaccccgcacagctcgccaaggccaggctgtgggccgatctctggggctcctatgtggggcctgcgcagaccgccattcttcaggccgacaccaaggccaaggttgcagaggcgacagacaagatggtgggtgccctcaa

SEQ ID NO: 4311 - DNA, 479 bp, Chlorella sorokiniana
  unsure (1)..(479): unsure at all n locations; Clone ID: LIB3602-051-Q6-K1-B12
ggtgcgcgccttcctggcaggcttcctgttctacctgctgctgagcggcgggctttagtcgctggtggccgaccccngcgaggtgctgcgcggagtggagtttgcgacctcctgcggcgccttcacctgcaccaagnnnngtgtcattgacgcgcagccgactgcggcagatgcagagggggtgctggctgacaagggccccgtggggcagtgaagcagtgtgccgcgacaaaatgcccacgcagtgcagagcagcactctgcacggctgaggcagcggcagcgtgctgcccancgcagcaagcangtcttgggagctgcctgccctgttgcaaaaccaaaggctccctgcctgccctgtacagaataaagaatggaatgaatgcctctccgaaacccgtgactgttgcacatggggctgcgtgtcattacactcagccctgagacgctttcggcactgtaaagcaattgcatagcaag

SEQ ID NO: 4312 - DNA, 504 bp, Chlorella sorokiniana
  Clone ID: LIB3602-051-Q6-K1-B2
ggggcggtcgtgtacctggcctccgcctccccctccaacctggccgagagcgcgctggctgttgtggcggtcgtgtacgtggggccgtcgctggccaagagcgcggcggaccgcatccgcggctacgcaggcgacgtcatccccagcaccgcctttgatgcgctagtgtcgcacagcggcaacatcctgattgacatccgcagcgtggacgagaaggaggactatggcgtgcccctgctgcccgacatggccaagtacgctgagctggagtttgtggaggtgggcgatgaccgactggaggagcggctgcgcaactccaccgaggtggaggcggagctgaccgcggttgagctggctgccctgaagcaactgaaccgcggccagacgctgtacctgctggaccagagcggtgaaaccgccaaagcggtggcccgcgagctgaccaagcgcggctttagcaaggtgtttgtggtgtctggcggtttgaacgcctggaccaacgcc

SEQ ID NO: 4313 - DNA, 491 bp, Chlorella sorokiniana
  Clone ID: LIB3602-051-Q6-K1-B3
gcgcccacgcgtgcgccgacgcgtgggcccatggcggtcaccaacgcggtgtcgtggctccagtacggcctgttctacggggagatcgacgtgttcctgaacgtggttctgatcgtgaacctgctcgtgaacagcaaccgcactgtggtgcgcagcgaggtggttgtcgcgctcaacatgcgcgcctacctcaactgcatgcccgagtgcaactacggcgtgaacgacaaggtgctgtttcacgcccaggggcacaacgcgcggcacaaggcggaggacctggacgacatcaagttgcaccagtgcttgctcctggcctactttgagctctaccgcatcatctccttcatcccgtccgaccgcgcgtttgacctgatgacgtaccacctgagccagatcattaagccgctgatctaggtggagtgccacatgcacaagcacagccgaagcctgatcaagtacctggtcaaggcgcgcaaccagttcaagga

SEQ ID NO: 4314 - DNA, 505 bp, Chlorella sorokiniana
  Clone ID: LIB3602-051-Q6-K1-B4
ggcgcggacgcgtggggtggaggggctttacaccaccgcggcatggccctccaaggttggtggccagtacggcaaggcgatgacttccgctggcggcctggccttgacgtggtgggtcgatggcaaatacacattccgctgcggcggcttcttcccaggttacgaccaagtgggctgccagctgagcaacctgcagtgcggcaacagcatcatgcaagtgctgacggatgcttgggacgctcccgcgccgcccaagtgagggcatgttaagatgaagaacctgtcagtcgcacatgccagctgagtcgcggcagtgcaatggtcccgccgtgcagtgtttttccttgaggcgccgctcaccctgctgccaacgcatgcatgttttcggctcatgagtgcgcttgcctgttccggctctttccatacttgcagcaccggtttctgctgccccgcacacagcacaatacattcagatgtgcttgcaactcgtgtaactacttgctga

SEQ ID NO: 4315 - DNA, 499 bp, Chlorella sorokiniana
  unsure (1)..(499): unsure at all n locations; Clone ID: LIB3602-051-Q6-K1-B5
ggcgcagacctgttccgtcgacggcctcaacatcatcgtcgaatggtcctacaaagttgctaacctgtacggcaaggcgaggactttcgctggcggcgtgaccttgacntggaggntcaatatcaaatacacattccgctgcggctgcttcttcccaggttacgaccaagtgggctggcagctgagcaacctgcattgcggcaacagcatcatgcaaatgctgacggatgcttgggacgctcccgcgccgcccaagtgagggcatgttaagatgaagaacctgtcagtcgcacatgccagctgagtcgcggcagtgcaatggtcccgccgtgcagtgtttttccttgaggcgccgctcaccctgctgccaacgcatgcatgttttcggctcatgagtgcgcttgcctgttccggctctttccatacttgcagcaccggtttctgctgccccgcacacagcacaatacattcagatgtgcttgcaactcatgtaactact

SEQ ID NO: 4316 - DNA, 243 bp, Chlorella sorokiniana
  Clone ID: LIB3602-051-Q6-K1-B6
cagaccacttgttaaaaaaaaaaaaaaaaaaaaaaaaaaataaaaaaaaaaaaaaaaaaaaaaaaaaaaaataaagagaagaaatttaaaaaaaagggaaaaaaaaaaaaattgtttttttatataataaattaaaattaatttatctgctatttatttatacaacttctattttttagggggggataatattttttttttttttttccattattatacataaaatattttataaattttttt

SEQ ID NO: 4317 - DNA, 209 bp, Chlorella sorokiniana
  Clone ID: LIB3602-051-Q6-K1-B7
ggtggcgacaacatgcatgctcaagatgctgctccgcacgcctgtgctcacagcttcctcattccctctcctcaccgcccgccgcacgttatccaccatggcgctgcacttctgtgccatccctgtctacccctattcgcagcgcggttgtatcaccctcaatgacacagtcgcccaccacgagtacaacactgttcaccttcactaca

SEQ ID NO: 4318 - DNA, 344 bp, Chlorella sorokiniana
  unsure (1)..(344): unsure at all n locations; Clone ID: LIB3602-051-Q6-K1-B8
gcgggcgcgggcgcagaatgcacgggacgctgctgtggcggctggcgctgttgcggccctgcagcacctgctcagcagagcaactccagcatctgcagtgctgcanctgangctcttgaaaatttggatgctggcgagggcggcgatgagcaggagccgcctgccaagcgctcgcggcgccgccgctgaggtgcctaagcggcgcggttagccagctgtggccctttgtacatttcctgtaccaatgctccgtttttactgcaccagtgcaaagctactctccctgcttgcaatttgcctgcctgtacagtgtcaatgctcttgctttgaaaaaaaattaacgc

SEQ ID NO: 4319 - DNA, 77 bp, Chlorella sorokiniana
  Clone ID: LIB3602-051-Q6-K1-B9
gctccgaaaaaaaaaacaaaataacaacaaaacactaataaaaaaaactggcgctatttataaacctgcaacaccta

SEQ ID NO: 4320 - DNA, 454 bp, Chlorella sorokiniana
  unsure (1)..(454): unsure at all n locations; Clone ID: LIB3602-051-Q6-K1-C10
ggcggactcctcacctnacaaagcgctgccctcctccctggagcactcgcctacccaagcgcgccanctgatgctcctggtganccactctagggaggcgcncctccncaccttntggctttccctagccccgctgcaacgccgactgcagctgccgctaccgggcctgctgagcggggggctcatagcactattttatncttnataacaccctatatatctctggtcgcagcatcccacgcctcaaacgcctttcacttctattagcttctgcacaacacgattccacttcaacaaaccccccaccctaattttccttctgcccctgtaacatacatccctactcacccagctccatacctcttccccatcctccttgccttctttgatcgctgcacatactgcttcccatttcaaacatcttaactcattatctttgaccataccacgcttc

SEQ ID NO: 4321 - DNA, 499 bp, Chlorella sorokiniana
  unsure (1)..(499): unsure at all n locations; Clone ID: LIB3602-051-Q6-K1-C11
ggtgcgggtcaataacgtttgaccccancaaccagtggtttgcgacggggtcagcggacctcaccatcaaaatctnggacaccgccagcgggcatctgagagctgactctcactggccacattgagcaggtcaccgggctgggagtcatcgcacgccacccctacatgttctcctgcgggcggggcaagatggtcaattgctgggacctggagcacaacaaagaaatccgcaactaccacggacacctgtctggcgtgtacatcctggcgcaccaccccactgtcgacatcctcatgaccggggggcgttatacagcatgccgcgtgtgggacatcctcaccaaggtgcacggtcactcgctcacccgtcatgacgacaacactggctgtcatcctggccatgcccaccgacccccaggtgatcactgccacccattacaacaccgtccccctgtttgacctgcgcattggcaatacccttgctaccctcactcaccac

SEQ ID NO: 4322 - DNA, 469 bp, Chlorella sorokiniana
  Clone ID: LIB3602-051-Q6-K1-C12
gcgggacggtcggtctaccacgtactgggcagccatcaccgcagctgacgtcaacctgctcgggaattggagcttcgagaaggtcaaggtaaacgacatctccctggatgactacattgccctcaaacccaagtatacgcacttcaccaatcacagtgctgaccccttccacaagcgccgcttccccaaggagcagttccccatcatcgacaggctgaccaacatcctaatcatgcaccgccgaaacaactgcatgaatctgataggcgtcaccattgtcaagcacgcatttgacattgtcaacctgctgaccgaccagaacccagtccaggtgctcgtcgaccccatcatcaacggcggcccgcgtgaggatgccacccgcattggcagcgcccgttagatgctccaacatgctgtgcatgtgtatgccactgcaccgcttgaaccaagccatctctctgatcaccac

SEQ ID NO: 4323 - DNA, 416 bp, Chlorella sorokiniana
  Clone ID: LIB3602-051-Q6-K1-C2
ggcgggacagcggcgtgcagttcggcgaggccgtgtggttcaaggctggcgcccagatcttcgctgacggcggcctgaaggggtgggcaactccggcctggtgcacgcccagtccatcgtggccaccctggtggtccaggtgctgctgatgggcgccgtggagatctaccgcgccaacggcgagggccccaacggcttctgcgagggccaggacaccctgtaccccggcggcgccttcgaccccctgggcctggctgacgaccccgacaccctgtctgagctgaaggtcaaggagatcaagaactgccggctggccatgctctccatgctgggcttcttcgtgcaggccatcgttacccgcaagggcccccttggaccaacctttttcaagtattctggaggagccccgggagttt

SEQ ID NO: 4324 - DNA, 432 bp, Chlorella sorokiniana
  unsure (1)..(432): unsure at all n locations; Clone ID: LIB3602-051-Q6-K1-C3
ggcggcaagatcctgtggatccgccgcatgcgcgtgctgcgccgcctgctcaagaagtaccgggacagcaagaagattggtgccacctgtaccacgagctctacctcaaggtgaaaggtaacgtgtacaagaacaagcgcgtgctcatggaggccatccacaagcagaaggcggagaagatccgcgagaagaacattgcggaccagctggaggcgcggcgcgccaagaacaaggcggcgcgcgagcgcaaggcggcccgccgcgaggagcgcttcgcgcagggcgtgaccgccgccaccgagagccagaagtaagcggctccgtctcggcggcagcagccgcggcggnggcctacgcactgtgctccccccgcctgacaacgttgttcttcatttttacgagctgggcggacggacgtggtacagccctcga

SEQ ID NO: 4325 - DNA, 507 bp, Chlorella sorokiniana
  unsure (1)..(507): unsure at all n locations; Clone ID: LIB3602-051-Q6-K1-C4
gcgcctttccacacagctggtctctgggcgaaggctcccgcaggccccgctcaagcgcaccaacaccggtcttcaacggagctgctcgagtatctgaggagcaaggccctcancatgcgtgccctcttgtgcattgcgctgctcgtggcggtgctggccgcccctgccctggctagggacaggcccaagccctacaaggtctccggcaaaatcctgtctgacaaccggggcgtctgcttcgatggcaagcgcctgacgtggacgcccacggacggcaagctgaacatcgtgtccaacctgcagcgccctgggctgacgtggcagctggtgggcaagaccactgcgggcccctccccgggcaaccagtccgtctactccgtcaactgggcctttggcgcggtggtgcgcaccgagatcaacaccaccaccggccatctgtcggtggacctcatcagcgacaagatcaaggccatccggccctgcaggaacctgaagctgggccccctg

SEQ ID NO: 4326 - DNA, 208 bp, Chlorella sorokiniana
  Clone ID: LIB3602-051-Q6-K1-C5
ttccaatgtgacgctccctgtaaaagcccattaacctcggccctttgaaaaggttacgcgcaccttgatcgctacacttcccaccccctctatcgcccccataatttccctttattcccttcctttatccccacgttaacctgttttccccctaaagctttaaatccggggctttttttatggttcctatttaatgcttcacagttcc

SEQ ID NO: 4327 - DNA, 271 bp, Chlorella sorokiniana
  Clone ID: LIB3602-051-Q6-K1-C8
gcgcagcaccgcggggccgcccggcgcacggcacgccacccggcaggcagcttatttatgtgcgctgggccgcgcgccggcgccccgtgtaaatggggatatgaaaaaaaaaaaaaaaaaaaaaaaaaaaaaaaaaaaaaaaaaaaaaaaatgggcggcctggtctaaaaaaaaaagggggggggaaacaatttcatataatgttacataaattaaataaaaaaaaacgacgttcaaccaccttcgaagaagcgaaaatatgcgtggtcgc

SEQ ID NO: 4328 - DNA, 384 bp, Chlorella sorokiniana
  Clone ID: LIB3602-051-Q6-K1-C9
gcgtgggggcggctgaaggttattatcggcaaggtggaccgccttgaagcaaaggaagtggtggttgccacccaggagggcgagaccgtcaagctgccgggcgatgctttctgctgcgccgccggctgccaatacaacctgaacccgtccttcctgaaagagatgggcattgggtttggcgacctgcacaactactgcttcctggggcgcaacccgcgcatcggcaccgcctccgactttgtgtttgcctacgtgccctttggcccccagaagcagctggagatgttcttccactcggccgagcaaatcaagcttgggcgtgagaaggaaatcctgaaaatcatgacccccacgccgctgggcgccacgggcgagaccaaccac

SEQ ID NO: 4329 - DNA, 357 bp, Chlorella sorokiniana
  unsure (1)..(357): unsure at all n locations; Clone ID: LIB3602-051-Q6-K1-D1
gcgtgaacgagcaaccgcagcagctcacagaccggaccagtgcgcttggacctgtgcatttggctgcacccggctgcacgtgcacgccaaactgcgagccgccggctgctgcacaacggctgcgcgcacgcctttttgagcaactgggttggaaacccagtgcagcagcacagtgtataccttccagctggcctctaaaacgcttcggttcaacatcctgtacattactccgcttgcaccgctggtttggaacgcccttcttgctcccagggtttgtaaactgcgcccctgtaaagatcatttgcatgcaaaanacaaaaaatacacagacacaaactcttaaaaaaacctatggtg

SEQ ID NO: 4330 - DNA, 510 bp, Chlorella sorokiniana
  Clone ID: LIB3602-051-Q6-K1-D10
gcggtgcaaatcggcaagaaggcggccgccggccccaagaagggcaagaaggccctgaccttcaccatcgactgctccagagggcgtggaggacaagatcatggagatcgcctcctttgagaagttcctggttgacaagatcaaggtgcagggcaagaccggcgtgctgggcgacaacgtcaaggtgacccgtgacaagaccaagatcacggtcaccagcgagatccccatgagcaagcggtacctcaagtacctcaccaagaagtacctgaagaagcacaacgtgcgcgactggctgcgcgtgatcgcctccaacaaggaccgctccgtgtacgagctccgctacttcaacattgcggaccaggctgaggaggaggaggacgaggagtaagctgcttgtctgcacaccagcaggcgagcgccctccccgcagcagcagcgcgcggggggcggagggggtgaatgcagcgcgcgggtgccccctacgcccgcaccccgcccacccgtctt

SEQ ID NO: 4331 - DNA, 511 bp, Chlorella sorokiniana
  unsure (1)..(511): unsure at all n locations; Clone ID: LIB3602-051-Q6-K1-D11
gggcggagggcatgagcgagagcgagtttggggacggcgagaagttcgccgccttccagaacatgcgcggcgggcgggtgcgggtgatggcgctgcccatgcccgactccgactactacaacgcagagaagggcgacgcgctctatgcctttgagctggcgctggctctgcacaagctgagacatggacaagctcaagggctgccactcgctggccgacaagtcagatgacttccaggcccaggatttcctggaggacgagatgagcgcccaggccaaggtggtgaacgagctgggagactatgtgtgcgagctcaagcgcgtgggcaagggccacagcgtcttccactttgatgagaggatcgaccagggaggcctgactgctgcggcgtgagctgaccaggcagcaagttgcaaagggcgcagctgcagaaatggcctgcaagcccagcggcgccagcaaggcggcaggcgtncggccgcggcaggcgtcggcgtggcatacgcactga

SEQ ID NO: 4332 - DNA, 241 bp, Chlorella sorokiniana
  Clone ID: LIB3602-051-Q6-K1-D12
gcggacaaaaaaactataatcccactaaccacctacctgtccaactacaagctacttaactatgcttacatcaaactcagcggcgcttttctcaaaggcatgccccacaatttctaccacggcgcgcctcccttcttgtggaatcaaaccaaccgccctctcgtcctagatcttctcaagcgtttctacccccttaacatcaataacctcatccacgttcacatccatcacattaccaaaa

SEQ ID NO: 4333 - DNA, 510 bp, Chlorella sorokiniana
  Clone ID: LIB3602-051-Q6-K1-D2
ggcggggacgacgtgaagaccttcgtcgccgcgtgctccaacgagaaggagtatacgcatgcagaggttgatgactggcggggtgcgctcatcccacctttcgctgcctggctggacgagcggatcaacggatttctggcccagggagactcactcagcaagatcgtccagcgcacccaaggccacattaatggcaccaagctggtgcccctggtggacaaggactgaaaggtgatcgtgaactagcacggcgacccggtgtatgcgcgtgcgggcgagaagggcgcccacacgctggtggaggacgcccatgggaagctggtgcccgcctacaagaaggccgccaaggcgggcgcccacaagctggtggaggacgccaatggcgacctggtgcccgcctaccagaagggcgccaacactgctggtggaagacgccaacggcgacctggtgcccgcctacatgaagggcggcatggctactgccaagaagcgcaagcagaaggctgaggc

SEQ ID NO: 4334 - DNA, 387 bp, Chlorella sorokiniana
  Clone ID: LIB3602-051-Q6-K1-D3
gcggcccgcttgccctcaccacttccacgtggccctaccccatgtgcagacattgccgacaacgtgctgtatgctgcgggacggccagcctacgtccaggtggtcgatatcctggtcctggccacctaccagtgctcagccaagggcctggcacgcgtgctcaagccctgagcacaaacgactgccctgcagagcggattttggacaacgacaaagtgagccacatgagacgcagccagctcggatgcagctgcctccttctttcatgccttcctgcgctctgtcatgaaatgctccaactacattcgcagtaagccatggcttacaaaaaggctgaaaccaatcgatcaggccacacaaaagctggtggaggacgccaatggcgac

SEQ ID NO: 4335 - DNA, 509 bp, Chlorella sorokiniana
  Clone ID: LIB3602-051-Q6-K1-D4
gcggccgcagcagcacccggcgcgcgacgcgcacgacaccttcttcctcacaaagccggcagccacccccgcgtccagcgttcccgcaagactacctgcagcgagtgaaggagacgcaccagcacggcggctacggcagcattggctatggctacgcatgggcaacagcggaagctgagaagaacctgctgcgtacgcacaccaccgcagtatccagccgcatgctgtaccggctagcgcaggagggcttccgcccagccaagtacttctccatcgaccgagtgttccgaaatgaggccatcgaccgcacgcacctggcagagttccaccagatagagggcgtggtgtgcgactacggcctcacgctcagcgacctcatcggcgtgctgcaggagttctttgaccgcctgggtctgagcaagctgcgcttcaagcccgccttcaacccctacaccgagccgtccatggagatcttcagctactcggagcagctgggcaagtggatcgag

SEQ ID NO: 4336 - DNA, 327 bp, Chlorella sorokiniana
  Clone ID: LIB3602-051-Q6-K1-D5
gtccctgtaacctccccccaccgactcacacgacctctcctaccctaacaaaacaaccactctttccccttttcgcgacaaccacactctaccattttgctattcaacatactcaacctcccaccccgtactgcttctatgattatctctctttattggcacctctctaaattgggaagatcctgctgcaatcattccccaatctatctttcatccatatactgtaccgcatagcacaagaaaacttacacccaaccaaatacttctccatctaccgaatgttccaaaatgaggccatcaacctcacgcacctttcacatttccacc

SEQ ID NO: 4337 - DNA, 91 bp, Chlorella sorokiniana
  Clone ID: LIB3602-051-Q6-K1-D6
aaaaataaaaaaaaaaaaaaaaaaaataacaaaaaaaaaacaaaaaaaaaagaccacacctttataaacatctcaagctgaggtactttaa

SEQ ID NO: 4338 - DNA, 373 bp, Chlorella sorokiniana
  Clone ID: LIB3602-051-Q6-K1-D7
gcgaaaaaaaaaaaaaaaaaaaaaaaaaaaaaaaaaaaaaaaaaaaaaaaaaaaaaaaaaaaaaaaaaaaaaaaaaaagacgaacaaaaaaaaaaaaaaaaacaatcaaatcaccaaactataacaaaataaaaaaacgacaaacatcaaagtgcatgaaaaagacccgaatgtctgccgacaacgggaaagaaacacatgacaataccaacatcactggcacaaacaacatcccaatgagaaagccaaacctcaattacctaacaaagaaaaacctgaacaaacacaaaaaacgcaactggatacacgagatcgcatccaacaagaacagctacgtgtacgagctacgatacatcaacaaaaacgaccaacc

SEQ ID NO: 4339 - DNA, 475 bp, Chlorella sorokiniana
  unsure (1)..(475): unsure at all n locations; Clone ID: LIB3602-051-Q6-K1-D8
gggcagctacggacctgccggtggtgtttggagaggaccgcggcaagggcgtggtggtgcgggcgcacctggcgcagcagcctgactgggcgcacctgtacgatatggccatcaccaacgtgtcagccggcgtaccgctggacggctggatgatccagttcaacaagaacgcgctggggctggcgccngcggctcatcaactgcagcttgacccaatgctgcctggcaccacggcggcagtgcgcgtgccgctcacgcacgcacccagcctgcaggcgccggagcatggcacggcgctgcaggtggcagtgaagtgcaaccagctcggcgtgctctactttgcagacaacatttcccagcaagcggctgcccccacggcggcggctgcggcatacccgcttgcaggcctgctctaagcagctgcatgcaaatgtgtgtcgcaatcacagtgtaacgctagataacctgttagatg

SEQ ID NO: 4340 - DNA, 505 bp, Chlorella sorokiniana
  Clone ID: LIB3602-051-Q6-K1-E1
gcgggccgttggagaggacagcggctctgcaaccatggcggagtccgtccagactttcggccgcaagaagaatgcggtgggtgtggcctatgtgaagcgcggcaagggcgagatccgcctcaacggcgccccgctggagctggtgcagcccgagacgctgcgctggaaggcgtttgagccggtgctgctgctgggcaagcagcgcttctccaacgtggacatccgcatccgcgtcaagggcggcggccaggtgtcccagatctacgccatccgccaggccatctccaagggcattgtggccttctaccagaagtacgtggatgagcagagcaagaacgagatcaaggacatcctgctgacctacgaccgcacgctgctggtggccgaccctcgccgctgcgagcccaagaagttcggtggccacggtgcccgcgcgcggtttcagaaatcttacaggtgaaggctgccccgtgggacggttgggcgcctctggaggcttcttctg

SEQ ID NO: 4341 - DNA, 354 bp, Chlorella sorokiniana
  Clone ID: LIB3602-051-Q6-K1-E12
gcggcagcttgcaacccacacaatccaccctcttcctggacctcacaacaggtgcccatcacgggggccaaccccggtggcgcggcggtgatggcgcctggctctcccaccccagaggttccagtcatggctgggctgcccatcacaggaatgccaggcatgcccgggctgccaggcatggtgccacgcccgcagtgatgggcaggcatgcacgcacgggcggccatccctgccggctgccaccagaacatagtacacagttctgctgccgacgcgcctgacgctgtatcacgcttcatccaactcaactgacttgccctcctcctattttgtagtaaaccccttgaccatgta

SEQ ID NO: 4342 - DNA, 501 bp, Chlorella sorokiniana
  Clone ID: LIB3602-051-Q6-K1-E2
gcgggacaaaaaaaaaaaaaaaaaaatctacaaccataagaagaatccgaccaaactttcggccgcaagaaaaatgcagggggggtggcctatgtaaagcgcggcaagggctatatccgcctcaacggcgccccactggagctggtgcagcccgagacgctgcgctggaaggcatttgagcgggtgctgctgctgggcaagcagcgcttctccaacgtggacatccgcatccgcgtcaagggcggcggccaggtgtcccagatctacgccatccgccaggccatctacaagggcattgtggccttctaccagaagtacgtggatgagcagagcaagaacgagatcaaggacatcctgcttacctacgaccgcacgctgctggtggccgaccctcgccggtgcgagcccaataagttcggtggccacggtgcccgcgcgcggtttcagaaatcttacaggtgaatgctgccccgtgggacggttgtgcacctctggaggctt

SEQ ID NO: 4343 - DNA, 507 bp, Chlorella sorokiniana
  Clone ID: LIB3602-051-Q6-K1-E3
gcgggcagaagggcttcatcccgctgtccacctacctgaccaactacaagctgggtgactatgtggacatcaaggtcaaggccgcggtgcacaagggcatgccccacaagttctaccacggcaagactggctgcgtgtggaatgtgaccaagcgcgccgtgggcgtggagctgctcaagcaggtcaacgggctgtacatcaagaagcgcatccacgtgcgcatcgagcacgtgacccccagccgctgccacgaggagttcctgcgccgctgcaaggagaacgactcggcgcggcacgcggccaatgtggagggcaagccgctgccggtgctcaagcgccagaccaagggccccctcaccgaggccatcatgctggagaacgtgaagatggataccatcacggacatcccctacgatatcctcaacgagggcgtgctctgagcgtgatccgcggtgacgttccctttattgcggctgcagcttagtgagatgtaaccccccataaaag

SEQ ID NO: 4344 - DNA, 384 bp, Chlorella sorokiniana
  Clone ID: LIB3602-051-Q6-K1-E4
ggggtgcacctccttgtaactgcaggtcatgtcagcgctggacaccttcatgcagcgcgtgcgctggtccccgctgcgggtgctcgtcatcgacatgccacccggaacacgctatgcgcatcttagcatcagccagcggctgagcctgtctggggcagtcatcgtgaccacgccggaggacattgcgctgctggatgcgctgctcggctgcaccatgttccgcaaagtggacgtgccaattctgggcattgtggagaacatgagctggtttgtgtgcggcaactgccgtcactagtcgcacatctttggcaacggttgtgcggataaagcggttgcagacatggacatggaattgctgggcaagattccactgaacatttccat

SEQ ID NO: 4345 - DNA, 318 bp, Chlorella sorokiniana
  Clone ID: LIB3602-051-Q6-K1-E5
gcggacactcaaatagctcgtatcactgatagacagtgactgcaacatgccggcagcagttttggcagtcctaccgggcgcaggtcgcacagcagcagtcaccctgccatccaaaagcctcctctcgcaccagccacctttaagggagccttgcctggtgcgcccccaccaccgcccactgaccagccgttgtcaatccgcgtcggcggtacaccctgtccagagtttgaacgctcgcatctcaggcaactttgaccagctgtttgtgactatggagggcaagcagtacatttcagtggagaatcttctggacctgtg

SEQ ID NO: 4346 - DNA, 332 bp, Chlorella sorokiniana
  unsure (1)..(332): unsure at all n locations; Clone ID: LIB3602-051-Q6-K1-E7
gtcgaccgggggtgggatgaagccacctctactagctngtggaggagaaggctctggccctggagtgcctggccgantaaagtgctgcgcagtgaacggcaccccaggcagctggcatggcacggctgctcctgctgccgccggcgccatttgccgccggccgctgcacactattctgtgcaatgaacgggctcccattggaacgcttgctgccgcggcaactcttttagtgggcgcgtcctggctcctggcaggttttaccgtctatacgctcgcacatgtgccgcccgccctttttgctgcaacaccttgcaccccaatgatgttagacc

SEQ ID NO: 4347 - DNA, 489 bp, Chlorella sorokiniana
  Clone ID: LIB3602-051-Q6-K1-E8
gggcaccaacgcatggactacatggctcgtgacaagttctatgcggcacacaacgaggaccagatggcggtctacagagtgcatgagggcatcgacgacttttccgctgaccaactcaagctggatgacatgatcggtgcggccatggagaaggcggaggtcaatcagtgagtgagcggcgagcactgagcaccggctgctgcctctgctgccaagcactagcagcatcgagcgccggcttggcactgctgcctccaagcctctgatggcaccaagcgctggctgccgctgctactacaaccgtgctgggcaacctgctctgtgacccaacactcgcacccacaaacgtatgacaccccaacactcacctggtaccggctaacgccaatgcgtactggcccgccgggctgcccttgtagcgccatgatacatactcatgttccctcacacgctgccactccgttgccacaccgtgccggcctgttccct

SEQ ID NO: 4348 - DNA, 503 bp, Chlorella sorokiniana
  Clone ID: LIB3602-051-Q6-K1-E9
ggggccacctccagcctgggcggcttcaaccccatggatgacgcggaggggccgggcgtggcctgggccgacaactctgaggaggtggtggcgcacgtgctgccgcctgcggcggatggggcacctggtgcacctgcccctgctggatatgctgcagcggctggccagcaggcaggcggacaggagctggttggcctggacctgcacgctctggccagcgcagaccttccggagcatccggtggaggttgatgttgcactgggtgtgccggcggcggcgggctcgtatgcgctggagggagcggcaggcgggccctccaaggagagcagcacccagtgggagactccacgagacacgctgctgagccctggcatgtcgccagcgccggctgggcagtgaacggctcgtagcttttgtggcagcagcaccgacagctgagtaggcgctggcctgctgttggctgtccagtttttgtcccactggcgccgctgtgctgagcgggc

SEQ ID NO: 4349 - DNA, 450 bp, Chlorella sorokiniana
  Clone ID: LIB3602-051-Q6-K1-F10
ggggggcgttcagtgatgcttctgaggatgaacacctgcgcagtttggagccacagtggcagttgacctgtatttggggggacaacagatatctgactggcggccctgcccgctctggcccacacccgcgcaggttcaaggcggagatccagtggagcgggcagcacgtggtgcagaagtatgtgtcggggctgggccgcgccgcgctctacaagcagctgcaggcggcggcgtgcaggaccaatgtggatcccacggtcctgaacgacgccattgacgccgcgatgatggactttggccagggagtcatccgcaccgtgggcaccgagattgaccgtctggagagcgagcttaaggagaaggtgccctgccttatctatgtggatctggaaaccgacaaagggtccaacatcccgcacagcctgatgtccaacctatatgcccaggacg

SEQ ID NO: 4350 - DNA, 406 bp, Chlorella sorokiniana
  Clone ID: LIB3602-051-Q6-K1-F11
gcggcttgtgggccccgccccccaacccccccaccaagtgcttgccccccttggccaaggccaaggcggccttattgggggcccccgaacccttggggcccaaggtccaccagccgttgaaccggttgttggcttacggccccttaagttccgcggtggaggccgccaacccgcccttggccacggccaaggaccagtacatccccttgcacaaccgcttgctgtccaccccgaattaccgccaggcttttaacctggccaaccagcttgcggcccggttggagcaaacctggttgtccagcacggcgcgcgcccgcctgcccgccttcgctgtggagacggccacgccctacctgaccaccgtggtgcagaacctgaagccaattgccgcttgagaacccccttg

SEQ ID NO: 4351 - DNA, 326 bp, Chlorella sorokiniana
  Clone ID: LIB3602-051-Q6-K1-F2
gggaaaaaaaaaaaaaaaaaaaaaaaaaaaaaaaaaaaaaaaaaaaaaaaaaaaaaaaaaaaaaaaaaaaaaaaaaaaaaaaaaaaaaaaaaaaaaaaaaaaaaaaaaaaaaaaaaaaatcgtcgcctcctcttataaaataacatattattgacccaccatttacaacgaacaaatttttatggggggggaccaaaaaaaaataaatcacggccaatcataaaaaaaaaacgattataaaaaaaccttgttaataaacaaaaaacaatcactaaaaaaaaacctctttcaccaaggaatcaaaaaaaaaaaagacccaataataa

SEQ ID NO: 4352 - DNA, 507 bp, Chlorella sorokiniana
  Clone ID: LIB3602-051-Q6-K1-F7
gggggggcgcccaacctggccaccgcgggcgcgcccgccggccggccctctggcggcggcgcccggtagagcgggcagggtagctcgaaatggttggtgccagcccagccaggcctagctcacatcagcaggccatggctcacggccacgccccagcaccagcttgcccaactctgacaagcggacgcccgcagcatcagccgctgctgactgagcagaacagcctgcgccgccggctgcctcatcccgccagcttccccgccggccgcccccgccggcctactagctttctccctccccagtccctgtgccctccctgcatgtgccaacgtgttgtgctgtgatattgatacactgcgccggtcagtctgtattactatgcccctgccctcccatgcaccgcatgggagcgggtggcttgctcagcgggcagcgcctgcctcccttggaggtcccttcaaagaaggtccaggcctgccgcctcagtccgtactaaacaaatcagca

SEQ ID NO: 4353 - DNA, 113 bp, Chlorella sorokiniana
  Clone ID: LIB3602-051-Q6-K1-F8
gcgaaaaaaaaaaaaaaaaaaaaaaaaaaaaaaaaaaaaaaaaaaaaaaaaaaaaaaagacaaccattttaaaaaaatccagccgtgacttactcttacatgcgccatcccct

SEQ ID NO: 4354 - DNA, 507 bp, Chlorella sorokiniana
  Clone ID: LIB3602-051-Q6-K1-F9
gcgcgatatcgaccacaacgggcggcccatcaactgggacaagtgggccatcaccagcgatgatccaaagttccgaggggcgggcaacaaggacagcggcgacgactacgaagcagcgccagacctggaccaccacaacccgcagctgcgcgagagcctcatcgactggctcaactggctgaagaccgacatcggctttgagggctggcgctttgacttcatccgcggctacgccccggagtactgccgagagtattgccagaacacgctggggggcgacacgttctacgtgggagaatactttgtggacctgcactggaatggctctgacctggactacaaccaggatgcggcgcggcagcggctctgcgactacatcaagcgggcggagtacacaaccctgtttgacttcccaacgaagggcatcctgcaggaggcggtgaagcacacccaatatgaccggctcaaggacagccagggcaaggcgcccggcctgctgggctggtg

SEQ ID NO: 4355 - DNA, 354 bp, Chlorella sorokiniana
  Clone ID: LIB3602-051-Q6-K1-G1
gggggcggccaggggctgccctgggaggggtccgaccgcgactacacgtacgaggagctgctggaccgcgtgtttgcggtcctcaaggcgcacaagccggagctcactgtcgagcggcagcgcaccaagctgaagccgccgcaggtggcgcgcgagggcaccaagaagacggtggggaccaacttcatggacctgtgcaagtcgatgaaccgcaaccactagcacgtgctgcaattcctgcttgcggagctgggcacgagcggcagcctggacggcacgcagcggctgatcgtcaagggccgcttcctgcccaaggtggtcgagaccgagctgcgccggtacatcaaagactac

SEQ ID NO: 4356 - DNA, 223 bp, Chlorella sorokiniana
  unsure (1)..(223): unsure at all n locations; Clone ID: LIB3602-051-Q6-K1-G10
aaaaaaaaaaaaaaaaaactaaaaatattncatacnaaactcttcattaattatatcaaaataaaataaatttattgccgcttttttttaaaaaaacgtacttccccccccctccccttttataatttccaattttttctccccttttatacaataaattattttttttttatttccacccaatttcaattcactttcctcttttttaacaacttacctaatt

SEQ ID NO: 4357 - DNA, 503 bp, Chlorella sorokiniana
  Clone ID: LIB3602-051-Q6-K1-G11
gcgctctgccagggcctcggccctgtctgctacccacccgctccctgccaggctcgtttcgcatcccttgcacccccgcctgcctcggtacgcaccctcccttcctgggcctcggccctgtctcgcaccctcctacctgggcccttggccctgtctgctacgaccccacccgctgccgcactgcggcgcaccctgctccttccccgcaccgacttgcactttggccctcttgctttggccgcccattgcctgccgtgccccgcccgcccgcctcatggggcgctccatgcagctcacatccccctggcaggctggctgagcgcttaggctggtcggctgctgcccgttggcctctttgctctcggttttgctccctttgcttccacaacccgcttgcagcaacgttgctcgtgcactgctcccagcagttggtggtgctcaacgatggggtcacccggacacccgacctccgctggtggtggttcattccagcattgcatgcc

SEQ ID NO: 4358 - DNA, 506 bp, Chlorella sorokiniana
  Clone ID: LIB3602-051-Q6-K1-G12
gcgcggacgcgtgggcattcactagtgatcgctttctcaatcgcgatccatcccttgtaagacctcttacacctcgtgggtcccgctcggcaccagctctgctccgcttgccgccagccgcttgcatccagcccctactgacgatcagggtgtcgtgagtctgcctgccaacccccaggcgctagctcgcccggcatggcccagggcggcggcgcgcagccgccagcggcgggtccgcagcagcagcaggatggagcgtttgtgttccccatcttctacagctacccgccctacttcacgctgcagcctgtgaaggagacgcagcagaagcagcggctgctgtggcgcgatctgatcctgcgctactgccggcaccaccgcatccatgtagttccagcgggcgaggccgacgatttcccgctgttccacaacgccggcatcaaccggcggctgacacgggagatgaaggtgctcttcctagatgaccttgtcaaagcgggttcagc

SEQ ID NO: 4359 - DNA, 62 bp, Chlorella sorokiniana
  unsure (1)..(62): unsure at all n locations; Clone ID: LIB3602-051-Q6-K1-G2
gtatgcatgactgagtgtaccaatggttcactccttntatacatgatctatgcacttgccac

SEQ ID NO: 4360 - DNA, 266 bp, Chlorella sorokiniana
  Clone ID: LIB3602-051-Q6-K1-G5
ccccaattccccctccacccacgcgtgcgagcataaaaaaaacacctcactccatttccacccttcacccactcttcacacatccccttctgccctccacattcgcggggaaacccattcatgatgctctccctcccacttattaacacttccatcttatccaaacacattttcatactcccactttacaaaccctttttccatccttatacccatctcctccccaaacttaatctctaccaaataaaatcccatttacacccctt

SEQ ID NO: 4361 - DNA, 504 bp, Chlorella sorokiniana
  Clone ID: LIB3602-051-Q6-K1-G7
ggcgggatatcaaccacaacgggcggcccatcaactgggacaagtgggccatcaccagcgatgatccaaagttccgaggcaggggcaacaaggacagcggggactactactaagcatcgccagacctggaccaccacaacccgcagctgcgcgagagcctcatcgactggctcaactggctgaagaccgacatcggctttgagggctggcgctttgacttcatccgcggctacgccccggagtactgccgagagtattgccagaacacgctggggggcgacacgttctacgtgggagaatactttgtggacctgcactggaatggctctgacctggactacaaccaggatgcggcgcggcagcggctctgcgactacatcaagcgggcggagtacacaaccctgtttgacttcccaacgaagggcatcctgcaggaggcggtgaagcacacccaatatgaccggctcaaggacagccagggcaaggcccccggcctgctgggct

SEQ ID NO: 4362 - DNA, 453 bp, Chlorella sorokiniana
  Clone ID: LIB3602-051-Q6-K1-G8
ggcgggttctagaacacccacaccaacatatcaactcacatatctccctgattaccatgccacaagcacaacaccgaggcggtggcccaatgcacagccgtgtccaatactatgcacttcaacaccctgaccatcatacccccgagctctgccacaaacaaatgctctggctcactttaaggaggatcgactaagggtctcttgccttgctctctgaatccatcaacagctacaccaccaaccccagcacagaatacaaccactacacactccctgctgacactgatttacctccgacatttccctgtggacctaacatcacctgcctctttgcatacactataccactatgatgcccgccactgggctctcaattacatccagacggcggagctcacaacatgtaactcaattccctgacaaagacatactacagtacaccggttaatcaca

SEQ ID NO: 4363 - DNA, 440 bp, Chlorella sorokiniana
  Clone ID: LIB3602-051-Q6-K1-G9
gcgggcgttggagggtttcaaccgcctttggattgtcccacttccatgcagttttgtgccttgcgacccatctgcgtggggggaagatccacctctcacacttgttgtcctgcctcacgcaagcatgctcccctttgcaggccgagctggagaaccgggaggaatgcaacgaggagttctttgccacgctgcgcacgctgctgcagtcccaggcgttcaaggaggccaccaacgcctacgccccaggcaacacacgcgtgctgtcggcatgagtgctctccgtctttgactgcacttggcgcgctgcactgcaggcgctgcaatgagtgcactgtttaaaaaagcaaacaaaaccaattgtaagacagtgatgaggcgtgaagatgacactgtcatccagactctccacagctgccaacactggacaaaattgatgaccc

SEQ ID NO: 4364 - DNA, 486 bp, Chlorella sorokiniana
  Clone ID: LIB3602-051-Q6-K1-H1
cgccagtcgcagggcgtggccgctgctgcgttaacggccgacgatgcacgagcggccttgcccagctgctgcgggggccacaggcgcgcttgaagctgccgctatgatgctgcacgcggagagtcctgcagcgccctgctgcaccggctggcgccgcagccattgagaggaactgagcagctggcgacagatggacctgccctcaactcggggaatggtctagcttgccgctcacactccaaccccaataccatgcccatgtatatatctgaccctgctacactccgtccaacgaccactcgcctggccgggaggttttgattgctctgcggagtttatgccggctgttggcagatcggcggtgcactcacggcgccctgagggcgcttgccagtggacgcccacccacggcgctccgtatggctgcgttgctgcacagctactgccattcactgacactgcaccgcatgcacaagttcacgttgc

SEQ ID NO: 4365 - DNA, 338 bp, Chlorella sorokiniana
  Clone ID: LIB3602-051-Q6-K1-H11
gcgctggtgcaccaaggccatcaacgaggacgacgggtatgccaaggcctacttccgccgcgctgtgctggctgcacaggtgggcgacgagcaggctgcgcaggacgacctggccctgtgtgcagccatcgacccctccaccgccggcgaatgcgagcgggagctgcggcgcatggagaagcgggcggcggccgcggaggcaaagcaagctgcagccatgaaggggttcctaggcccccggcaatgaaccctgccttgctactgcctgccttctcagcttccaagcatcaagcttatcatcgtttcacagattggtttgttcagcaaggcaagccaat

SEQ ID NO: 4366 - DNA, 385 bp, Chlorella sorokiniana
  Clone ID: LIB3602-051-Q6-K1-H12
gcgccaaactgcctgcaccgtggaaagattgggtacgactaggtggagtggcttgcggcgccctaggccagttatcaagggcaggcagtgccgctcacgtacaccagacctgatggggaggagggctttcctggcactgtgcagctgtcagtggtgtataccctgaccaagggcagagagctgtgggtggagatgcaagcaaccgcaaatgccgcgacacccatcaaccttgcacaacactcgtacttcaacctggtagggcacgccagctgtaccattctggggcaccaagttacacttcacggcggagaccactacacaccggtgaacaacgtggtcatccccacggacgacattgcatccgtgcgcggcacgccctttgact

SEQ ID NO: 4367 - DNA, 456 bp, Chlorella sorokiniana
  Clone ID: LIB3602-051-Q6-K1-H2
aacaaaaaaaaagacaaaaaacaataataaataaacagaacaacaatgaacaaacaaaaaatacccatctgctgtgggggggatcaacgctcttgaagctttcgttatcatgctttactcttcgattcttgcacctccctgctgttccttgtggcgccttaaacaacgtgcggagctgaacaactctcgacttctccacctgaaatcacctggaggcacatccctatttcgccgttcacacttaaacccctataccctgcccctgtatatatttgccactgctacactactctcaatgaccactggtctgccccctatattttgattgctatccccccttttttccggctattagccgagcggacgtgtacttttcgcaccctcatagcgcctgcctttttaggtccgttcactgcgtttcttttcactttgttccttgtttctctgctaacattt

SEQ ID NO: 4368 - DNA, 489 bp, Chlorella sorokiniana
  Clone ID: LIB3602-051-Q6-K1-H3
gcgcaaactgacaagccaacatcccggagcgtagcaagggccagcttctgcgcctcccggcggccaacctgtcctgtggagctgcacaacttgcagcgctgggttctgcaagcgcacctgtggcggctgcaggcgcacctgtggcggctttggtatataccgcgtggcaggcgggggtgccagcattgcccacggtgcgggcctgcgccatcatgttacaatgttgcatcccaaccgccgcttgcgcatggctgccgctgtcctgcctgaaccgcaccaccgactacatgcatttcgttgactcttgcccacaattttagacctcttggcccgccatgatttatttttgcccccgcttgcgctccagccagcaccacccgcccgtcacgctcgccctgcctacaaccgtcggtcatgcatgcctcctttcgtgggcgacacattggtgcccttggccggtgcaacggaattccgtcacccccttttttg

SEQ ID NO: 4369 - DNA, 499 bp, Chlorella sorokiniana
  Clone ID: LIB3602-051-Q6-K1-H4
gcgcggacgcgtgggcgcgcggtaggctgtgctggtcaggcaggcatttgtgcaggcagtttggccggcactggtggagtgggaccggaagaagcgcatgctcggcatgcctgcttctgcacaggcggcgtggcagctggcacgcagctacaccgctggtggccacattgcgtggcgcagcgccggcacaggagcggtggccttggccaatgcgcacaaggcgggcgaggaccaggccacggacacgcggctgcagatgcagtggaccaacggtcacccagaggtcaccaaggccgacgtgctgtgtgacctgcgcgtcgccctccgctccgcaatagcggcccgcatggacgccaagtccatcagggatgatatcgaccgcatcaacgccatggaggcggatgagaacggcgcttgcgtgcaggcgcagcagccgtcggcgcagcagtcggtgctgcagcagcagctgctggcaagcctgcatgacggtggtgctggc

SEQ ID NO: 4370 - DNA, 337 bp, Chlorella sorokiniana
  Clone ID: LIB3602-051-Q6-K1-H5
gcgcgcttcctgctgcagcacgcccacctcgcggcggcgggcctggcggcggtcgccttcttctgcctgtctctggcagtggggttgtggggcggcaacgcaatggaagttgggtctgcccgggaagcaagtagcaacggcggcaacggcgggagcgcagcagccaacgggcgcctggatgccggagaacgtgcggagcaccgggagccgcttctgccccgatccttcccagtggcagcagaggaagatggcaagcaagccggcgaaggaccacaagcagaccggagcgtgaatggagcaccaaaacagcaacaaggccctgggctggtggggtcgc

SEQ ID NO: 4371 - DNA, 465 bp, Chlorella sorokiniana
  Clone ID: LIB3602-051-Q6-K1-H6
gcgggcaggcctggtgctggccggcccgctgggctacgccctcatcatgtggatggaagggaaccttttcactgcggcgcggcacagcaagctggcgctgagcgtgaagctgacgctggaccaggtgctagggtttgcactctggcacggcgcgctggcggccatttatgagccccaccggcaggcgtgcctcagcctggggcggcccaaggccccagtgctcacccatgcggcaccggcagcggcaagtaaagcggcggctaagaagagcaagagcaagtgaaggccctgatgcccgccggcccgccggcaccgccatttgcatttagttgagcgcgtgagtcagtgtgtgaggagctagccgatagcgcagcccccgaaagccttttctgcccaagtagagccgatcgattgccctgccccaatgtaccccggcacgatagctacgcccgtccccagtctcag

SEQ ID NO: 4372 - DNA, 466 bp, Chlorella sorokiniana
  unsure (1)..(466): unsure at all n locations; Clone ID: LIB3602-051-Q6-K1-H7
gcgcccgctgtgttgcctcccatagccaactatacaccggtggcggtgctgcgcacagctgggcacccaactggccgagcgggctgggttagagcaaatgcacacatgtagaattaggcaggtgacattctttcggccggcccccagccgccgccggccggaccccgcccgcagcctgcctgcccaggcgggctgcaggcacccgcatttcatggctcccgccaccgttgagcgccagttgcagctgccctttgcttttgcctttggccctgcgccgcacaattttggttgcttccgctccaatttctgtcgctctcctgccatgctccctcgcctgctggctgctgtgcaagcctagcgtgcagtcttgcaaatccaatttacacttctgaacagtctggcngtcnaaaaaaaaaaaaaaaaaaaaaaaaaaaaaaaaaaaagaaaaaaaaaataaaggagccaa

SEQ ID NO: 4373 - DNA, 405 bp, Chlorella sorokiniana
  Clone ID: LIB3602-051-Q6-K1-H8
gcggtgcccttccgggtgctgctgttgtgatgaccgcaagctgcgacggcccgcggacaggcgctgcgatgtgcgctggagagctcacatggtgcgcaagctactcatattgcaatcaggcgaggcgactcgttgcatttttttcccgctgatgttctttccagtttgttcagcactgctctgccacacgattcaaggcccccgatggtgcaccgcccggccgcgggcgccagggaagcgggatctgtatttttctgtcccgacctctttcgatcgcagagcttttggccggttttgcgctgctgtaatgccttctgctgaccgctacataaactgctggctgctgtgcaagcctagcgtgcagtcttgcaaatccaatttacacttctgaacagtctggcagtc

SEQ ID NO: 4374 - DNA, 504 bp, Chlorella sorokiniana
  Clone ID: LIB3602-051-Q6-K1-H9
cggacgcgtgggcgcggtggagtgggcaattcgttcgcgatggtgaacgtcccgaagaccaagaaggccttctgcgggggcaaggagtgccgcaagcacaccatgcacaaggtcactcagtacaagaccggcaaggcgtcgctctacgcgcagggcaagcggcgttactaccgcaagcagtccggctatggtgtccagaccaagcccgtgttccacaagaaggccaagaccaccaagaagattgtgctgcgtctggcctgcaccgtgtgcaaggcccagcacatgcacgccatcaagcgctgcaagcacttcgagatcggcggtgacaagaaggtcaaggggctatactagtaaaaaaaaggagatcggcaggctgagagcatgaccgacaaatggaggcagtggcgcccgctcaccctgggcggcctgatcccctcccggcacctatctttggccggctctggccactcgtacgcatccttgtccatgcccttgtgcttactg

SEQ ID NO: 4375 - DNA, 318 bp, Chlorella sorokiniana
  Clone ID: LIB3602-052-Q6-K1-A10
tcgcaaaaaaaaaaaaaaaaaaaaaaaaaaaaaaaaaaaaaaaaaaaaaaaaaaaaaataaaaaaaaaaaaaaataaaggggaaaaataggaaaaaagatttggggggggggttttttttttcggtctcttgtttccgtttttttgtttgtataggggtttttttttttgttttgaaagttttttttttttcactggcgttttttttattactcttgggttgaaaaagtttttgggtttgcaaatttttttttctttggacaattttttttttttgctggggtggtgaaaaaagaggggaggtttccgaacgtttttt

SEQ ID NO: 4376 - DNA, 458 bp, Chlorella sorokiniana
  Clone ID: LIB3602-052-Q6-K1-A11
aaaaaaaaaaaaaaaaaaaaaaaaataaaaaaaaaaaaaaaaaatatattaataaaaaaaaaaaaaaaaaaaaggggaaaattaaaaaaaaaaaaataggggggggggttttttgtttttttaagtttttttactttctgttctttgcattgggggggttttttttttgggttccctttttttttttgggttgtgggggcgttttttttttttttttgtggcccttttttttctttcctttgctgtttttttttagctttttttctttttttaacttcggttggtttcccatttttttggcttgtgttggattttttttttttttttgttggtttttttgaatagggggcgggcccttttttttttttttaatttttgttcccttttttgtgtatttttctctccccctttttgtttttttttttccgcggggggggggggttttttttctttttttt

SEQ ID NO: 4377 - DNA, 447 bp, Chlorella sorokiniana
  Clone ID: LIB3602-052-Q6-K1-A12
gagtacctgagccacctgccgcgggccagcgagtaccgccgcatcgcgcccgtgtctcagccgctgcgggcgtgggtgccgcagtcggagacggaccgcgtgtacgacatcaagtactacgtgcgggacacgcggcgggcgcacctgccgggcggctccatcaagctggagcgcggacagctggacgtgcacgcacccattgacgcgctggaggcgctgcccaccggcgcgacccccaacaagccggccaagtggaagccgttccgccccatcctggagaacgataacaacggctacacgctctgagctgggcagcggccgcccaccacactgtcagcggctagggcgcatgctgcgctgccaggcttcgacgcgcccttgaaagggcgccgctcggcggcagcggcagccgggccgccaccttcccctgtttccctgctgctccac

SEQ ID NO: 4378 - DNA, 290 bp, Chlorella sorokiniana
  Clone ID: LIB3602-052-Q6-K1-A3
ggcaggagctggaggcggttggagcgggagccgaccgacctgacgggaccagctgctaaggcggccactgtgccccaaccgcgactgcttttgcttcactttgctgcaagttttgtgactttctgtttcttgcttcacgctgattccgcttcacgcatgaatgttatctgctacagtttctgctgctacactttgcttgcgctgcacattgcatgcatttcattgcagagagctcctgccaagctgaccagctagttggcgcccggcttgctgtaaatggaatgctcgcc

SEQ ID NO: 4379 - DNA, 317 bp, Chlorella sorokiniana
  Clone ID: LIB3602-052-Q6-K1-A4
cgtgataaaataatgaagataaaaaaaaaaaaaaaaaaaaataaaaataaaaaaataataaaaaaaaaaaatgtgggaaaaattttaaatgatattgcttcacttttctgcaagttttatgactttatgtttcttgctttacgatgattacgcttcattcatgaatgttatatgctaaagtttctgctgctacactttgcttgagctgcacatttaatgaatttcattgcaaagagataattttaagttgaccagttagttgtattcttggattgttgtaaatataatgctagttaaaaaaattttttttattttaa

SEQ ID NO: 4380 - DNA, 256 bp, Chlorella sorokiniana
  unsure (1)..(256): unsure at all n locations; Clone ID: LIB3602-052-Q6-K1-A5
aaaaaaaaaaaaaaaaaaaaaaaaaaaaaaaaaaaaaaaaaaaaaaaaaaaaaaaaaaaatattataaaaataaagggggtaatttaagattgtgtgcctggttttttctcttttttttttggttcttttttttttgtttttggntttntttttatttgtgttgtttttgttaatatattttagattttttggtgtgtttgttttttttggtttttctttttttttttggttttttttaaataaatattttttttt

SEQ ID NO: 4381 - DNA, 446 bp, Chlorella sorokiniana
  Clone ID: LIB3602-052-Q6-K1-A6
aaaaaaaaaaaaaaaaaaaaaaaaaaaaaaaaaaaaaaaaaaaaaaaaaaaaaaaaaaaaaaaaaaaaaaaaaagagaaaaaaaaaaaaaaaaaaaaaaaaaaaaaaaaaaaaggaaaaaaattttaaaaataaaaaaaattaaataaattttatatgggggggggctttttttaaattctagtttttatttttgtttttttggaagtttttttttttttttttgggttgtattatttatttttttgggccttttttttaaatgggggtttttgaaaattttttgtttttccaaattttaaaagtttgatgaaattttttttttttcgagtttggtttattattaaaagggcaattgaattcttttttttaaaaatttttaaacccttaattggaattgttaaccccttttttgggggctatttttggggggggggttggtggttt

SEQ ID NO: 4382 - DNA, 450 bp, Chlorella sorokiniana
  Clone ID: LIB3602-052-Q6-K1-A7
gcgcgggtttgccgccagaacacaagtgtcgtgaaaactacccctaaaagccaaaatgggaaaggaaaacactcagggaacattgtcgtcattggacacgtaaattaagtcaagtccactggtactggtcatccaatctacaaatgcggagaatcgacaaaagaaccatcgaaaaattttagaaggaaattgctcttacgggaaagggctccatcaagaatagctccggacttggataaaactgaaaactgatcgcgaacgtggaataccattgatatctcctggtggaaattcgaaaccagcaagtattatgtgactatcattgatgccccaggacacagagtactcatcaaaaacatgattacagggacatctcacgctgactgtgctgtcctgatttgtgctgctggtgttggtgaatttgaagctggtatctccaagaatgggcag

SEQ ID NO: 4383 - DNA, 448 bp, Chlorella sorokiniana
  Clone ID: LIB3602-052-Q6-K1-A8
ttcggaccgcctgtctgacggcctaatatacgacatcagcttgcgcgcgggcctgatgtacgtcgacgatgcactgaatgcggcggtttatggcccctcccaagacggcgaaccggtcacagccacccagatcctggcagggctggtggaccctccccgcgagttctcgccgctcttcaaggccctggatgagctggcgggcactgcaaatctcacgcggcgcacgatcagcaagtatgaaattgcgagggcgctgtccatgggcaagaagtcgtttgccaagatgtcatccggcagcagcaagaccggcggcaggacgagcggcggtctgagcccatcgggaagcatgtgcccgcttcccggcggctcaccaacctctacgctccaggcagctgcggcaggaggtgcagcggcagccctgctggagaccagcgctgaggagggctgc

SEQ ID NO: 4384 - DNA, 96 bp, Chlorella sorokiniana
  Clone ID: LIB3602-052-Q6-K1-A9
aaaaaaaaaaaaaaaaaaaaaaaaaaaaaaaaaaaaaaaaaaaaaaaaaaaaaaataaaaaaaaaaaaaaaaaagagaaaaaaaaaaaaaaaaaaa

SEQ ID NO: 4385 - DNA, 444 bp, Chlorella sorokiniana
  unsure (1)..(444): unsure at all n locations; Clone ID: LIB3602-052-Q6-K1-B1
ccgacctgtattggatggtgagcaacgtcaaccgcgacgcgacgcgcaactggaagcagcccgacgcacccgagcagcacaacccgcagctgcacatcacgctgttcagcaagtgcgaggtggaccgctcaaccctgggcctcttctactcgcccaacctggtgtcctgggtgctggcgggcatggtggactaccacatcagcctggggcgccactttgcatacccgcacatgctcgtagacggccgggacctgctgatcgtgagccgcgcggcgtttgcgccctgggcgcgctccgccaacgcgccgctgaacgagttctacaacaaccacaactccaacaccatcgcgttccaccgggtgcgcaacttccggcactacgccaaccaggagtgggccacgtaccagggcccttactccgnctccccacgccgcaccgcaatga

SEQ ID NO: 4386 - DNA, 272 bp, Chlorella sorokiniana
  unsure (1)..(272): unsure at all n locations; Clone ID: LIB3602-052-Q6-K1-B10
tttaaaagtgggcaagtcctacaagtctgtctacctccaacataggacatacctgtacctcctacttgccttttttaccctcttcacctaactgacaacccttaagtgctttctttgctcaaggtgaaagaaatcaagaacggtcgcctggccatggtgtccttcctcggcttcgccgtgcaggcggccgtcactggcgagggaccctacgcgaactggtcgaagcatgttgnttaccccttttgctacaacctgttgaccatacttttctc

SEQ ID NO: 4387 - DNA, 438 bp, Chlorella sorokiniana
  unsure (1)..(438): unsure at all n locations; Clone ID: LIB3602-052-Q6-K1-B12
cggacgcgtgggcggacgcgtgggcgcgctccggcgccaagctgtcagccggcaagaacgcggcctccaagatgtgaggctccacggctgctggcgctgctgctgctgcgattgngcgcagtgttgcagccgccggacgcagngccatgtttgccgcacctggaatgaatgctcaacgccgnccccggcaaggcccgtttctactctttgctacgtagcgcttctgttttccgtcagcgaatcccagttttgaccaatccaattttggtagcgtgccagaccttgcttagcgagcgccgaatgtaaatgcttgctcccaaaaaaaaaaaaaaaaaaaaaaaataaaaaaaaaaataaaaaaaaaaaaaatatatatttaaaaaaaaaaaataaaaaaaaaaaaaaaaataaaaaaaaaaaaaaaaaaaataaataaaa

SEQ ID NO: 4388 - DNA, 283 bp, Chlorella sorokiniana
  Clone ID: LIB3602-052-Q6-K1-B2
aaaaaaaaaataaattacaaaaacaactaaaaaaaaaaaaaaaaaaaacaacaataaaaaaaaaaaacacatccgactaaaactaacactaacttactaatctctctacccaacatttgccccctccttctatgttctcaagttttcttttcctgcgctttcaatggctaccttttttttttcgttgcatctttttctattccattcttctggtttttacatcttcatacttgtaaaaactttttttttccatacttatttccatttctagcaattctttttt

SEQ ID NO: 4389 - DNA, 452 bp, Chlorella sorokiniana
  Clone ID: LIB3602-052-Q6-K1-B3
aaaaaaaaaaaaaaaaaaaaaaaaaacaaaaaaaaaaaaaaaaaaaaaaaaaaaaaaaaaaaaaaaaaaaaaaaaggggaaaaaaaaaaaaaaaaaaaaaaaaaaaaaaaaaaaaaaaaaaggggcggcctttctttttaaatcccaaccgccccttttaaagaatccaattttacttacccttccttccaacctaatagtttttttattgtgccacctaaattaaattaactgcccgccttttaacaacgtcgtaattggaaaaaccttgcctttacccaatttaatcgctttgcaacacatcccctttttaccacttggcttattaccaaaaagccccaaactaatcccctttccaaaaaattgcccatcttgattggaaaatggaaccccccttttaccggccctttaaccccggcggttttggtgtttacccccaacttgacctttac

SEQ ID NO: 4390 - DNA, 341 bp, Chlorella sorokiniana
  Clone ID: LIB3602-052-Q6-K1-B4
aaaaaaaaaaaaaaaaaaaaaaaaaaaaaaaaaaaaaaaaaaacaaaaaaaaaaaaaaaaaaaaaaaaaacacgggggaaaagggcgcccacttttggggtccccctttaaaggtccctgccttccccgcccttgctttccaatagtgacccctaatttcatgtcactgcccttcattttcctgccccgggatttacaactccctgcctgtgccaaccttgcggtccccccactaaatccccttttagccaactcccgttttacctgatgggccaataccaaacacccttccaccaattgtccttcccaaaatgtgcactggctccctccctattggcccc

SEQ ID NO: 4391 - DNA, 438 bp, Chlorella sorokiniana
  unsure (1)..(438): unsure at all n locations; Clone ID: LIB3602-052-Q6-K1-B5
gccgtggtggccatcaacgtggccctgatggccgcggccgagaactaccgccgcactgaggacggtcccgctggctacgccccgggtgtgggcaagttcgacgagtctgtgtactccaacatggacaacctgtaccccggcggccccttcgaccccctgggcctggctgacgacccggaggtgctggctgagctgaaggtgaaggagatcaagaacggccgcctggccatggtgtccttcctcggcttcgccgtgcaggcggccgtcactggcgagggaccctacgcgaactggtcgaagcatgttgctgaccccttcggctacaacctgctgaccatcctgtcctctgaggaccgcgccgccgtgctctaagcagccggccccgcctggcgcccgccgnncgcccgagtgtagctctgtagtcccaccccttccctg

SEQ ID NO: 4392 - DNA, 433 bp, Chlorella sorokiniana
  Clone ID: LIB3602-052-Q6-K1-B6
cgcctcgtgcgtcgtgctgcccgccagcctcggcttcttcatgctctacggcaaaatcgtggaggcgctgccgtcgcgcgccgtgttctacgccgcgctgtccccgctggtcgccttctacctcgcctttgccgcgctgctgtacccgctgcacggttcgctgcacctcaacggcttctatgccgccaccgcggcgctggtgccccaggggctgcacggcctgctgaaggtcatcgagtactggaccttctccctgttctactgcgcctcggagctgtggggctccgtcgtcatctcagtgctcttctggtcgctggccaacgaggtctgcactatcagcgaggccaagactgtgtacccactgatgggcattgctgccaatttcgccctggtgctcagcggcagctgggtcaagtgggtcaacgcaacgctc

SEQ ID NO: 4393 - DNA, 444 bp, Chlorella sorokiniana
  Clone ID: LIB3602-052-Q6-K1-B7
cggacgcgtgggcggacgcgtgggcggacgcgtgggtggcgctatgtacatgtccggcctcaaggctgcccaggtcgcgctcaactccctgcgccggcagcaggaggaggaggcggccgctgaggcaggccaggagggcaaggagatggtggccgcctaagccagctggactcgccacagctcctcgcctttcaagcctttcaggctggcgtagcgctgtccgcagcagccgccagtcagctgcaagtgtacttcagcctttgttgaactcgctgccgcctctgattgcgccagtcagcagctactttgcccaacacacgccggggggttccctgggcgggcttccatcccgagcaataatgccatgcagcgctgaacgccacacgacacacccctttcagagaactgcctttcatctcgccctcagctgccatcccctgccta

SEQ ID NO: 4394 - DNA, 444 bp, Chlorella sorokiniana
  Clone ID: LIB3602-052-Q6-K1-B8
gccatggtctacaagacaaaggctggcaccagcaagctgctgaccgccaactcgggcgacgcgcgcatcctggtggtgcgcggcaaccaggccattcagctgacggaggaccacgtgcctgacaatgaggacgagcgcaaccgcatcgagcgcttcaaccccaaccccaagctgccgctggtccgctatgtgggcggcacttggcgcgtgggcggcctgctggccctgtcgcgtgcctttggcgatgcctacctcaagggcaacgaccagtttgagggagtgagctactacgcgagcgacacctacgcctccggctttggcgtgattgctgagccctacaccacgctcaccgacctgacttctgaggactcgtggctcatcgtctgctccgacggcctgctggctaacgaggagcgcggcggcggcggcggcctggacaaccct

SEQ ID NO: 4395 - DNA, 334 bp, Chlorella sorokiniana
  Clone ID: LIB3602-052-Q6-K1-B9
cgatgcagcagaagacgatgcggacgcagcagatgcgacggcggcggcagaagcggggcagcaggacgcaaagctgtcagcagcagatgatgcagctgagcagccagacactgtgcatgaagagctgtagctgcccaccacttgcaaaagtgtggctggaaaaaaaaaaaaaaaaaaaaaaaaacaaaaagagagaaaaaattaaaaaaaaaaaaggactgatagacctgaaagcgaacatatggcgatgccatacctgaacggtaactaccattttgagggagtgagctactacccgagcgactgctacacctctggctgtggcgggcttgtt

SEQ ID NO: 4396 - DNA, 374 bp, Chlorella sorokiniana
  Clone ID: LIB3602-052-Q6-K1-C1
cggacgcgtgggcagcgaggcgctcaacgcgtggagcggctccatcggcaagctgcttgttctggtggagaagacgtgccagcaaatccagaaggaaagcatggtgcaccgcgtgcccatcggggcggcatgattgcaacaactgcagcagcgccacggctgcagcagcgagcattcagctggtgcaccgcgtgcccatcggcacctctgaactgtaggcatccagctgatgcaagcagccgccgtgcagcggcctaaccgtcccaaaccaacggcagcaggcagccagcgcggcaaatgcgccagcacgcctccagcgcagcagcagcccgccctccgcaccacgctgtggatccttgtaacaatccgtgtac

SEQ ID NO: 4397 - DNA, 322 bp, Chlorella sorokiniana
  unsure (1)..(322): unsure at all n locations; Clone ID: LIB3602-052-Q6-K1-C10
agacggtgcgccaaacgccggcggcgaggcctgccgctgccctgtttgccgggctgaggtgaccggcagccggcgagtcttcgactgctagccgcaggcatgatgcctgtgtctggcctccagcagcaaagtcatgcagttcagcaatgcaatttgtgtccaagtccgcagtaccaagcattccataccacagcagcctgctactatgtgtctgcgttcaagcccttctatcaggccctttnccctcctaccctgttttcccagctgaaaccactcagccttttgtgagccgcactaatgcatgccgcagcgctctgcaacg

SEQ ID NO: 4398 - DNA, 383 bp, Chlorella sorokiniana
  Clone ID: LIB3602-052-Q6-K1-C11
gcgagacatgtttattgatgcggccaaggcgctggcgcgctgggtgcccttagaggagcgggcggccggcacgcgcatgccttccgtgggcgcgctgcgggaagtgtcatcccacatggcggcggctgtggccaacagggcatacagcgtaggggtggccacagagcttccccgcccgcatgacctggtggcacaggcgcactcctggatgtacaattccaagtaccgccggtaccggtgagcatggcaggcatggatcattgcaacatgaacatgcatgctcacgggtcgatgcgtcctgcgacgtgcagcactttttgcatacatagcgcacgcttctatcatatgatgctttttgactgtacttttccccttgtaacatt

SEQ ID NO: 4399 - DNA, 448 bp, Chlorella sorokiniana
  Clone ID: LIB3602-052-Q6-K1-C2
gcggccccacatcctggactccaaggcggcgggccgcgaagcatacctgcagatccttcgagacctagcggtcaaggacaaggaccgccccttctcctacctgtgggccgagggcggcgcacagccaaagctggaggccaactttggtgtgggaggctacggctaccccgcgctcatcgccttcaacccggccaaggccaagtacgccaccagcaagtcggcgtttgaggacaagcacgtgaagcagttcctggagtcggtccgcttgggctttgagagcgtgtcggatgtgagcggcactctggccaagatcgaaaaccgcgcaccctgggacggcggcgagggcactgtggatgcagcggacgagtttgacttggcggatttgatgggagatgatgacaagaaggaggagctctgagcgcagcttctagctgtgataaggtcttga

SEQ ID NO: 4400 - DNA, 450 bp, Chlorella sorokiniana
  Clone ID: LIB3602-052-Q6-K1-C3
gcggatggagcggactcgctggacctgtccagcgacagcagcgacgaggagcggcgcaggaagcggcgcaagaaggagaagaagcgcaaggagaagaagcggagcaaggacaaagacaagaagcggaagagcagcagcaaggacaaaaagaagaagcggcggcgcagcagcagcagcagcggcagcagctccagcagcagcggatccgactcggactgagcgggcggttcaaaagattcaaatataaaaagaattagtttgcccctaaatgtctaccggcgctgcgctgggcggccttctgctagcttgctgcggccggcggcttttcagccaattggcccgctgccatgccaacatgctagcatgctgctctctttgctgctattgctgttctcgctgcccccctgtgaccgcttgtgtttgcctgctcccgccactgcttgcgctctc

SEQ ID NO: 4401 - DNA, 149 bp, Chlorella sorokiniana
  Clone ID: LIB3602-052-Q6-K1-C4
gggcggtgcggggattacactaaaggcatggtgagcaactgttggtcaagcggagagcagccagcgggagagatcaacggcaaaccgggggagcagcaatcgtgtggtcagcgagcaaaatccgtggggggggggaggaataatatatc

SEQ ID NO: 4402 - DNA, 447 bp, Chlorella sorokiniana
  Clone ID: LIB3602-052-Q6-K1-C5
ccaagacccagctgtggtcaagcgatttctgtaccaaatgttacaagggattcagtactgccattcacaccggatactgcaccgggacatgaagccgcaaaacctgctgatcgaccgcgcaacgaacacgatgaagctggcagactttgggctcgcccgggcgtttggcattcccgtgaggcaatacacacatgaggtcatcaccctctggtaccgcgctccagaaattttgctgggcatcaagcactactccacgcccgtggacttgtggagcattggctgcatatttgcagagatggtcaaccagaagcctctgttcccaggcgactcggaaattgatgaactctacaaaatatttcaagtgctgggcacgccatctgaggcgacatggccaggtgtttcgcagctgcccgactacaaggactgcttcccacaatggcgaccaaa

SEQ ID NO: 4403 - DNA, 444 bp, Chlorella sorokiniana
  Clone ID: LIB3602-052-Q6-K1-C6
gaagaagcgtcgcagcaagaaggcggccggcggttttgagatgggggtgggccccgcggcagcgcccgtcgcggcgtaagctgtgcggcgctctggcggagtggcggtgtgccatgcagcgcttgccgcccccgccggccctccctgctcttttgcccccttgcgctcacttctcttgtagcttcctttgccgccgcatgtgcgtgctcgctgtatgaacattcacgtttcattgcccataccaacgaatgccgttgcttcccctcagccttcttgaaccctccccccctggccccctgcaccgatttcaaagcttctcctccacctgcccctctctgcgtgccctcaccggcgtgcaacccccctcccagctgcaccctccctgagggtgcgctgggcctctccagttttgctaagccccacgcgagtcgacactcccaacac

SEQ ID NO: 4404 - DNA, 295 bp, Chlorella sorokiniana
  Clone ID: LIB3602-052-Q6-K1-C7
cgtgtgcaaggcccagcacatgcacgccatcaagcgctgcaagcacttcgagatcggcggcgacaagaaggggaaggggctatactagtaaaaaaaaggagagcggcaggcggagagcatgaccgagaaatggaggcagcggcgcccgctcaccctgggcggcctgctccccgcccggcgcctcgctttggccgcctctggccactcgtacgcctccttgtccatgcccttgtgcttcctgagctgcccaacctggcatgcaagcagcctggccgtctgtaatgccattggcgtg

SEQ ID NO: 4405 - DNA, 95 bp, Chlorella sorokiniana
  Clone ID: LIB3602-052-Q6-K1-C8
aaaaaaaaaaaaaaaaaaaaaaaaaaaaaaaaaaaaaaaaaaaaaaaaaaaaaaaaaaaaaaaaaaaaaaaaagggagaaaaataaaaaaaaaaa

SEQ ID NO: 4406 - DNA, 446 bp, Chlorella sorokiniana
  Clone ID: LIB3602-052-Q6-K1-C9
gccgagtacctgaagaacggcgtggagcccgacgagctggaggacctgtacaccaaggtgcacgaggcgatccgcgccgacccctccgccaagcccaaggcccgcagcaagcccgccgaggccaagcggtggaaggaggtcaagctgacctacgagcagcgcaaggacaagctcaaggccaagctggccgagctggcggccgacgagtaagcgcctcccctttggggcgcttgccagttggagcaggcgggcgctgcgcccgccgtgcccgctgcgccagcacagcgctcggcgctgccgcccgcgctgcggcaggtgggcgggcgctccacaccacaccacacctcaccacaccatgcctcccggtggaaagagagcggttgcggcgctgctagtggcgccgcgccgccgcgcgacggtttcaggcggctagatccacaaaaagc

SEQ ID NO: 4407 - DNA, 352 bp, Chlorella sorokiniana
  Clone ID: LIB3602-052-Q6-K1-D1
ctgggcaccaagggccttattgcttgggccggcctgattgtggtgctgctgggcgtgggcatcaacctggtgagctccacctctgccctgggccagtaaatggcgacgccccccgcgtcggcagcagcagcagcagccagcagcattcccttgcagctaccccccgagaagacaaaccctcaccctaccctagctggcggcgtcaccatgcgccgctcccttgctttccgtttcactgtccctttcgttcctgcgttcgtttagtggaggaggcccgcctgtgtacctgacctggtggccgcgtttttggttgagcggcttgtagccgcacatctgtattatcagctacgtc

SEQ ID NO: 4408 - DNA, 283 bp, Chlorella sorokiniana
  Clone ID: LIB3602-052-Q6-K1-D10
gcttcggcaagaagcgcggccccaacagccagtaagctgactgcggcgccagcagcagcggcaggcatgtgcggagacgcacggagcgcaagcgcgtcccgcgcacagccgccaccgaagcggcctgccagcgtcgacggcagcgaggcagcaaggcgcggcctggcatgctagcagcgcgtactgcgcgccacggcgctagcagccgcaccctggaacagcatcagcagtaattcagcagcccacctgcatgccgaacgctccgctgtaacaggttctcagg

SEQ ID NO: 4409 - DNA, 423 bp, Chlorella sorokiniana
  Clone ID: LIB3602-052-Q6-K1-D11
gcgactccctgtaccccggcggcttcttcgaccccctgggtctggctgacgaccccgacaccctggctgaggtgaaggtgaaggagatcaagaacggccgcctcgccatgttctccatgttcggcttcttcgtgcagggcctggtgaccggcaagtcccccctggaaaacctggctgaccaccttgctgagccgtctgtgaacaacggcttcgcgtccgccaccaagttcctgcccctggcctgaacgccgtcgtcaacctggagcgacctgggcatcccatattaacggcggccagccggttttggacaagcacacacaacatatgagattcccaaccttcctgcgcactggttggaacaattctggcttccttttggacccttgaacccgacttcggccgtgattatgtaccgttccgcgg

SEQ ID NO: 4410 - DNA, 450 bp, Chlorella sorokiniana
  Clone ID: LIB3602-052-Q6-K1-D12
aaaaataaataaaaaaaaaaaaaattattaaaaaaaaaaaaaaaaaaataaaaaaaaaaaaaaaaataaataaggggaaattttataaaaaaaaataaaaaaactaatgggcgtcctttttaatggttctctttttcgttccgcttcttttgaccgttttgtttttttttttgggatccctatttttatttttttgagcggttttttaaaacgtggtttttgtaaaacccttgtttctgccaattttttgttttttgagaatttcctttttttacctgttggtgtattataaaaaaggcccaaacgtttcgccttttcaaacatttactcatttttattggatattggttcgctctttttgtgggaattttaagtccgtcttgtgtggtggttccgctctgggggacggttatatttcttagtgcctttaaccccctttttttttttttt

SEQ ID NO: 4411 - DNA, 297 bp, Chlorella sorokiniana
  Clone ID: LIB3602-052-Q6-K1-D2
gcgcgaagaccgagaagaagggcagcaagtaccgcgtgatctggggcaaggtgacccgcgcccacggcagcgtcgggaccatccgggccaagttccagaagaacctgccccctgcggccatcggcagcaagatccgcgtgatgctgtacccctcccgcgtgtgagggtcggttgcttcccggagcagcagcggtgcggcacggcgcggcggtgacgagtcgtggcagtgcgaccccgctcggcacggccgcccgggtggcgccgccgtcgcctccatgtaacccttgattagccagt

SEQ ID NO: 4412 - DNA, 60 bp, Chlorella sorokiniana
  Clone ID: LIB3602-052-Q6-K1-D3
aaaaattacataaaaaccccccccccacgccttcaaaagaaccctccttgtgattttccc

SEQ ID NO: 4413 - DNA, 105 bp, Chlorella sorokiniana
  Clone ID: LIB3602-052-Q6-K1-D4
aaaaaaaaaaaaaaaaaaaaaaaaaaaaaaaaaaaaaaaaaaaaaaaaaaaaaaaaaaaaaaaaaaaaaaaaaaaagaaaatttttaaaaaagaaaaaaaaaaac

SEQ ID NO: 4414 - DNA, 347 bp, Chlorella sorokiniana
  unsure (1)..(347): unsure at all n locations; Clone ID: LIB3602-052-Q6-K1-D5
gcgcaagagctccatgggcaagccctaccgcctgtactgagcgcgcaggccgccctggctgcctccacagtgcnaggggccgcacggccgcagcggcgcggtgcgcccgccggcgcgccgcccgcccggcacgaccgccggcagcgtggggcggncctttntccgctcccgtcnccgtttcgaccccgtttgatgtcccccttacagactgacacaccaccaacagtccgctggtgtacggctgcgtgcggcgccagcggcatgctctctgtgctgtagcggtccgccgtcaccaaccacactcccactttcgacaggaggcgccaacgaggctgattgggagcctt

SEQ ID NO: 4415 - DNA, 444 bp, Chlorella sorokiniana
  Clone ID: LIB3602-052-Q6-K1-D6
gggcggcccaggcatgatggaggctgccacacagggagcgctgctggcaggccagcgggtggccggcatccggatccagcgcgaggcgggcaccactgtcctgacggcgtcgtacttgccgtccggcagccaggtgcactgccggtacctgtccccacgcaaggtggcgctcgtagactctggcgttcgcatgaaggagagcgaccgcactgcttacattttccttcctggtggtctgggcaccctagacgagttcttcgagatcctgacgctggtgcagctgcgcaagctgggcacaaaattccccgtgcctatcattctggtggactacgatggcttctacgccgggctgctgcagttcctgatggcctgcgacagccacggcaccgtgggcgcccccgagctgcgcgacttgattgtggcgcacgacaatgagggagtgct

SEQ ID NO: 4416 - DNA, 447 bp, Chlorella sorokiniana
  Clone ID: LIB3602-052-Q6-K1-D7
actagttctagatcgcgagcggccgcccgcgatctagaactagtcgccggccagctggcgccgctgggcccggtgggggccccggcgcgctgcggcagcagccgggcgcaggcgctctggcggcggcaggctcccagcagccaggcgatggcgcagctgcggctgcggcggagagtgaggcggggggcggcagctcggtggcgttcaaggtgatgatgaagcggggcgggcgggaggaccgcacacgcgagcttcacatcccgctctccgccggcatggcggcacacctgcggcagaaggaggagcgggaggcggctgagaaggcggagctcaagcggctggtgctggaagccaacaagcgagacatacaggaacagcacgacgcgcagctggctgcgctgctgcagcagaagcagcgcggcggccggggagcccgcggctactatg

SEQ ID NO: 4417 - DNA, 447 bp, Chlorella sorokiniana
  Clone ID: LIB3602-052-Q6-K1-D8
ggagctgctgccgcccgtggagcagcagagcaataacgctggcctgcgctactggctgctgcctggagcaggggccccccatccaacccacaaaaacgacggaaacccccttgccagaaaagagccaccaatgaatgattgagttgatgccagcagacgattgacagccgcggcgcgagccgccggcacctgcaagttttcccctttcatgcacttcacactggcagatgaacgccgacgctttgattgctttgcttgtcgatacgaacatgtatgagcactgatccatgctgttgcactgcccaacgctgtacatttttcaccccgctgtcacaaggaagttttgccctcgctcaccccacactttttgttcaccccgctgccctgccttgcccctttgcatggttttgatgcatcatgccttggctgtacattcccacacccctt

SEQ ID NO: 4418 - DNA, 108 bp, Chlorella sorokiniana
  Clone ID: LIB3602-052-Q6-K1-D9
cacacgtccaacgtatccagacccattttcaaggcccgactgtacagtgcctttttgcgtccttatgccgaggtggtaccaggacttaatgtgtaacaaatggtatgt

SEQ ID NO: 4419 - DNA, 382 bp, Chlorella sorokiniana
  Clone ID: LIB3602-052-Q6-K1-E1
aaaaaaaaaaaaaaataaaaaaaaaaaaaaaaaaaaaaaaaataaaatttaaaaaataaaaaaaaaaaataaaaaagtgaaaattttaaaaaaataataaataatttaaattataaaaaatattaataaatataattaaaaattactttaaaaataagtgggctcttctttaaaaatttaaatttttaattttatttcctttcattacattttttttttttatgttttttaaaaaaaaatttatttcccctatttttaaaatttccataaattaaaaatcttttttttcaaaaattttaatcctttataaaaatacttttttttctcattttgactattaaaaaaaaatctttaaccttttccttttctaaatattttcccc

SEQ ID NO: 4420 - DNA, 371 bp, Chlorella sorokiniana
  Clone ID: LIB3602-052-Q6-K1-E10
cacttctcttgtagcttcctttgccgccgcatgtgcgtgctcgctgtatgaacattcacgtttcattgcccgtgccaacgaatgccgttgcttcccctcagccttcttgaaccctccccccctggccccctgcaccgatttcaaagcttctcctccacctgcccctctctgcgtgccctcaccggcgtgcaacccccctcccagctgcaccctccctgagggtgcgctgggcctctccagttttgctaagccccacgcgagtcgacactcccaacacgtcatgacacacaagtctttgccgtgctgcctgccaggcttttcgcaggcggtgcattgcccctgcttcccgccatgtgtaagtgcagcagcag

SEQ ID NO: 4421 - DNA, 443 bp, Chlorella sorokiniana
  Clone ID: LIB3602-052-Q6-K1-E11
gcgacagcctcaagtggttcttcatcatctcctgcggcctgctgctcatcattgctgccggactggtggcccagggcgttgtgttcttcacctccgccggtctatttggcaccaccttcccctacgagtaccgcccctggtacaacaccatcctgtggaacacctcgggctgctgcgacatgtacaacaaccaattctggtccatgatgcgcgcgctgtttggctacacggaccagcccacgggcctcaacctgatgtactacctgctgtactgggctattgtgctgagcatcacgatctggaagtggtacaccggcaccctcaccgaccgccgccaggcccagattgacgacctcaagtcgtttgcagtccacctgggagagcgcatggacgccgacgccggcctggacaagggcaagcagctcaccagcagcagcagcagc

SEQ ID NO: 4422 - DNA, 329 bp, Chlorella sorokiniana
  Clone ID: LIB3602-052-Q6-K1-E12
gcgagaacctcaagtggttcttcatcatctcctgcggcctgctgctcatcattgctgccggactcttaccccacggcgtttttttaatcacctccgccgccctatttcataccaccttcccctacgaataccacccctgttacaacaccatcctgtgaaacacctcaggctgctaccacatgtacaacaaccaattctcctccataattcacacactgattagctacacaaaccatcccaccgacctcaacctgatgtactacctgctgtactgggctattgagctcagcatcactatctggaagtggtacaccgacacccttacctac

SEQ ID NO: 4423 - DNA, 453 bp, Chlorella sorokiniana
  Clone ID: LIB3602-052-Q6-K1-E3
gcgggcatagaaggccggggcgaaggagccgcagcagccggctcagcagatgcagcagcaccagctgcagcagcaggtgcagcagcggacgcagcagacgtgccgccgccgccgccacgcactgcctccgagcctgcaccgccgccggcagcagcacggcccagcagcagcgggcggccggcctccgcgccggccatgctgttgaaagccaagaagcccattgtgcaagtgcggacgcgcactggcgagacgctgcagccgggcagcagcaaacgaacaaagacggatcaacagcaggacaaggcggccgccggctccgaccccaaatctttctaccttcaagagctggagcggtaccggcaggtggcctgcgaaagctctgcgggctctgaccggccgctggtcaagtgaggctggttggcgcaagtggcgcaagtggcagcgctgccaccg

SEQ ID NO: 4424 - DNA, 445 bp, Chlorella sorokiniana
  Clone ID: LIB3602-052-Q6-K1-E4
gcggacagactgtcccggctctcagccctcagtagcagcctgacacggctcgatgttatggatggcggactgtcgagcccggccctagcggcactcacaggcttgcagcatctgtgttgcatcccattctctgcggacacatgtgcggcggtaattgacgctctgccgcaactgaccggcctgacctgcctggatctatgcgatcttccagacattatgcctgctgcgctaagccgcctttcgcggttgcagctgtgccacctcagcaggtatcacactggcgggcaggcctcagagctgccaagtggcccctggctgtccagcctgcgctggctgagcactgacattggcgttctcttgaggagcaaggagaacctgcatgcggcagcagcgctcgagtgtgtcagcctggcaccctcgctggatgtggtggattggcactcgc

SEQ ID NO: 4425 - DNA, 324 bp, Chlorella sorokiniana
  unsure (1)..(324): unsure at all n locations; Clone ID: LIB3602-052-Q6-K1-E5
gcgccgggccctcctgcggcgcgcccgcggcggcggtaaagccagcggcgacggcgacagcgatgcagaagaggaggaggattcagaggcgggcgtcagcggcagcagcgatgaagaggagggtggcagtgaggacgaaggcgggatgcagctggcaggcggcgagcatgggcagctagatagtgatgatgagtttgacttggatgaggctgcttcagagggcggcagtgatgaagaatgaatgctgcccgcctgctgcccaacacgattgcggtcgtatcaactttgtgattggcaatctgaactgtaagctgacatgtcnna

SEQ ID NO: 4426 - DNA, 379 bp, Chlorella sorokiniana
  unsure (1)..(379): unsure at all n locations; Clone ID: LIB3602-052-Q6-K1-E6
cggacgcgtgggcggacgcgtgggtcaagaacggccgcctggccatggtgtccttcctcggcttcgccgtgcaggcggccgtcactggcgagggaccctacgcgaactggtcgaagcatgttgctgaccccttcggctacaacctgctgaccatcctgtcctctgaggaccgcgccgccgtgctctaagcagccggccccgcctggcgcccgccgccgccccgagtgtagctctgtagtcccaccccttccctgtttccgcttgttcttgtgctctcagcatttggttgtgctccccctaacgagaagaacaattttatcattctacaccgcacagccagcgccgatgcgcgcgctgtaatgctctgccccgcnnnana

SEQ ID NO: 4427 - DNA, 447 bp, Chlorella sorokiniana
  Clone ID: LIB3602-052-Q6-K1-E7
attgaccgccgcgtgaccaagatgaagatgatctcgccctccaaccgcgaggtggatgtgggcaagaccctgaacgagaaggagtggatcggcatgtgccgccgcgaggtgttcgacgactacctgcgcaagcgcgcctccaagctgggcgccaagctgatcaacggcctgtacatgggcctggagaccaagggcgacggccccatcaccatccgctacaacgagtacaaggagggcgacaaggtgggcacccccaccaccctggaagtcgacatcgtgcttggcgccgacggcgccaacagccgcgtggccaaggacattgacgcgggcgagtacgactacgccatcgccttccaggagcgcatccgcatccctgaggacaagatggagtactacaaggacctggcggagatgtacgtgggtgacgacgtgtcccccgacttctac

SEQ ID NO: 4428 - DNA, 434 bp, Chlorella sorokiniana
  Clone ID: LIB3602-052-Q6-K1-E8
agcaatttgtccactaggggccccctgctttcttgccgccccgctgcaagcccatgcccttgccctgtcccgttccctgtgcaacttgccccacgtctcctcccaccctccaccgcccacatctagcgcctctgctgcctctgcccacccgccagacggcgctcgcccgccatccccacccccaccccatcgtgtgtcgtgcagccgcggactcgccgcggcaatccatgcataccatctcatctcattgcgctaccgcatctccttttccctctggcatgttcccggacacaccacagctaatcaagtgtgggagtgcttttggcagccgtcccaactggctgtcctgtcccacttttgtgttctgcgcaccgactgtgtccttgtctgccacaaccagtgcctcgaaccacccctgtaatccgcagcttgtg

SEQ ID NO: 4429 - DNA, 447 bp, Chlorella sorokiniana
  Clone ID: LIB3602-052-Q6-K1-E9
gccgtcggcgccagcagcccagctgaacgactcatctgtgcggccgctgggccgctgtgattcatttgcatcggcccatgagcggctgccttgcacgcatggtgcggcacggcctgctctgcggcccttcatacctttgtacctttctgtatcatcttgcagcaatggcagccggctgcatctttctaacatcgtcaccggcccactcgtttgtgccatgcccacctgcctccaacgtcacccttcatcaaccctcacccaacccatccacctgccacccatccactcaccttccctccgccacaacctctgccacccactcaccacccatcacccgctcaacgccctccatgcaccatcctccccatccaccaaatctgccaccccaaacgcacgtccgccgctgcaccacctgccgccccctcacccgcacccatcttccacccg

SEQ ID NO: 4430 - DNA, 452 bp, Chlorella sorokiniana
  Clone ID: LIB3602-052-Q6-K1-F1
gcgctctctggagccttcaggctgagaaggagagcgtaaactcgtcaccatggtggccgccaagaagaccaagaagggtcaggagagcatcaactcccgcctggcgctggtgatgaagtcgggcaagtacacgctgggctacaagaccacgctcaagacgctgcgctccggcaaggccaagctggtgatcatctccaacaactgccccgccgtgcgcaagtcggagatcgagtactacgccatgctgtccaagaccggcgtgcaccactacaccggcaacaacgtggacctgggtaccgcgtgcggcaagctgcaccgcgtgtccgtgctgaccgtcaccgaccccggagactctgacattgtgtccggcatgtaagcggcgcagcatggcatgcgtacccgggcgctgtctgagctgggactgcccctgtataagaaacagaggacaaaaa

SEQ ID NO: 4431 - DNA, 446 bp, Chlorella sorokiniana
  Clone ID: LIB3602-052-Q6-K1-F10
gcgagcggagctgcgctgccgcccgcgagcggcggctgctacccgagggaggtctgggcaggtgcacacggctagagcaagcaagcaagctgtgcgcagtgtgctttatactgctagtgcaccaacctgttaacaggggcgcggcgtgtttgttagagtgacaccgatgatttggggcggagtggatgagtagggcaagctctagggagggtggtggccaggccgaaagaggagggtgcacgccgcactgaggggcaacgcaaaagcatgaaaaaacaacaagcgaacagggtgctgccaggtggctgagctgctggcgactgcttgctgtgccggtgagcacacctgggcagaggcataactgctgggtgcgctttgtggtgtcaggtgagtctggtgtacattatgaattattttaggctttccatcctttttgcgatcacacc

SEQ ID NO: 4432 - DNA, 346 bp, Chlorella sorokiniana
  Clone ID: LIB3602-052-Q6-K1-F12
ggatgcgtatgaggatgtcagtgcccagctgaagcccataccaggcctggagccgggcccagctgaggcgggggcgatggagcagctgctgccgctgctgaacggcgctgccaccaacccttgagctgccgcaataatgatgagaagcggtgcagcagcctgcttcatacatgtacagttctttcatgccctgcctgattagtttcatgttgaactgagttcttgcacagccattcatttttacgctccattatgacgcagtggcccaagctgcctcgctgactgctgctctcgcaaataactttgcacccaccctgtatccctactaagcaagccctggtgttgc

SEQ ID NO: 4433 - DNA, 257 bp, Chlorella sorokiniana
  Clone ID: LIB3602-052-Q6-K1-F2
gcgaaaaaaaaaaaaaaaaaaaaaaaaaaaaaaaaaaaaaaaaaaaaaaaaaaaaaaaaaaaaaaaaaaaaaaaaaagggagaaaaaaaaaaaaaaaaaaaaaaaaaaacaaaaaaataaaaaaatggccctgcactttaaagactggcgagaacctttgcgaaacccaacttaataccctttttaaaaaaacgactatatatacaatatacagcacaaaataaaaaaaccacagaagtgctaaacaacagcgtaac

SEQ ID NO: 4434 - DNA, 448 bp, Chlorella sorokiniana
  Clone ID: LIB3602-052-Q6-K1-F3
gccgtgttcaggacggtgatagccgccacggctgtctccactgctctgggggtggcacgcatggcgagcgttgaagacctcaaggagggcctggaggaccgggcgtacaggctgcactacaacctggggcagcgccgcaccgaccgctttgcacagatcggcactgtactgggcggcactgcagctgcagttttcctccctgcctcggcggcggcggtggtggcaggcggcgctgcgggcgcggcagctggcgtgctggcacatgtcgccacaatgccgaagccagaggagtgaactgatggagggatagtgcccctactaaggggcctactgatcgaaatgacgccagaggctgcgactggctgcccagcaccagcttttcacccgttttcatgctgtcacatgtattatggccaagcttcccaccctcacgtgtatgcaagcatat

SEQ ID NO: 4435 - DNA, 443 bp, Chlorella sorokiniana
  Clone ID: LIB3602-052-Q6-K1-F5
cggacgcgtgggctttgtgaagtggcccaagtacgtgcgcatccagcggcagcggcgtgtgctgaaccagcgcgtgaaggtgccccctgccctcaaccgcttcacccgcacgctggacaagaacatggccgagagcctgttcaagctgctgatgaagtaccggcccgaggacaaggcggccaagaaggagcggctgctgaaggaggcggaggcgcgcgaggctggccaggaggttgagaagaagaagcctgtggtggtcaagtacggcatcaaccacatcacgcagctggtggagagcggcaaggcgcagtgcgtggtgattgcgcacgacgtggaccccattgagattgtggtgtggctgcccgcgctgtgcaagaagatgggcgtgccctactgcatcgtcaagggcaaggcgcggctgggcaccgtggtgcacaagaaga

SEQ ID NO: 4436 - DNA, 443 bp, Chlorella sorokiniana
  Clone ID: LIB3602-052-Q6-K1-F6
cgctagcatcgtgcagaggctgcctggtgtgttgcggacacagcaggcaagatggtgcgcggccccaagaagcggctgaagcgcctcaatgcgcccaagcactggatgcttgacaagctgggcggcatcttcgcgcccaagcccagccccggcccgcacaagacccgcgagtgcctgccgctcatcctgctgctgcgcaaccgcctgaagtacgcgctgaccggcaaggaggtgaccagcatcctcatgcagcggctggtgcaggtggacggcaaggtgcgcactgaccgcacctaccccgtgggcttcatggacgtcgtggacatccccaagactgacgagcacttccgcgtggtgtacgacgccaagggccgctttgtggtgcaccgcatcaccaaggaggaggcatcctacaagctctgcaaggtgaggcgcctggcatt

SEQ ID NO: 4437 - DNA, 447 bp, Chlorella sorokiniana
  Clone ID: LIB3602-052-Q6-K1-F7
gtgagggctgacagagcgccaccatgcggcagctcatttcttctcggaccctcgtcatccccgatgaggtgggtatcgaggtcaaggcgcggcgggttcgcgtgaagggccctcgcggcacgctgcagcgcgacttcaagcacctggctgtggacatgttcctgactgaggaggagggcaagaaggtgctcaaggtggactgccactttggcaagcgcaagagcctggcgtccatccgcacctgcacctcgcacgtgcagaacatgatcaccggcgtgaccaagggctacgagtacaagatgcgcctggtgtacgcccatttccccatcaacatcaacatcgagaacaagggcggcaaggtggagatccgcaacttcctgggcgagaagattgtgcgcgtggtggacatgctgccgggcgtgacctgcgagcgcagcgccgccgtca

SEQ ID NO: 4438 - DNA, 446 bp, Chlorella sorokiniana
  Clone ID: LIB3602-052-Q6-K1-F8
tgcctctcccgtgtgtcggtgcatctagtcccaagccaggcacgatgtccgaccacgaggatcatggacacgaggttcacttcgagagcgccgatgccggtgcctcgctgacctacccccagcaggccggtaccgtgcgcaagaacgcgtacatcgtgatcaagggccgcccctgcaaggtggtggatgtgtccacctccaagaccggcaagcacggccacgccaagtgcgccttcgtcgccgtcgacatcttcaccggcaagaagatggaggacctgtccccctcctcgcacaacgtggatgtgccccacgtgagccgcaccgactacacgctgctggacgtgggagatgatggcttcgtgtccctcatgactgagggcggcgacaccaaggacgacctgcagctgccctccggcaccgatgaggccgagaagctggcggtgcag

SEQ ID NO: 4439 - DNA, 110 bp, Chlorella sorokiniana
  Clone ID: LIB3602-052-Q6-K1-F9
aaaaaaaaaaaaaaaaaaaaaaaaaaaaggaaaaaaaatataaaaaaaaacaaactaaaaaaaacaaaaaaaagggggggtagttcgtttgtggggatacaggtttctat

SEQ ID NO: 4440 - DNA, 446 bp, Chlorella sorokiniana
  Clone ID: LIB3602-052-Q6-K1-G1
ctgctctgcttggggccaatcgagtgctgcggcttgctctgagggcgacggaggggttgtagcggcaggatggctgacagcgctcccatggaggtggagcaggcacagccagtggaggagaagaaaggcaagggcaaggccagcggcaagcgcttcgagatcaagaagtggaacgcagtggccatgtggtcctgggccatttgcaccgacacgtgtgccatctgccgcaacaacctgtacgagccaagcatagagtatcaggccaacccgaccggcgatgctgaccactcgggcctgtccattgcctggggcacctgcggccacgtgttccacctggactgcatccagcgatggctgaagacgcgctccgcctgcccgctgtgcaatcgggagtgggagttctccaagatcgagcgcatcgtgggcggctctgccaacgccgaatg

SEQ ID NO: 4441 - DNA, 88 bp, Chlorella sorokiniana
  Clone ID: LIB3602-052-Q6-K1-G10
aaacgctgcacacctcaaaaaaaaaaaaaaaaaaaaataaaaaaaaaaaaaaaaaaaaaaataaaaaataaaatgacggcctttttaa

SEQ ID NO: 4442 - DNA, 424 bp, Chlorella sorokiniana
  Clone ID: LIB3602-052-Q6-K1-G11
gcgcaatcatctttcacgctgaggatccgctaaagggcctggtttgttggccgccgatcctggcgtgcttgccaggcaccatacccacgtgccaacagcccttgtcagcgcgatgctgcctctgcactcttttcctcgttacatccagctgcagcagcccttcccttcagccacattcagatttccacctcttctgcttcctcggacacctctgtaacactggttttccctgcctgcgcctttccctcaccctatgcacgtccgttcttgccaccgatactcatccgagcccctcatcagacctgcgctaacatgtcgtctccactcctgatctgctgtgctcatttgtccacccagccccagacgacttgccttccttttccaggcgtggttttcgcggcacgcctttccggttccctccgcc

SEQ ID NO: 4443 - DNA, 424 bp, Chlorella sorokiniana
  unsure (1)..(424): unsure at all n locations; Clone ID: LIB3602-052-Q6-K1-G12
gcgactggatggacccctacagcctgttctggattgaggccatcctcatgaacttcgcggagctcaagcgctggcgggacttcaaggagcccggcagccagagcaagcagtacttcctgggcctcgaggccgtgttcggcggctccggcaaccctgcctaccccggcggccagtggttcaacatgctgaacctgggcaagacccccgaggagatgaagaagctgcagacaaacgagatccgcaacggccgcctggccatgattgcgtgcctgggctgcgcggcgcanggcgtcatgacgcacaagggccccttcgccaacctgctggagcacctggccgaccccgtgtccaacaacctgctgggcaacctggccaccatcctgaagcagtaagcgtgctgccccaagccccggcctgggtgtga

SEQ ID NO: 4444 - DNA, 312 bp, Chlorella sorokiniana
  Clone ID: LIB3602-052-Q6-K1-G2
ataaaaaaaaaaaaaaaaaacaaatactaataattatataaaaataaaaaaaaaaaaaaaaaaaacgcacattatatcaggctttccctcccccttcctatactacctttttttctagctccttcatcaacattttcctccttctaacacacaaatgtcgctcctcccttccatacccccctctcacctccccactatcacatctcccttctttcttttccacccctactatcctatcatctactcccttgtcttcccacccctctattactatcactccgccctatcccttttctttctccccttcatcct

SEQ ID NO: 4445 - DNA, 283 bp, Chlorella sorokiniana
  Clone ID: LIB3602-052-Q6-K1-G3
gcgaagcgtgctgccccaagccccggcctgggtgtgagggctgccagggcggcggccagccacatctagagccttggcattccttggctcggggcggcgactggtggcgggccctccggccgtgcctgcctgccgccccgcagcgcaccctcactcaccccacttcacccctgagaagaaatcaactgcccaactcttgttttgttgccgctcctacgcttccgtgtgcctcttgtatgggataattgctgctacactcctgacagtgtaactctccgctgcc

SEQ ID NO: 4446 - DNA, 447 bp, Chlorella sorokiniana
  unsure (1)..(447): unsure at all n locations; Clone ID: LIB3602-052-Q6-K1-G5
gcgcggacgcgtgggtccgagactaggtcacccaatctcgtcaccatgcaggccgctctcgctcagcgtctggctgtggtcaagcccacccggggcgcccgcaagcaggtgacccgcgccgccgtcgagttctacggccccgaccgcgccaagtggctgggccccttctccgagggctccgtcccctcctacctgaagggcgagttccccggtgactatggctgggacaccgccggcctgtctgccgaccccgagaccttcgcgcgctaccgcgagattgaggtcatccacgcccgctgggccatgctcggcgccctgngctgcctgacccccgagctgctgcagaacaacggcgccgctgacttcggcgaggcggccgtctggttcaaagccggcgcttcgatcttcaacgaggacggcctgaactacctgggcaacccctccctg

SEQ ID NO: 4447 - DNA, 126 bp, Chlorella sorokiniana
  Clone ID: LIB3602-052-Q6-K1-G6
gcggcgcctcggcgccacgagcgactggccgtggtgctgcccccggcagccctcgcagagattgatcacttcattggggcgcctttgttgagaggtggtgagtacgagagacgagtgtaaggctgc

SEQ ID NO: 4448 - DNA, 442 bp, Chlorella sorokiniana
  Clone ID: LIB3602-052-Q6-K1-G7
gcggctgccgtggctgccccggcggcgcaggctgtgcccgtgccgccggcgcccgccactggcgactgcccggagtgcattggcgaggtcaatgagacgctgaatgcctgcacgctcgactcagtgtcgtgcacatccacactcaacgacgatgaggcgcactttgcggcaccctggcagtttgacggcgaccgcgatgccgcagtggctcgcctgctggaggtggtgtctggaggcaactttgagctggggctgatcgagagctttggcggcatcaagcagaccgatgcggcggtgtacattgccaagggcgtgctggctgtggccacaggcggtgacatgccggagcaaccaaagcggcagcgcaagagcgccgccgagttcaagccatttgacggcaaagtcattgagcggcggacaacggaaggcggcgcggagtaca

SEQ ID NO: 4449 - DNA, 447 bp, Chlorella sorokiniana
  Clone ID: LIB3602-052-Q6-K1-G8
ccgagacgctgcgctggaaggcgtttgagccggtgctgctgctgggcaagcagcgcttctccaacgtggacggggcgcatccgcgtcaagggcggcggccaggtgtcccagatctacgccatccgccaggccatctccaagggcattgtggccttctaccagaagtacgtggatgagcagagcaagaacgagatcaaggacatcctgctgacctacgaccgcacgctgctggtggccgaccctcgccgctgcgagcccaagaagttcggtggccacggtgcccgcgcgcggtttcagaaatcttacaggtgaaggctgccccgtgggacggttgggcgcctctggaggcttcttctgcgccgctggcgtggcggcagcggcgtctgcggcctaggcagctgccctggagcagcatgccctcagcgaaagcaccatgagtacaccttg

SEQ ID NO: 4450 - DNA, 443 bp, Chlorella sorokiniana
  Clone ID: LIB3602-052-Q6-K1-G9
caagccggtgcacgtgcacggcgacatggccaagaatgaagtgcaccgcccgcagcaccaccctgatacaatgaattacgctgcggtggccaaggaggagattcacgacgtggtggagcacccgccgccggtcaagctgatgagcggccgcgccactggtgtggaggcgtgggacaaggtcaactcgccaaaggccaggcacgactgagcggccagagtggcagagtggcggagaggctccagcagtgaacgcactgccgacggctggtgtccacagatcaactcaatctgttgagaccagctgctgcctacatccaagcttgcaatgctcactgccaacgcaacccacacagacgcgccttccagcccaccagcagcctcgccggtgcacgctgcgctacgtgagttttccctcctgttcctccagtattgcactgcccccc

SEQ ID NO: 4451 - DNA, 348 bp, Chlorella sorokiniana
  Clone ID: LIB3602-052-Q6-K1-H1
aaaaaaataaaaaaaaaaaaaaaaaaaaaaaaaaaataatataaaaaaaaaaaaaaaaaaaaaaaaaaaaataagagaaaatatttaaaaaataaaaaataaaaaaaaaaaaaaatattaaataaatataaacaaaaaaaaaacataaacaaatatataaaactgtttcccctctttttaaaaatcacttttttatttccttttttttgtaacctttttttttttttttttggcccccaattttaattcctagccccgttttttaaacaactaagcatttgaaaaactttacttttacccaaatttttcccttttgatatattccattttttccccttttggattttt

SEQ ID NO: 4452 - DNA, 246 bp, Chlorella sorokiniana
  Clone ID: LIB3602-052-Q6-K1-H10
aaaaaaccaattggtaaacattaaatcctggtaccaaatctggataacgacccaaaaagggtctgtacactctgtccttaaaaatgggttttgataccttcgacattttggtaaatgggtttaccaacatatatgatgggtttcgcaaaaacttttcattgcaacatcctttttttaaaacccggttaaaaggttgacattaaataaagtgtgggaaataaaatttcctgctgtaaacctcaaaaa

SEQ ID NO: 4453 - DNA, 302 bp, Chlorella sorokiniana
  Clone ID: LIB3602-052-Q6-K1-H11
gcggacggcaccaatctccaaccacaacggcagcagcagcagcagcggtagcggcagcaacggcggtgccagtacgagtgccaacaccagcagcggcaccagcatcgggacctccaagccggatcactaacaagctcggcagcagcaagggcgaagcggttgagaactagtggcgggagcacctggtacccgcgaccacggcaggcacgcagcaggcgcagcatgaggcagctgccaccagcggcggcgccggcagcagcgagagtggtactgtctcgcacggcggtgcggaagcactggca

SEQ ID NO: 4454 - DNA, 446 bp, Chlorella sorokiniana
  Clone ID: LIB3602-052-Q6-K1-H2
gtcggctccccactctacgtggtgcatgtgatgagccgggatgcgcaggaggagattgcgcgggcacggcagcgcggccagcgcgtgattggcgaaacggtggcctcagccatttcgatggacgagagccgcatgtggcaccccgacttcaatgttgcggcccagtatgtgatgagcccgcctatccgcagcaaggagcacggcgcggccctgcggtcggcgctggcgggcggcctgctgcagctggtgggcaccgaccatgctgtgttcaactccacgcaaaaggcggtggggcggcacgacttccgcatcatccccaatggagtcaacgggctggaggagcgcatgcacgtggtgtggcaggagatggtgaacagcgggctgctgtcgccctccgactttgtgcgggtgaccagcaccgcggccgcccagatcttcaacgtgta

SEQ ID NO: 4455 - DNA, 448 bp, Chlorella sorokiniana
  Clone ID: LIB3602-052-Q6-K1-H3
accgtctatccagacctggttgccatcactagggagattctgtaccaccacagcctgctggagccagaggagtgacctgcacctgctgagtacggtacctgcacagcctgctggagactacgtagcgaaatgcttcaagtttagtaccaccgcaaatgctttccctgtagcaggagcagtgacgtgttttcacacgccggctgctgcactgtttgatgtttcacccaacttgctctttgccctggcttgagcagccaacgcatggttttactgcttttcctttttgcctggcttaagcagccaacacataaatgtactgctttccctttttgcctggctccaggagccaacacatgactatactgcttgttcagaatactgttaagctgtgccgttgctgtgcaggaaggttcacttgtgttttcatatcggccaaaccacggcagtg

SEQ ID NO: 4456 - DNA, 348 bp, Chlorella sorokiniana
  unsure (1)..(348): unsure at all n locations; Clone ID: LIB3602-052-Q6-K1-H4
gcggacttccatcaacacggaccagcttagtccgatcatgcgcgctcgcgctgctgggccattccttacagcgcggcggggccctcctcccatgctcgaactgaaaacatgcccttgcacacagaagacccctcaacgctagtaggctaggatgccggcgggcgcatgccggacgtattgtcgcatgcccatgccttggcttttctgcacccctccacaccccatttcatacgacttttcgcctcccatctgctggcattgacatcgccgctgcagcttcggaacacagctttaaaacaacacaccnngaaaaaaaaaaggaaatgatttaaatatttggctgggttc

SEQ ID NO: 4457 - DNA, 371 bp, Chlorella sorokiniana
  Clone ID: LIB3602-052-Q6-K1-H5
gcggactgcaccactactttgcaccctcccctgccctgggcacaccccctcctttcctgggccttttggccttgctgtgcacccctctgccagggcctcggccctgtctgctacccacccgctccctgccaggctcgtttcgcatcccttgcacccccgcctgcctcggtacgcaccctcccttcctgggcctcggccctgtctcgcaccctcctacctgggcccttggccctgtctgctacgaccccacccgctgccgcactgcggcgcaccctgctccttccccgcaccgacttgcactttggccctcttgctttggccgcccattgcctgccgtgccccgcccgcccgcctaatggggcgctccatgc

SEQ ID NO: 4458 - DNA, 323 bp, Chlorella sorokiniana
  unsure (1)..(323): unsure at all n locations; Clone ID: LIB3602-052-Q6-K1-H6
gcggcagtgggcagcaggggcagcaagggcagcaagggcagtgctggtggctgcagcccccgcgatggcagcagaggcaaggcggctgagaccaaagcggagcatgaaggcggcgggcgcacactggtgggtgtgctgtaccgctggcagctggtcagcctgctgcgccacccagcgctgctgcgcatgctggcatgccaggacggcacagcagcagcagcagcagcagcggcgcaacaggacgcancggcaggagggcaggcagcagcagcagcagcagcagcgccgcaggtggcggcacagcaagccgggcaggcaccacc

SEQ ID NO: 4459 - DNA, 80 bp, Chlorella sorokiniana
  Clone ID: LIB3602-052-Q6-K1-H7
aaaaaaaacaaaaaaaaaaaaaaaaaacaaaaaagacaaaaaaaaaaaaataaaaaaaaaaaaaaaaaaaaaaggggaag

SEQ ID NO: 4460 - DNA, 282 bp, Chlorella sorokiniana
  Clone ID: LIB3602-052-Q6-K1-H8
aaaaaaaaaaaaaaaaaaaaaaaaaaaaaaaaaaaaaaaaaaaaaaaaaaaaaaaaaaaaaaaaaaaaaaaaagagagaaaaaaaaaaaaaaaaaaaaaaaaaaaaaaaaaaaaggggcgccccttttaggggacccatgttttcgtccccgtctttgcaacgttttacttttttttttgggccccctaatttcattttactgcccctggtttaccaactgaggatctgtaaaacccttgcctttccccactttattcgccttgcccccattccccttttcc

SEQ ID NO: 4461 - DNA, 446 bp, Chlorella sorokiniana
  Clone ID: LIB3602-052-Q6-K1-H9
cgtgatcagctactgggaccagggcgcggagaagcgcgcgcaggtgggcatccgtgacaacctcatccgcttgtcctgcggtattgaaagcgcggaggacatctgggccgactttgagcaggcgtttgcgcggctctgagtcgctgtgcagctgcctgctgccctgacgcctcccatgtgtggcggcgcgtgattgtgcgccgccgataggctagcgacaccgtttaccttgctctctttggcgtggctccggcccgccctcttgctacccgctgccctccagcatcactgctgtttttgaccgcctccacactgcaagctcccttgctcccttctccctccctcctgacgtcccgctcagctgctcacgttctgcgcttcctgtccctttgttcgcctctgctcgcttgttgcataccttctgcatgcacgtgccacacctcccc

SEQ ID NO: 4462 - DNA, 94 bp, Chlorella sorokiniana
  Clone ID: LIB3602-054-Q6-K1-A1
aaaaaaaaaaaaaaaaaaaaaaaaaaaaaaaaaaaaaaaaaaaaaaaaaaaaaaaaaaaaaaaaaaaaaaaaaaagggaaaaaaaaaaaaaatg

SEQ ID NO: 4463 - DNA, 446 bp, Chlorella sorokiniana
  Clone ID: LIB3602-054-Q6-K1-A10
cgaggaccagctgaagaagatcctgggctacatcgacattgcgcagcgcgagggcgcgcgcctgctcaccggcggcaagcagcacggacagaagggctacttcgtggagcccaccgtgtttgctgatgtgaccgacgagatgaccatcgctcaggaggagatctttggccccgtgcagtccatcctcaagtaccacaccactgaggaggtgattgagcgcgccaacaacaacgtctacggcctggcatcgggcatcatcagcaacgacgtcaacttcatcaacaccgtgtcccgctccctcaaggccggcactgtctgggtcaactgctacaacgtgtacgaccatgctgtgccgttcggcggctacaagatgagcggcatcggccgtgacaagggcgagtacgcgctggagcactacacccagaccaaggcggtgtaccaggcgc

SEQ ID NO: 4464 - DNA, 444 bp, Chlorella sorokiniana
  Clone ID: LIB3602-054-Q6-K1-A11
ccgaccgccgcaaccgccccgccacagtcgtacgccgagcaagtgcgggagtcgatggacctgctgcgcacactgtttgcgcagctggatgcagctggcggcagctgcgacccaccgccggggttcttcgagccctgccgcagccgcccaggcgtgcgcttggatcccatcccctggactgagctgtctgctttgatatcagatggcagcgagcgggcgctaggagcgctgggccgcacaccgctgcagatcaaagactactggggctaccgagacagcgtagtgctgaagcgctttgcgtctgtcactgactacttgcggcaaaaaatatttgggtttccgaccgctgctgggccagatggccgccacgtggcacaggtgccaccaggcttcttttgcagcaatggcggcagcagcgcctgcaacggcagcagcggcagcggc

SEQ ID NO: 4465 - DNA, 450 bp, Chlorella sorokiniana
  Clone ID: LIB3602-054-Q6-K1-A12
cggacgcgtggggtgccgctgcgctgcagcagtgatcttcgtgcctcgtgaggcggcggtgcccccgcccaacgaacgtcccctgtgcctcccttacaatttgtagctgtctgctcttccctgcgtgctcattgctgcctctgcccccctctcccgcgctcttctttctgccccgtccgtgctcgccctcttgccgctgctcttcctgcccaccctgtttatggcacgctgtgtagtgctcagtccctcccagctagatccacccatgccatagcttctcagaattgtacctcgacactgaccgacgtagcaattttgtaagcgctgtttacaaaaaaaaaaaaagaagaaaaaaaaaaaggataaaaaatgaaaaaaaaaaaaaaaaaaaaaaaaaaaaaaaaaaaaaaaaaaaaaaaaaataaaaaaaaaaggggggcggccgtttta

SEQ ID NO: 4466 - DNA, 446 bp, Chlorella sorokiniana
  Clone ID: LIB3602-054-Q6-K1-A2
agtacatctacggcggccacgtgggcgagtacatggaggagatgattgaggaggaccccgagaagtaccaggcccactttgccgagtacctgaagaacggcgtggagcccgacgagctggaggacctgtacaccaaggtgcacgaggcgatccgcgccgacccctccgccaagcccaaggcccgcagcaagcccgccgaggccaagcggtggaaggaggtcaagctgacctacgagcagcgcaaggacaagctcaaggccaagctggccgagctggcggccgacgagtaagcgcctcccctttggggcgcttgccagttggagcaggcgggcgctgcgcccgccgtgcccgctgcgccagcacagcgctcggcgctgccgcccgcgctgcggcaggtgggcgggcgctccacaccacaccacaccttaccacaccatgcctcccgg

SEQ ID NO: 4467 - DNA, 446 bp, Chlorella sorokiniana
  Clone ID: LIB3602-054-Q6-K1-A4
cgtgctcgcgctgtttgtggaccagctgacgggcgtgggcctgctggaccagcaaaactcgttcctgggcaaggtgctgctgcacgtcgccgtgtttggcatcctgctcatccgctcctcctctgacattgacaagttccgcggcctgatcgacgaggccaccttctacgacaagcagtggaacgcgacgtgggagggccaggagcggcccagcgagtgagccgcgtgacgaccggtggcggcagcaggcgcaccattctgcgcctctacctgccaggtgccaccttcggcagcagcagcagcagcagcaatgccaacatgaaacgttacacgtcactctcaaagcactatccgcccccgcagcagtttcattgttcagctcctttcggttcctttctcctgctttagctctttcttgatcgctcgctccatccctgacgcacccc

SEQ ID NO: 4468 - DNA, 444 bp, Chlorella sorokiniana
  Clone ID: LIB3602-054-Q6-K1-A5
gcctcaaacacaacaccccggggattgcctggcacaactgctatgacactgtaccgctagctaacccaaccctgagcccacccccgactgctgcgccccttccaatcatgtgtgcgccctccacagccgtgcgtctctgccccttggtctgtccctgcttgcactggttctgtgctcccgattttcattacccccgagcgagagtccccgtgtgtgtgtgccagtgattcctgcctgtgccttgaaagtgtgttgctatgctcttgacctgccgtggttgctgcgactagtgtcctcacactccctgcgccccgtcttgattttttatcgggcagccgtggcccgccgtacttgccttttcagccgccgaaccacgtcccaagccattgaaccgtcccggggctcggtgtgtccctgcctgacctgcttctgccagaggctttt

SEQ ID NO: 4469 - DNA, 444 bp, Chlorella sorokiniana
  unsure (1)..(444): unsure at all n locations; Clone ID: LIB3602-054-Q6-K1-A7
cgccgacatctggtcgctgggcattgttgcctaccagctgctgacgggccgcctgccgttcagcggggaggacgggcaggaggtttctgacgagtacatggccaagcagcaatacaacaacaaggacgtgttccgcgcggtgctcaaggctgagctggactttgagtcccctccctgggacatactgtcagccgcggcccgcgactttgtgcagtcctgcctcaaccgcgacgaanagaagcggcccactgcggagcagctgctgcagcatccttggctgcaggaagaggccgagatttcagacgcaccctttgacgacaccatcgtgcagcggctgcagcgatacggnctgtacggcaggttccgccaggtcgccctcaaggccctgatgcagtcgatcgctgagcangacggcgagagcagccagcagttccgggacatgcg

SEQ ID NO: 4470 - DNA, 439 bp, Chlorella sorokiniana
  Clone ID: LIB3602-054-Q6-K1-A8
tggtgcccgcctacctgaccggtgagttccccggcgactacggctgggacacctctggcctgtccgccgaccccgagaccttcaagaagtaccgcaccatcgaggtcatccacgcccgctgggccatgcttggcgccctgggctgcatcttccccgaggtgctggagaagtacagcggcgtgcagttcggcgaggccgtgtggttcaaggctggcgcccagatcttcgctgacggcggcctgaactacctgggcaactccggcctggtgcacgcccagtccatcgtggccaccctggtggtccaggtgctgctgatgggcgccgtggagatctaccgcgccaacggcgagggccccaacggcttcggcgagggccaggacaccctgtaccccggcggcgccttcgaccccctgggcctggctgacgaccccgacaccct

SEQ ID NO: 4471 - DNA, 441 bp, Chlorella sorokiniana
  Clone ID: LIB3602-054-Q6-K1-A9
gtttcgcttggggtggagctcggctatgctgcggagcgcgctggttcgggcggcgcgccgcgtggcggtgcagcagcagcggggctacgccgatgcagcggtggccaccaaggccaacatctgggatgagctgggcgagctggtgaccagcgacgagggcaagcgcgagctggccaccctgcgcagcacctacgcagacatctcgcaaaagctggccaagctggcggcggacccggagcccatcaactgggcggcctggagcaaggagatcgaccccaagctggtgcaggagttcaagcaggcgtacgagaccatgaagctgcccaagtttgagggcaaccacattgctgaggccaacacccagtttgcggcgctgctcaaggaggcggaggcgctggaggcggccagccgcacgcgcattgtggagatccagaaagagct

SEQ ID NO: 4472 - DNA, 411 bp, Chlorella sorokiniana
  Clone ID: LIB3602-054-Q6-K1-B1
gcgcgcttatgttacatgagcagttctacgtctgacaaacaggtcgagcgacaaagctgtaattctcttctccaaacgacgggcgctggcagcgcttacgaaagctgagcataccagaggccagtgatcttgacgtccttgggggccttggctcccaggtcagtgtcggaaggctgcacagactcaaacacgccagcaatctcgccggtggcagcatccaccttggcaatggagaacactgcctggcccttcattgcgccggccgacttgatgttctccttcaggtactcctcatcgtcgccagcggcgggcagggccacagcagtgtcatagccagtcgcagcgccacgacccttggggtccaggaaggtggcaccacggtaggagggcaccacaaactccccaccaaag

SEQ ID NO: 4473 - DNA, 444 bp, Chlorella sorokiniana
  Clone ID: LIB3602-054-Q6-K1-B10
gtcgaccttgaggtgcctcggcagatcagcgcgcatctgaagcacttgccagcagcgaacgagtctccacacactgccggcacccgaccaggccgccctcgtgcttcacacgcgtccagaccaccaagaatggggtttgagattgacgacagcaaggtgctgctgctgtctggagtcgcagcttccacattcgccatccacgccaccgtcgcacctaagcactacaatgagctgtacatgagcaaggacctgccggtcaacgagccgatgacccgctggttcggcctggccctggccacctgcggcggcggcattccgataaccctgtccgctggagactacagcgacaagaagcccgtcaaggatgcactcaaggcatcgggcgccgggtggaccaccgcccttgtcaccacgctctacaacgcgcatgaggggcaccagaag

SEQ ID NO: 4474 - DNA, 445 bp, Chlorella sorokiniana
  Clone ID: LIB3602-054-Q6-K1-B11
gtgtctctcaaccacgacacccagatgtgcatggaccccaatgtgatcgagtccaaggtcatgatctcctcctgcggccacgacggccccatgggcgccgccggcgtgaagcgcctcatgcgcctgggcatggtggagaaggtgccgggcatgggcgcccttgatatgaacaccgccgaggactctgtggtggaccgcacccgcgaggtggtgcccggcatggtcatctgcggtatggaggtggctgagctggacggctgcccccgcatgggccccacctttggcgctatgtacatgtccggcctcaaggctgcccaggtcgcgctcaactccctgcgccggcagcaggaggaggaggcggccgctgaggcaggccaggagggcaaggagatggtggccgcctaagccagctggactcgccacagctcctcgcctttcaagcctt

SEQ ID NO: 4475 - DNA, 356 bp, Chlorella sorokiniana
  Clone ID: LIB3602-054-Q6-K1-B12
gtcaaggacggccgctactcgcaggtgacctcctccgcgctggacaccaagctgcgcgatgacctggagcgcctgaagaagatccggaaccaccgcggtctgcgccactactggggcctcaccgtgcgcggccagcacaccaagaccactggccgccgcggcaagaccgtgggcgtggctggcaagaagaagtaagcagcttcttgcgggcgcggcctgcggcacgggcggatgctggcggctgggtgacggcggctggcgccgcccgcgcagcaaccccactggcagagccggcggcagcaggtggatccacaccagtcgttgcagtgctgccgtcgtgtaatgcacccttcgcg

SEQ ID NO: 4476 - DNA, 444 bp, Chlorella sorokiniana
  Clone ID: LIB3602-054-Q6-K1-B2
ggccagacgatctacagccgtgcacaggaggcagccgcaccctctgctgagacgctgccgcactacagtgacctgtttgcgcggctgcgggcggcgggcctgcaggctgccgcatgacggcgcatctcggccagttttactgccccaagatgctgctgtgtgcatccaactgcctggtccccgtgccataacgttcagcttgccttgatctcctttcccaacgcatgacctgctgcctagtgtccctcagtcccacaccccctcagcccatttgacatccgagcgcccgccagcccgacccgttctgtattgcccgcatgcttctgtgcaccaacgcccgtgcccgccaaacctgtatttcatttctctgccgtcccaagcagcacgttgcctgatggcagccgctgccgccgccgcacactccagttgcacctcctttctgca

SEQ ID NO: 4477 - DNA, 445 bp, Chlorella sorokiniana
  unsure (1)..(445): unsure at all n locations; Clone ID: LIB3602-054-Q6-K1-B3
atggcagcgaacaaaccgcctcccttacgggcgctgaactcttgctttgcattgccactgcgcgacatacgaacgcgctgctacgccaacttgtctctttgccttccgcaggaaatgtcacccgggccagctgagagttatgataatttatcatatgtttcatacctggtagcgactgtttggcgtgggccagctgctggacaaagcggagattccgcaaagctggtgcctcccagtcgctgggatgttgatcgtggctgggggggcgagggaatgtccaagaggttcggcagctttgtgcagggtgcagagctttttgacgacagcttttttgcattgtctacacaagaggtgcgttttttttgcattggtacaacgaaatgtgatagtgccttgaactggtgttcatgcatccgcatgctgcangccagtgcgatggatgcac

SEQ ID NO: 4478 - DNA, 448 bp, Chlorella sorokiniana
  Clone ID: LIB3602-054-Q6-K1-B4
gctagccgctcaacatacattttgtaggcaggccagagcatagttcctggcgccagatacatgcgctgcttgcagctgcaaacttccaggtttctgtcctgactgctgtgcagtctgtgcagttttgcgtccacaagcttgctgcccattttgccgctcgaccaaactcgcaagaacccaaacgaaacatcacaccttgccggctgatcaacttgccagccgtccattacatggcatagcgtgccatgcttggcattgcagttttgtgcatgccgcccctttatgggcagcccaacatgaacaggctttgaacaaatgactctctcccaccttctcgtcggttctgtatgctctgtccttgtgtgtagcgctgtgtttcctgctgctgcacgtcgcctgtacctacctccacctttcatgtcgtgcatctgctttgccaatgaccctt

SEQ ID NO: 4479 - DNA, 212 bp, Chlorella sorokiniana
  Clone ID: LIB3602-054-Q6-K1-B5
ccgtgctttcgagtcaataaattttaattaacggcacgtaaattcacaacattggccgtggtaaaacacctggcgtgaccgaaaaaaccctgctgtgaccaaattcaattttcttgagctagattcatatttaacaagctggcacaataccgaatagccaacaactgatcacccttaataacaaatgggaagccccaatggacaatggaaca

SEQ ID NO: 4480 - DNA, 98 bp, Chlorella sorokiniana
  Clone ID: LIB3602-054-Q6-K1-B6
ggtgcgattaaaaaataaacataaacttccataagcaggccaaaccttagaccctgcaaccagatacaaacactcttagcgacgggtaacaaaaaggg

SEQ ID NO: 4481 - DNA, 443 bp, Chlorella sorokiniana
  Clone ID: LIB3602-054-Q6-K1-B7
atgatgtgggcgccaagaaggcgggcgtggacttcttccctcactgcgtccacctggtcagctgggagaaggagaacatctcgtccgaggcgctggaggcggcccgcatcgcggccaacaagtacatggtgaagaacgcgggcaaggacgccttccacctgcgcgtccgtgtgcaccccttccacgtgctgcgcatcaacaagatgctttcgtgcgccggcgcagacaggctgcagacaggcatgcgcggtgcgttcggcaagccatttggtgtgtgcgcgcgcgtgggcatcggtcagatcctgctgtccatccgctgcaaggacacgcacgctgcggtggcggaggaggccctccgtcgtgccaagttcaagttccccgggcgccagaagatcgtggctagcaggaactggggcttcactccctacctgcgcgacgattac

SEQ ID NO: 4482 - DNA, 158 bp, Chlorella sorokiniana
  Clone ID: LIB3602-054-Q6-K1-B9
ttttttcccatgctccatccactactgtttccctccctgccgcccgctgctctgtactcccgctgcccctctgccctgcttgttttctctactgccaccacgtgttcctcattcaccactacttttggcctttgtttacgttgtaatgcgcactagac

SEQ ID NO: 4483 - DNA, 440 bp, Chlorella sorokiniana
  Clone ID: LIB3602-054-Q6-K1-C1
aaaaaaaaaaaaaaaaaaaaaaaccaacctaaaataaaaaagaaaaaaaataataaaaaaatacaaactaaaatgggcataaaaaaaaacagaaaaacgtgcgccccctttcaatgatccaggtttacgtgcgcctccattcaacaacatcgcttttactatagactccccaaagtacaatctcttgaccgtctgtttccacccaccttattggcaaacccctgcttttccacaagttaatcgcgtataaccatatccccctttaaccagatggctttttacaaaagaacccccccccgatcgcccttccaaacatttcccatccctgaatgcaaaatgggacgcgccttgtatcgccccataaactagcggccgactccttggaatacccccactgtgccctttacaatttccatcgcctttatccccgatcctttaaa

SEQ ID NO: 4484 - DNA, 356 bp, Chlorella sorokiniana
  Clone ID: LIB3602-054-Q6-K1-C10
cgctcacttggcagctctccttgctccactgggcatagcagcagccgacctgcacaccccgcccgcggcaggggcctgagacagtagccctggccctctgtgtgcaaaacctgcaattgctgtgtattctccctggccccctgcttcattgtaccgccgtggcatctgtgtcctgttttgcacgaggctgcctttttagcccggcagcagttttgccaatccgtgtgatcagtccacgttaaaaaaaaaaaaaaaacaatgaaaaaaaaaaaaaaaaaaattaaaaaaaaaatccctttttaaaacagttgaaaaaaaaaaaaaaaagccccccaaagggggggccgcccttttaa

SEQ ID NO: 4485 - DNA, 332 bp, Chlorella sorokiniana
  Clone ID: LIB3602-054-Q6-K1-C11
ggcgcggacgcgggcatcaagaacgcggagggcaagaccgcgggcgaggtggctgagatgaacgagcaggcggcggtggttgagctgctcaaggccaaggcggcataagcccccctgtttctggcgtcttgctcaccgcccagcttgctacacccgcgggcggcgcaaccttgcacgcatgttgctcgcatacagttgccggcctgcattttccttctagtcaacccgatttgtccaaacgccattcgcttccttttgtgggcgcccattccgccaattcattcatgcgcccaaccaactcaactcgtacgctcctgcaaagcgctgcagct

SEQ ID NO: 4486 - DNA, 449 bp, Chlorella sorokiniana
  Clone ID: LIB3602-054-Q6-K1-C12
gatatctccatggcgaactcccgccagaacgtgcgcaagctggtgaaggacggcttcatcatccgcaagcccgagaagatccactcgcgccaccgcgcccgcaccgcagcagaggccaaggccaagggccggcacaccggctacggtaagcgccgcggtacgcgcgaggcgcgcctgcccaccaagatcctgtggatccgccgcatgcgcgtgctgcgccgcctgctcaagaagtaccgggacagcaagaagattgaccgccacctgtaccacgagctctacctcaaggtgaagggtaacgtgtacaagaacaagcgcgtgctcatggaggccatccacaagcagaaggcggagaagatccgcgagaagaacattgcggaccagctggaggcgcggcgcgccaagaacaaggcggcgcgcgagcgcaaggcggcccgccgcgaggagcg

SEQ ID NO: 4487 - DNA, 409 bp, Chlorella sorokiniana
  Clone ID: LIB3602-054-Q6-K1-C2
gttcaacctgggcaagtaccccaagggcacgctacgccagcgcttccctgccgccggcctcggctttgacgggcgcccaccgctgagcgagcagggcttccatctgctgtcttcgctgctggagatgtgcccggagcggcgcatcagctgcgaggaggcgctggaccacccctggttcagggagcagccgctgcccaaggaccgcgccctcatgcccaccttccctgccaccaatgacacgacgcagcagaagtatgcagcccagcggcgcgctgttgcggccgtcgctgcagcggccagcaagaaggccggctagggttcagaggcatgttgcaggagcgtccagcagcagcttgcgtgcctctgagatgccctgttgcatgcaagaagtgtaatctggctcaattca

SEQ ID NO: 4488 - DNA, 457 bp, Chlorella sorokiniana
  Clone ID: LIB3602-054-Q6-K1-C3
gcgcgtaagcgctgccagcgcccgtcgtttggagaagagaattacagctttgtcgctcgacctgtttgtcagacgtagaactgctcatgtaacataagcgcgcaaaaaaaaaaaaaaaaaaaaaaaaaaaaaaaaaaaaaaaaaaaaaaaaaaaaaaaaaaaaaaaaaaaaaaaaaaaaaaaaaaaaaaaaaaaaaaaaaaaaaaaaaaaaaaaaaaaaaaaaaaaaaaaaaagggggggccgttttaaagaaccaaagtttacttcccctggattgcaacgtaatattttttttatagggccaccaaaataaaataaacgggccgggttttaaaaacgtgtgaacggaaaaaaccttggcttacccaaattaaatgccttggaaaaaaatccccttttcgcaagttggggaaaaacaaaaaaggcccgaaccaatcccctttccaaaaagtggcca

SEQ ID NO: 4489 - DNA, 409 bp, Chlorella sorokiniana
  Clone ID: LIB3602-054-Q6-K1-C4
gattgattgactgcttactttgctgtgcgctgcacgccccacacgaatgccccgcctgaagcaatgagccccaacctgcacccgactctgacttgcgcaagcacccgctgcacgcccccaactccggcgcctgcctgcctgccaccctgtactgacccctgcttgtgcccccgcctccaacgaccgtctgctttttttcagctcctgagccgtctcagctgccatgccattatagcactcgtttgccccagctcctgtgccgtctcagctgccgagccactctagcactcgtttgccccaccccgaccttgcgtcggccccctagcctccctgtgccggtatcgtagtgggccactcaccctgccgcgggagctgcaggctggccctcccacctgtaaagccgctgaac

SEQ ID NO: 4490 - DNA, 432 bp, Chlorella sorokiniana
  Clone ID: LIB3602-054-Q6-K1-C5
aaaaaaaaaaataataaaaaaaaataaacactaaaaacaaaaaaaaaaataaaaaaaaaaaaaaaaaaaaaaaagaggaaaaaaaaaaaatatagaatagaacaaacaaaaaataaacaacaaaaaaaataaaaaaaaaaggggggctgcctttttaaagtaaccaatttttgttccccctttttccaacgataatcttttttttttgggctcctaaatttaattaactggcctgcctttataaaactcgttagtggaaaaacctgtgccttctcaaatttaaatcctttatagaaattcccctttttacccggttgttgaataagaaaaaataccctcctgttccgctttccaaaaaagtcactcaccttaaatgggaaagggaaccctccttttaccacctattaaacccctgggcatggggggataacc

SEQ ID NO: 4491 - DNA, 450 bp, Chlorella sorokiniana
  Clone ID: LIB3602-054-Q6-K1-C6
ggaggcgccgaggggagagcacgatgcagatcttcgtgaagaccctcacgggcaagaccatcaccctcgaggtggagtcttcggacaccatcgagaatgtgaaggccaagatccaggacaaggagggcatcccccctgaccagcagcgcctgatcttcgccggcaagcagctggaggacggccgcaccctggcagactacaacatccagaaggagtcgacgctgcacctggtgctgcgcctgcgcggcggcatcattgagccgtccctgcagatcctggcccgcaagtacaaccaggacaagatgatctgccgcaagtgctacgcccgcctgcacccccgcgctgtgaactgccgcaagaagaagtgcggccacacctcgcagctgcgccccaagaagaaactcaagtaaactactcgcttcggcacgagcggaagcggcatgagcggca

SEQ ID NO: 4492 - DNA, 67 bp, Chlorella sorokiniana
  Clone ID: LIB3602-054-Q6-K1-C7
aaaaaaaaaaaaaaaaaaaaaaaaaaaaaaataaaaaaaaaaaaaaataaaaaaaaaaaaaaaaaaa

SEQ ID NO: 4493 - DNA, 445 bp, Chlorella sorokiniana
  Clone ID: LIB3602-054-Q6-K1-C8
cttgcctgcgtcgtgccagcaggcgtccagactctcccgcgcgcctggcatcgtcgctccctgcacgtttggcgcacaggaccggctcccaggcgtcgagtgaccacgatggcgagcggcggcagggctgagctgcacgcgctgccgggcgtgtcggcgcccccggccgagaccaaggggttcttcttccagcagaccatggtgcgcgtcaaggaccccaaggcctccctcgatttctacacccgcgtgctgggcatgacgctgctgtgcaagctggatttcgcggacatgaagttcagcctttacttcctgggctaccaaaagcctgaggacgtgcctgaggatccggtggagcgcgccaagtggatgttcggcctgcccgcctgcctggagctcacgcacaactggggcacggagagcgacccagatttcaagggataccaca

SEQ ID NO: 4494 - DNA, 444 bp, Chlorella sorokiniana
  Clone ID: LIB3602-054-Q6-K1-C9
aaaaaaaaaaaaaaaaaaaaaaaaaaaaaaaaataaaaaaaaaaaaataaaaatataaaaaaaaaaaaaattaggagcaaattattaaacgggtgattaaatacttttccaagtttttctaccattaagtgtccccttttttgggttttcattgttttactttcttgtttttcctttttttacctttttttttgggttacccctttttttttcctttgcccgctctttttaacgctttttctgttaatcctttttttttccaactttttcccttttctgagtcccctttttttccctttttgacattttttatcaagtgtcccgccccttgtccttctcctttattggcccattttgttttgtaattggataccctctttccttggcttttttcctttgtttttggctttttcccccttttttccctttttttttttcattttt

SEQ ID NO: 4495 - DNA, 357 bp, Chlorella sorokiniana
  Clone ID: LIB3602-054-Q6-K1-D1
gtggcgggcgtggtggagaccaacaggcccgacgccaagacggctctgtaccaggcggccatcaagcagggagacctgctgctcaaccgtgtgcagaagctgagcaaggtggtggacatcgagtaaacactcaaacaagagtgaatactcgaatgcaaccagtaggaaacaggacgacacgggcggcaggttgccagcccggcagccccgcacagccacggcgcaagctggtccccaagcgagccaaccaggccttgcagcgccgagggactgactcgcatcggccatcttctgacccagcaaggcgctggccagccagcccaattgtactctgcgccattgtaacatcgcattctg

SEQ ID NO: 4496 - DNA, 280 bp, Chlorella sorokiniana
  unsure (1)..(280): unsure at all n locations; Clone ID: LIB3602-054-Q6-K1-D10
caacaacctggtgcgcgccatgaactgagcgctgagccggcgagcacagcgcagcgcgcgcagcacgcacagcgcggcgcgtgcagcagcctggacggagcggccccctgatgcctgctagccacggcactgttggccgggccagtcgtgaggccccgagcgcacccgaatgtccaagggagtgcacggggggcgggcggnngnggncagngcagngcgcgccccccgccccgccccgcctttgctccgccctgtgtggatcgcgggggcgggcttggct

SEQ ID NO: 4497 - DNA, 123 bp, Chlorella sorokiniana
  Clone ID: LIB3602-054-Q6-K1-D11
aaaaaaaaaaaaaaaaaaaaaaaaaaaaaaaaaaaaaaaaaaaaaaaaaaaaaaaaaagggcgaacgatttacggggtccaggtttccgtccgcttgcctcctccagtctaccttttcttttt

SEQ ID NO: 4498 - DNA, 119 bp, Chlorella sorokiniana
  Clone ID: LIB3602-054-Q6-K1-D12
attcaacgctggccggccgctcagtggccgcccgtcctctgcttcagcactcatgcgtctaccacgcttgccccacaacatccgtcacagatggaatctctagattgcaagtggaacac

SEQ ID NO: 4499 - DNA, 393 bp, Chlorella sorokiniana
  unsure (1)..(393): unsure at all n locations; Clone ID: LIB3602-054-Q6-K1-D2
gcgggcaccacagctgctcccaccccatccgctcgccgtgtaccaaacctatccccccgggcctgtagcccaccccgcgccccgcggcagctgtgccctctggcaccccgcgcctgtgaactagtgattgcttaccgcccccctcctaaacccccttcatttgtttgcggccagtgtgtgcggcgattagcgcgcagaatctcagcgttgtttgttcgttcaaccaccgttttatccccacactgtcatacttgcatttctgcggtcccgctccccccctgtctacttgccccgtgggcccgttttgcctcgatgccccgattttctttcctcggcaaataacaagagtgtgtaactttgcatgcagaanaaaaataataaaccataatcctt

SEQ ID NO: 4500 - DNA, 447 bp, Chlorella sorokiniana
  Clone ID: LIB3602-054-Q6-K1-D3
agctggtgggcgtgctgagcaagaaggatctgaagaagggcggcgcactggtcaaggatgtgatgtccaccgacgcccatcgcctgcaaggccacggacaaggccaccgctgccgcgcacgtgatgattgaccacaagttccaccgcgtgccagttgtggacgatgccggcaagtgcgttggcattgtgacgcgcacggacattttctgggccctcgcctccgacaacgaccgctcggcctttttccatgagcatggcatcgacctgtagatgcgttgacggcctcagcagcaggttttgcagctgttgctccatcacgccccccggccatgaggcctcccaagttttccagacggcgtaccgcagttttccccggcctggctggccctgagaagatatacccccacatatgtgattttgcatgtttcatgaacgactgaagcccct

SEQ ID NO: 4501 - DNA, 450 bp, Chlorella sorokiniana
  Clone ID: LIB3602-054-Q6-K1-D4
gcgggcttcggcccagcagcagaaggccgcccccaaggcgaccgtggcggccctgccccgtgtggccaaggccctgggtgccggtgtggcctccctggccctggcgctgagcgccaacgccgccactgtgaagctgggcgctgacaacggcgcgctggtgttcgacccctccaacatcaccatctccaagggcgagtctgtgacctttgtgaacaacgccggcttcccccacaacatcgtgttcgatgaggacgatgtgccctctggcgtgaacgccgaggcgatcagccgcgaggactacctgaacgcccccggcgaggagttcaccgtcaagctggacatcgctggcgagtacggcttctactgcgagccccaccagggcgccggcatggtcggccgcatcaccgtgaactgagcgcagcatgctcagcgccgcggcgtgcactgacc

SEQ ID NO: 4502 - DNA, 64 bp, Chlorella sorokiniana
  Clone ID: LIB3602-054-Q6-K1-D5
gcgcggacgcgtgggcggacgcgtgggcggacgcgtgggcggacgcgtgggtgcacatccagcg

SEQ ID NO: 4503 - DNA, 180 bp, Chlorella sorokiniana
  unsure (1)..(180): unsure at all n locations; Clone ID: LIB3602-054-Q6-K1-D6
ggcgcaaccccacctccaagatctgcctcaaggacagcgccaagaactgaggcgtgccagctggactgagcgagcncggagcccttgctggccggacctgaggcaggcagccattgctgactgccggggggcaccgggccgtcacccgctgcccggtagtatgggccaggcggcggtcga

SEQ ID NO: 4504 - DNA, 192 bp, Chlorella sorokiniana
  Clone ID: LIB3602-054-Q6-K1-D7
ctgaaagctaagcataacgccaagccactgctcgctcctttcggatcgcccatttggttggttgtcggcccctcttccaatcggccccgcctcgacttgatcctcatcacgtccgcttttgtctgcactcctcaggggcgtgccaattgtgcgcgccgccgttgtatcctgccaactgtaacattaatgact

SEQ ID NO: 4505 - DNA, 442 bp, Chlorella sorokiniana
  Clone ID: LIB3602-054-Q6-K1-D8
cggagtgatggcgcaagtgctgggaagcgcgccgcgcgcctgtgggcaggcgctgcggcgcaacccttttgcccccgtggtgccctgccaccgcgtgatcgccgcctctttggatctgggcggcttcagcggcggctggggcatgggctgcgacagcgtgcacaagaagcggcggctgctgcaagaggagggcgtgcgctttgatgaccgcggaaagctgctgggcagcgatgcaggggcggtgatgacagccgcggagctgcgggccgccgccaagggcgtcctgtgagcctgctgcgacggctttgatagcgctcagtgatgcttgatggtgccccacggccatgactgctttgcccttgagtgctttgtattttagctcgatacacgaggtgcttgtgcgtgttgttttgtatgctgcatccgttcaaaatgcgcggcg

SEQ ID NO: 4506 - DNA, 446 bp, Chlorella sorokiniana
  Clone ID: LIB3602-054-Q6-K1-D9
ggcgggcgtggatggccgcccgaccatggaggagcgcgccaagaagggcagcaagaattcttgttcgaaccgcaggaagcggagcaaggagggagcccgcccgctgggtgtgcgcaagtggtctgctgcacagaaggctgcagctgcggcaaagcgtgcagggcagtccaagccctgcgggcagtgcaagcactgcctcaacccacactggaagaaggtgtgcctcaccccgctgcagtagattgacaaaaacctggcctgacagtattgttactttgacctctcttagctgcagctgccccatttcggcatgtgctccccaactgacattttccatacatatcattcccgttcgctctcatgtccatccagcactgccacctcagcactgttccctctctccactccagcactgttcctaacctagcacccctgaccgccgagca

SEQ ID NO: 4507 - DNA, 446 bp, Chlorella sorokiniana
  Clone ID: LIB3602-054-Q6-K1-E1
cccacgcgtccgcggacgcgtggggcgccagcagctccttctcagccttccgctccctctggtgagctcccaggtctgtggtagggctggaattccagcccagccctgtttggccaccctccctgcattgcataggcgcactctccaccccactctcaacccctagcagatagcaactcagtagctgaaacgcaaacatgccagccctaggtattgcctctcgtatttgttgacgcctgcgcgttgctgtcagacacagccctgcccccatttgccggcagctcacccaattttccttagtccccaccacgttttcacgtatgttgttgctgttccgcaccgcgccacagctgctggtgccgcccccgccagtgctgtgtgccgcgtgcaagctgcagtctggtccccgctccttttgctgcgcttcccacgtttcgctcgcaaat

SEQ ID NO: 4508 - DNA, 449 bp, Chlorella sorokiniana
  Clone ID: LIB3602-054-Q6-K1-E10
gcccgtccagcagcagttagcagccatgcaggccaccttcgccggctctaagctgcagcttggcgcgcgcgtcagccgcaagagcgtgaacaccaccgtggtggcctccagcggcaagaagatcgacatcagcaagcagggcctgaactccatccagaatgagaccgtgaagctcaacctgatgggcaagtccaagaccatggagagcaaggactgggtggacccccagggccgcaagggcaagggctacggcgtgtaccgcttcgccaacaagtacggcgccaacgtggacggctacagcccgatctacacccccgacacctggtccgagtctggcgactcttacaagctgggcaccaagggccttattgcttgggccggcctgattgtggtgctgctgggcgtgggcatcaacctggtgatctccacctctgccctgggccagtaaa

SEQ ID NO: 4509 - DNA, 406 bp, Chlorella sorokiniana
  Clone ID: LIB3602-054-Q6-K1-E11
gccctccagtactgccgctcgcccctgtctgctgcgcttgctgctgctgctgctgctgcccgggtggcggcggcaggaagaggccgctcctggatgctgctcagcattctatagcagcaggcgccgcagcgggcacctgtcaaggcatgcatccaagtgccctgcttgccaccatttttattgcccacaccgcagcccaacatgacggaagcggagtgccaggcgtttgtggtgaaggctgtgagccacgccatggcgcgcgacggcagcagcggcggctgcatccgcacagtcgtcatcagcaaggatggcgtcaagcgcagcttctttgcctgcgatcgcgtccccgtggcatttggcgaactgcccgcaccgcagcagcagccgcaggtgcaggcatgagcgg

SEQ ID NO: 4510 - DNA, 438 bp, Chlorella sorokiniana
  Clone ID: LIB3602-054-Q6-K1-E12
gcctcggaatgcaccctccattcatgggccgtgggccagtctcacaaccccccacctggacccttagccctggtggctttgaccccacatcgttgccgtactgcagcacaccatgctccatgcgcacacacgaccctgcaccttggaccttgtattgctgccatccgtcgcctgacgtgccacgccagcccgcctcatggggcgctccatgcagctaacatccccctgacagactggctgagcacttacgctagacagcacgtgaccgttggcctacctgcacccggcttagctcccttcttgcttccacaaaccgcttgcagcaacgttgatcgtgcactgctcccagcagccggtggtgctcaacgatggggtcacccggacacccgacctccgttgttgttgattcattccagcattggatgcccacgttgtgtt

SEQ ID NO: 4511 - DNA, 447 bp, Chlorella sorokiniana
  Clone ID: LIB3602-054-Q6-K1-E2
gcggcgtgctgccctacctggcctacgttttatatgcgccactctatctggctggccccatcatcactttccaggagttcgcctggcagctgcggcagcgcagccctccacgcgcccgtgtgatattgcagtatgcggcccgtctggctgcggactgggcctgcctggagctcctcactcgcttcctctacttcaacagcattgccaagcaccgcatcgggttgcgctaccagcagtacggcttgcagtatggcactactgagatggcactgactgctttctgggttctgtgcttcatgtggctcaagtttgccaccatctggcggttcatgaggctggctgccctgctggatggcattgagcctccggaaaacatgaagcgctgctttgcaaacaactatgatatcgagggcttctggcgtggctggcatgcaagctacaaccgtt

SEQ ID NO: 4512 - DNA, 367 bp, Chlorella sorokiniana
  Clone ID: LIB3602-054-Q6-K1-E3
gcactttgtagagcagcgcggccgtgatgcagcgcagctcctggttgttgtgcttcataaaccgttgccgaacgtcctggcagctgtgggtgccagccaggcggagtgggaggcgtgggcaggtaccaacccgccggcagcctgcccgctgtacggttgggcacagcaggcggcagaggaggaggcggcgcggctggcagcggcgctgccgcccgagctggtgcaacttgagcggcggcagcactcggcggtacggtgcaaacagtcagcaagctgattggttcatcgggcggtatacgcagaatttgatcttgcattgtaatgccgcaatgttgatgtatgtttgttgatataagtcccgtactgc

SEQ ID NO: 4513 - DNA, 384 bp, Chlorella sorokiniana
  Clone ID: LIB3602-054-Q6-K1-E4
gttcggcttcttcgtgcagggcctggtgaccggcaagtcccccctggaaaacctggctgaccaccttgctgagccgtctgtgaacaacggcttcgcgtccgccaccaagttcctgcccctggcctgaacgccgtcgtcaacctggagcgacctgggcatcccatattaacggcggccagccggttttggacaagcacacacaacatatgagattcccaacctccctgcgcactgcttgtaacaatcctggctccctcttgtacccttgacccgcactcgggcgtggatatgtaacgttccgcgggaaaaaaaaaaaaaaaaaagacaaaaagaagatgtatgataaaaaatataaattaaaatggtggaaacattaaaaagaat

SEQ ID NO: 4514 - DNA, 267 bp, Chlorella sorokiniana
  Clone ID: LIB3602-054-Q6-K1-E5
gcgggccgcccttttttttttttttttgttcgatttgttgttacaccgtggatctgctcatcaagtggaaaggacggtgtgcgcgacgggttcattcgttgggatcaggttggttggttgcaaaaactccggagtagggggtatgaaatagcagcgctaacgaaatagacggacatggaagggatgccaccggttattgagacgggtgggcggacgcgtgggcggacgcgtgggcggacgcgtgggcggacgcgtgggctagatcgc

SEQ ID NO: 4515 - DNA, 274 bp, Chlorella sorokiniana
  Clone ID: LIB3602-054-Q6-K1-E6
tgtgcccccagtgcggccccggcatcttcatggccacccacttcaaccgcgtgtactgcggcaagtgccacctgacgtacgtgtacgacaaggagggccagaccgcctaagcgccccgctcccccctgcggatgcacgcttagcagcagcacacgcggcgggtgcgcccggcatgccggcacaccagccacggagcggcggggcgtccctggcagcggcgcagcgcctgcaagcccttctgttgtgttctgtgccgctgtaatacccctgctgc

SEQ ID NO: 4516 - DNA, 444 bp, Chlorella sorokiniana
  Clone ID: LIB3602-054-Q6-K1-E7
ggcccctccaagaagggagccaaggactgcgtgccctgcaagagcaccggctgcactggctgctacgatgattccgccaagtgcacctcctgcgacaccggctttgggctggtcaaggacgcgtgcgtggcctgcgccgcagccaactgcaccaactgcgacggcgatgccaaggtctgcacctcgtgctcctccaacgacaccgtgagcctgggcaccgacaaggccaccggtggctgcgcgccttgcaaggacgccaactgccagacctgcaccgccaccgacgcgtgcaacttctgcaaggacggctttggcctggatgagaaggccggcagctgcaagccctgcccagagaaggccaccagctgcaccttcaacgccaccggcacatttgtggacgcgtgcgccaacggctacggcccagacaaggccggcaaggagtgc

SEQ ID NO: 4517 - DNA, 429 bp, Chlorella sorokiniana
  Clone ID: LIB3602-054-Q6-K1-E8
aaccgccgcttcgtgaacgtggtggtgggcttcggcaagaagcgcggccccaacagccagtaagctgactgcggcgccagcagcagcggcaggcatgtgctgaacgcacggagcgcaagcgcgtcccgcgcacagccgccaccgaagcggcctgccagcgtcgacggcagcgaggcagcaaggcgcggcctggcatgctagcagcgcgtactgcgcgccacggcgctagcagccgcaccctggaacagcatcagcagtaattcagcagcccacctgcatgccgaacgctccgctgtaacaggttctcaggaaaaaaaaaaaaaaaaaaaacaaaaaaatgaaaaaaactgaaaaaaaaaagacaccaaataaacattaaacgccgccgggacatctaaagacgcgtgcgccaacggttacgggccacac

SEQ ID NO: 4518 - DNA, 454 bp, Chlorella sorokiniana
  Clone ID: LIB3602-054-Q6-K1-E9
aaaaaaaaataaaaaaaaaaaaaaaaaaaaataaaaaaaaaaaaaaaaaaaaaaacaaaaaaaaaaaataaatggggcacaaaaaaaaaaaggaaaaaaataaaaataaactcgctgaccgttttatacataccgggcgttccccttttttgctttcccactttcttcctttttttttgccacgcttaattttttttttttgccccctttttttcaattctgcgccccggatttctcgccgttgccccatgttaataccctgtgctgcccttcttttttctcttgctgcctttcccttttttcgccctggtttttttgcctttacgccccgttctgacctcttttcgaaaattgtctccccccttttcgcgaacctttcccccctttggcctttgtttttcccctccgcttttttttgttttttttcacacttctaccctcccttttttttctt

SEQ ID NO: 4519 - DNA, 437 bp, Chlorella sorokiniana
  Clone ID: LIB3602-054-Q6-K1-F1
cgctcttccttgttgtttctttgactaccttctcgacaagcatgcccaccttgtttggcacttggggcacagggcctgctgtgctcgccagcactgactggctgggggtacctgcagcttgtacatggcattggtgctgtgctgttttcatccctctgctcacaccagctgccttgctgccacacgcctgctctgtgcagaccaacgaccccgccggcttcaccgtcgtggacgtcatggcctggggcgccctgggccacgctgccgccttctacatcctcgcaacctccagcctgggcctcgaccgcaaccccttctaaaccagtccacggccgcagcctgcgcccaggccacaaccccatcccgagaagagcatttgtccggcgctgtgcctttttctgttgggcatggcgactgcagccacgcatgtgatactg

SEQ ID NO: 4520 - DNA, 450 bp, Chlorella sorokiniana
  Clone ID: LIB3602-054-Q6-K1-F10
gcgttgccgccctgaccgcctcctccgctcaggctctggacctgttcgacgaccgcaaggcccgccaggctggtttcgacatcatctacgaggcccgcgacctggatctgccccagggcgtgcgcgacggcctggcccaggcccgcgagaacctggacgtggccaaggcccgcatcaaggaggctgagaagcgcatcgacgccgacctggacgcctacatcgccaaggcgtactggactgagggccgcaacgagctgcgccgccaggtgggcaccctgcgcttcgacctgaacgcggtggccgacaccctgcccaaggccgccaagaaggaggcgcaggccgccaagaacgagttcctggccgccgtggaggcgctggacctccagctgcgcaagaagaacggggacaaggccgccgctgccctggctgacaccaaggccaagctggacg

SEQ ID NO: 4521 - DNA, 451 bp, Chlorella sorokiniana
  Clone ID: LIB3602-054-Q6-K1-F11
cgaaggttatgtgatccacttccgcgcgcaggacctggtccgcctccggatcaagaacaaggtcaaggtcctgagcctgttctatatcaagaccgacgtcttgctgatggtgaacatcgggatcctgaacatgctcgacatggaggagacctacatgaagatcctgtacgtgctgctcctgacccagatcaacatgatctacttgctcaggttgaacaaggtgaccatgaacatgatgcagctgaccgaccactacgtgatctaccagtacctcaacctgaagaccatcatgtagctgatctacatgctccactatatcttggccaacaagcagagcttcccgctcaccaacaacttgctgatcgagtacaagctgtgctacaacaacatcatcttcgtcaagaacctgctgcactacatcttcagcgtgcaccccagcttccagcaggag

SEQ ID NO: 4522 - DNA, 450 bp, Chlorella sorokiniana
  Clone ID: LIB3602-054-Q6-K1-F12
gcgtgagtgtgccacacatctacagtgcagtgtcggatgtgtctgctgccaccgcctgccacgctgccgctgcgcaccctgggcccatgtgccttcatccgcccaacctgcactactgccccgcaggttcatggtgccggacgcgggcagctggaactacgccttctcgggcgtcaagtggagcgcgggcatgaagtacggcctcaagctgtccaaccccagggccttcttcgacgaggcgcaccgcgccacgcacttcctggactttgcgggcattgaggagggccagggcacgctggtggacggcgtggaggaccacttcgcctgagcgccccctgcctgcctgcattttagtttgttttgcctcagctgcatgcatgttactcccccacctagtcacgctagcatcgtttttccgctccgctctgccgctccgttttgccgctgaca

SEQ ID NO: 4523 - DNA, 442 bp, Chlorella sorokiniana
  Clone ID: LIB3602-054-Q6-K1-F2
gtctgggtgcccaagcgccgggccagctgcctttttgcgccactgatgtaccagcggacagcccagcgctgagcgtcggcgcctaacggccggcacggcggccctaagcgcacccttttgattagctggagccagcgctgtagagcgaacgagcgatttttcccttgcgagagtggacaggccacactggagccgagtgcacatacccacactcattcaccaacacattgattgtcgcctgtctgcccatccatgtgctgtttgcctcccctttgcaccccccgctaccctggctagtaacccgtcaccactttgctgcgacatcctgcacctgtctctctacgcatgctggtgtccccgacctcctatggcctgtgtctaggggtcttcatgaccgactcattcctccgtgtgcgttgatgactcacccatgcgagtgcgt

SEQ ID NO: 4524 - DNA, 445 bp, Chlorella sorokiniana
  Clone ID: LIB3602-054-Q6-K1-F3
gcaggccacacgcagctctctggcggagcctgcgaagctggcttcccagctggcggcctccctcagcagcgcgcagtcgctagcgtcctccctcagccaaggccagcagcagctgctgcgggcacagtccattggtggcgcccccagcggcgcgctcagccctgctgcacaggtggacgtgcgcggcgagctgtccagcctgctgcgcagccaccagtacgagcaggccttctcccgggccctgggcctgcaggatgtggccactgtgggctggctgtgcacgcaggcggacgccgcggcggtgctgtcgcgcgacccatgcccgctgtcgcagatggtgctgctgtcgttggtgcagcagctcagcgcagacctgaccaccagcctggctgccaagctggcctggatccgggaggctgcgctgcagctcaaccccaaggacccc

SEQ ID NO: 4525 - DNA, 314 bp, Chlorella sorokiniana
  Clone ID: LIB3602-054-Q6-K1-F4
gcgccaagatcctgcaccaggtgcacgacgaggagaagggctttgagatggagctggcctggatctgcgaggagagcgggcgccagttccagcgcgtgccgcagcagctggcggaggaggcggaggcggcagccaaggcggcgttggaagcggaggacatggacgactgagaggcgagcggcagcatgcacaccgcaaccattcacgccgccagtcaggctgtgttgcagcaaaacgcccccagatggcagggctgtacatgtggtgcactcgcttgggcccaccactgcccacttctgtaactgcctcccata

SEQ ID NO: 4526 - DNA, 437 bp, Chlorella sorokiniana
  Clone ID: LIB3602-054-Q6-K1-F5
gcggcaagatcctggaccaggtgcaccacgaggagaacggctttgagatggagctggcctggatctgcgaagagacgaggcgctagtatcagagcgtgccccactatctgacggaggacgcggaggccacaaccaaggcggcgttggaagcggaggacatggactactgataggcgagcgccagcatgcacaccagaacaattcactccacctgtacgcctacatcgccaaggcgtactggactgagggccgcaacgagctgcgccgccaggtgtgcaccctgcgcttcgacctgaacgcggctgcctaccccctgccaaaaagacccaagaaggaggcgcaggccgccaagaacgaatacctggcccccgtggaagcgctggaccctcctctatgtaaaacaaacggggacaaggccgccgctgccctgtctgaca

SEQ ID NO: 4527 - DNA, 445 bp, Chlorella sorokiniana
  Clone ID: LIB3602-054-Q6-K1-F7
cccgctgctgccagaccgccactagcaaccatgcaggcctgcttcacctccgttaagggccttgccggcacgccgcctggcggcccgccccagcagcagccgcgtgcaggcccgcgcctccgtgcgcgtgcaggccaactcgtcctacccccgcggccccagcgcatggggcgcgtatgaggaccccctggcctttgtggccggcttcctgggctggttcgcgccctccaacatcaaggtgcccgctttcggcggcgagtcgctgttcggcgccttccatgcctccatgctggagaacctggccaacttcccccagggccctgctctggactccaacttctgggtgctcatgatcacttggcacatggggctctttgcttgcctgttttggggcctcatcggcgtgaacgcccgccgccagggctacttcgactgagcgctgccc

SEQ ID NO: 4528 - DNA, 446 bp, Chlorella sorokiniana
  Clone ID: LIB3602-054-Q6-K1-F8
gtccacctggagacggcgctggcgtgcttgaccaccgtgtagcttagcaaacatggcggtcggcaagaacaagcgtctgtccaagggcaagaagggtggcaagaagaagattgtggaccccttcagcaagaaggactggtatgacatcaaggcgcccagcatgttcaacacccgcaacgtgggcaagaccctggtgacccgcacccagggcaccaagattgcctccgatggcctgaagggccgcgtggtggaggtgtctctggccgacctgcagaacaacgaggccgatgcctaccgcaacatcaagctgcgcgtggaggacgtgcagggccgcaactgcctgacccagttctacggcatggacctgaccaccgacaagctgcgctccctggtgcgcaagtggcagaccctgattgaggccaacgtggacgtgaagaccaccgacg

SEQ ID NO: 4529 - DNA, 293 bp, Chlorella sorokiniana
  Clone ID: LIB3602-054-Q6-K1-F9
gatcgaagttagccagcactccaagtacttctgcagcttctgcggcaagttcgccatgaagcgccaggtggttggcatctggaagtgcaaggcctgcaagaagacccaggctggcggcgcgtacgtgctcaacactgcggcgtccgtgactgtgcggtccaccatccgccgcctgcgggagcagaccgagaagtaagcgagcggccattgaggagtgaagcgggcggcggcggcggcgctgcagcagcgcgctgcagcgtgccgggtggccgctgcttcatgatgtaacgcag

SEQ ID NO: 4530 - DNA, 319 bp, Chlorella sorokiniana
  Clone ID: LIB3602-054-Q6-K1-G1
aaaaaaaataaaaaaaaaaaaatcaaaaataaagacaaatataaaaatattaaaaaatattaaaaaataaaatagagagaaataataatataagaatagaaaactaaaaaaaattaataagggcgggggttttgatgttcctagtgtttgatatcaattttgtgataaaaaaacatttttttttttcatgttattcctctttaaaattgctctcttttccaaaatttcactcttggaaaaccttaacttcatcagctttttttatttttgctatattatcctttttctttttggtcttatcatataaagttaattaccg

SEQ ID NO: 4531 - DNA, 452 bp, Chlorella sorokiniana
  Clone ID: LIB3602-054-Q6-K1-G10
caccaagttcaagtcgtacagcaagtacccgccgtgctacaaggacgtggcgttctggatctcggacgctttgaccgagaacaacctgtgcgagattgtgcgcagcgtggcgggcgacctggccgaggaggtgaagctgattgacaacttcacgcaccccaagacgggccgcaccagcaactgctaccgcatcgcgtaccgcagcatggaccgctcgctgacggatgaggaaatcaatgctctgcaggaggaggtccgcagcaccattgccgacaagctcaaggtggagctgcggtgagggccaccgcgaaccaccagcactagcagggcagcgcagcaccctccctgcgcactgcacaccgctgcagcctcttctcagacccccagctgctccctacgccccattttggccctgtaccctcccctccctgtccctactcttcctttctctt

SEQ ID NO: 4532 - DNA, 54 bp, Chlorella sorokiniana
  Clone ID: LIB3602-054-Q6-K1-G11
aaaaaaaaaaaaaaaaaaaaaaaaaaaaaaaaaaaaaaaaaaaaaaaaaaaaaa

SEQ ID NO: 4533 - DNA, 187 bp, Chlorella sorokiniana
  Clone ID: LIB3602-054-Q6-K1-G12
cggcagcagccaacaccattgtgtagagcggcggccgtccggctgggcgtcgcggcagcgcggaccacactggagtacccaccgcctgccgcgctcccggcgcagcatgctgtaatgcacatccagcgaaaaaaaaaaaaaaaaaaaaaaaaaaaaaaaaaaaaaaaaaaaaaacaaagctgatgat

SEQ ID NO: 4534 - DNA, 431 bp, Chlorella sorokiniana
  Clone ID: LIB3602-054-Q6-K1-G2
gacgtgaacctggtggtcggcggctgcaccgtgggcgccctggcgctgggccgctttgtgttcctgcccttccaccgcgcctccctggccaaggcgggcatgcccaagcagaacggcatgacccacctgcaggctggcgatgctcgcgctgaagaggcgtctttcattctaaagaccaacgaccccgccggcttcaccgtcgtggacgtcatggcctggggcgccctgggccacgctgccgccttctacatcctcgcaacctccagcctgggcctcgaccgcaaccccttctaaaccagtccacggccgcagcctgcgcccaggccacaaccccatcccgagaagagcatttgtccggcgctgtgcctttttctgttgggcatggcgactgcagccacgcatgtgatactgctatgtaaacgaccgcttgt

SEQ ID NO: 4535 - DNA, 92 bp, Chlorella sorokiniana
  Clone ID: LIB3602-054-Q6-K1-G3
aaaaaaaaaaaaaaaaaaaaaaaaataaacaaaaaaaaaaaataaaaataaaaaaaaaaaaaaaaaataaaatagggggaaaaaataaaaaa

SEQ ID NO: 4536 - DNA, 90 bp, Chlorella sorokiniana
  Clone ID: LIB3602-054-Q6-K1-G4
aaaaaaaaaaaaaaaaaaaaaaaaaaaaaaaaaaaaaaaaaaaaaaaaaaaaaaaaaaaaaaaaaaaaaaaaaaggggaaaaaaaaaaaa

SEQ ID NO: 4537 - DNA, 454 bp, Chlorella sorokiniana
  Clone ID: LIB3602-054-Q6-K1-G5
tcggcccagcagcaaagagctacagcggaacagcgcaagagccatggtgcacgccaagcaagcagcgaagaaggcggccaagggcaaggagaaggcggcggccgccaaacaagtgaagcagggaggcgcttctggcggcaagggcaaggtggccaaggccagcgcgatgccgcagcgcaagaaggagatcattgtgccgtggggctgggagcaggccgccaaggacgagaagaagaaggcggcagaggagcgcaaggcggcggagcaggcggcaaaggcggccaaggaggcggccgaaatgggtctgcagaacgcgatcggcaagatgtaccagcacaagaagatggagaaggcagtggccgccacgcccaacctgactgctgccaccgccgcgcccgccggtgccggcggcaaggcggcggccacagctgcggcggactccaaggcaaagggt

SEQ ID NO: 4538 - DNA, 452 bp, Chlorella sorokiniana
  Clone ID: LIB3602-054-Q6-K1-G6
gcggcgctgcggccgcgagaccgaggcgccgccagcgggcggctgcgccgcagcgatgcgcggcaggcggcggcggcagcggcggcggtgcgggaggaacttgctgagaagcgggtgtctaatgccctgatcaaaaatgagctgggtgtgcggctgcagttccccacgtaccgggagggactgtcggccatcgctcagggcgacatgcggccgtataactgacattctgctgagcgcactccgttgccatccagtcgctctgaaagcctttcccagccagctaccctgcttccctactgccctgatagcctctccccgacttgcattttccaccgcccacagtcccctgcattcattgtcacctcccttcccttccttcagcgctcacgtctggtgccccaccccaagttttggtcctctatttgcatttcatgcgctcacacgcttgtctg

SEQ ID NO: 4539 - DNA, 429 bp, Chlorella sorokiniana
  Clone ID: LIB3602-054-Q6-K1-G7
cagctgcccgctggcgagtgggtgaaggaggcgctggcgcagctgggcggcaagggcggcggcaagcccaccacagcgcagggctccggccccgacgttggcaaggtggacgacgctctggctgccgccaccaagctggccggcctcaagctctgagccggccgctactgagctggtggctgaatctaaactggccacagcagcagcagcagcggcggcggagctggcattgcccatgcacacaatgtggcatggaacggcagcgcaccgacggggcattcgttcaacgccagcacacagagttcagccatgctacccgagtatcgcagccttgatatttttacctcccttatgacgtcactccgccgtccctctgggtcgccctgctttggtacgtgatcagccttgtgatcagcacagacacgcttt

SEQ ID NO: 4540 - DNA, 439 bp, Chlorella sorokiniana
  Clone ID: LIB3602-054-Q6-K1-G8
ggcgactcctggctgcccttttgattgcggcagctgcccttgcaagccccaaaaagtccagcacgggatggctctttcgctgtgcagctccccttgcgctgcgctcggtgcaaggatcggctctaggcgtcgggatgtgcgcgcacggcccgcgggcctgcgcgtgcaggcggtgcagcagggcggagacgacctgagccggaagtttgcggaggcggcccgcaagatgaatgtcaagctgcccgaggtggaggcgcaaaacgtggcaactcaggcgccgcccaggttctctcagccccgtggcggttggaacgacggctctgccgctgccgacaaggtgcggcggcaggagcagcaggtgctgagtgcctggacgtcggagcgtggcatgcagctggcggcgggtggcaccatcgtgctggtgctgctgctgctgttt

SEQ ID NO: 4541 - DNA, 445 bp, Chlorella sorokiniana
  Clone ID: LIB3602-054-Q6-K1-G9
ggacctggtgctgacctccttcaacgcctcggtggccctggtcaccgccatcaccggcctcttcgccatgaacgtcatgctgcagccggaccacgagggccaggcgccctactcctggttcctcatcgtcgccatctccactggcgtgggagccatcgctgtgtttgcgggcgtcatgacctactgccgctggcggcgcctgatctgacctagcaccggctgcactagccaactggcatccctgctccgagcagccgctgctgcagcggctgctcgtgctgctggctggaggaaggctgctggtgtgtgcctggtgtgcccaccgctactcacataacaactcgtcaagcccatactcatttcatggtacctgttcttttcgccttgccctgccatccgtccccagctgatgccttttgcctgctccatcctattgccctttgat

SEQ ID NO: 4542 - DNA, 442 bp, Chlorella sorokiniana
  Clone ID: LIB3602-054-Q6-K1-H1
atgcggtcatgactggctccatggttgccaccgcggtgctgctggctgtgatgtttagccaatacaacactgccacgctgcccagcggcgctgctgccggtatcctggtctgcatctgctgcttcatcgctgcctactcttggtcctggggcggccttggctggctcattcctgccgagatccagcccctttccacgcgctcagcaggcttctcacttagcgtgtcggccaatttcctgagctgcttcatcttggcccagtgcttcctgccgatgctctgcgccatgaagtggggcacgtacctgtttttcgcggccttgctggtgctcaacactgccttcgtttactggctggtgccggagacacgaggagtgccgcaggaggacatctactctgtctacactcggcacaagttctggggtccgattatcgcgggggcaca

SEQ ID NO: 4543 - DNA, 219 bp, Chlorella sorokiniana
  Clone ID: LIB3602-054-Q6-K1-H10
tgcaagaaaaaaaaaaaaacgaaaaaaaaaaaaaaaaaaaaaaaaaaaaaaaaaaaaaaggaaaaaaacaaaggggggcgcagccctcagcgaccatcgccagctaggcgcgggcgcttggcggtgcaggtgacggcggcggcccagcccgctggacccggcggcggcgccttcagaggcctgaccgcattgcatgctgttctgctggaaatgatgctg

SEQ ID NO: 4544 - DNA, 448 bp, Chlorella sorokiniana
  Clone ID: LIB3602-054-Q6-K1-H11
tggcgatggcgcagcgggcagcccagagcacctctacccgccaggccgcatcatctggctgttccctgcggaggagagctttggtgaggaggcggcgtccgcgctacaggccatggacgcggcctggcagggcgcggcggggccactggaggaggccggccagccggagcaggcgcagcaggggcagcaggggcagcaggggcagcaggggcagcaggggcatggcgagttgagcatggcggaggcggaggcagccgtggagagcggcagggggcacagcgccgcagagacgggtgcagctcggcgccagacggtggtgtgcgaggcggcgagggtgccctttgagcggatcctgatcatgcctgactgcctcaacgaccacctgccggacgcttatcttgccgcgctgcagcagctgtgaggcagcagccgcggacgtgctctgtgt

SEQ ID NO: 4545 - DNA, 450 bp, Chlorella sorokiniana
  Clone ID: LIB3602-054-Q6-K1-H12
ggtggactggtcggcacccggcaacgcgccggcgcggccagcgctgctgggcaccaaggtgtgggaggactaccccatcgaggagctgctgccctacatcgactggaatccgttcttccaggtgtggcagctgcgcgggcgctaccccaaccgcggctaccccaagatcttcaacgacgagaccgtgggcggcgaggccaagaagctgtttgacgaggctcaggccatgctgcaggacatcatcaagcacaagaggctgcggctggcgggcatcgtgggcatcttccccgccaactcggtgggcgacgacatcgaggtgtacggcgacgagagccgggcagaggtggtggcccgcttccacggcctgcggcagcaggcggagaaggacagcagcgagccctactactgcctgtccgacttcatcgcgccgcgcagcaccggcacggtgga

SEQ ID NO: 4546 - DNA, 447 bp, Chlorella sorokiniana
  Clone ID: LIB3602-054-Q6-K1-H2
ctggatggtagcacccacagctccagcaacagcgctacagcagcagcaacagccgcagtgcagcaggtggcgcgaggcggtgcaggaacgcgtggagcaggcggaggccgccgctgtgcacgctgcgctgcttgccctggaggcgcagctgctgccggccccaccaacaagcagcgcgccgccctctcctcgcaagctgctgtcgcccaccaagcggcagcaggcggcagaggcgcccgcggctccgcccagcatggaagccaacgagcagcgcctggagggcctgctcactcgggcccagggcctgctgggacagcttgcgtccagcgaggcagcagtggcgcagctgcggcagcaggtggcggcgctggaggcggcggcgctggaggcctcggcacggtttgcacaggccaagacggagggcctgcaggcggccgaggctgcacg

SEQ ID NO: 4547 - DNA, 433 bp, Chlorella sorokiniana
  Clone ID: LIB3602-054-Q6-K1-H3
aaaaaaaaaaaaaaaaaaaaaaaaaaaaaaaaaaaaaaaaaaaaaaaaaaaaagggggggcgctatataagagcgcgggcttttataaacgcgcgtgtgccgcgatatatcttttatattgtgtcctaaaattaaaattctgggggcggtttttcacaacgttgactgtgaaaaaactctggtgtcccaaattttaagcctttcggaacatatccctttttccagatggggtattatagcaaaggggcccacacctatcccttttcaaaacatgtgcaccctcaatggggaaagtgacacgccctctataggggcatataatgcgcggggggtgtggggtacacccacagggagacctttacttttgacagccctatagcccccgccttttgctttctctcctttttctttcgccacatttgcgggttttttc

SEQ ID NO: 4548 - DNA, 452 bp, Chlorella sorokiniana
  Clone ID: LIB3602-054-Q6-K1-H4
cgttggagaggacagcggctctgcaaccatggcggagtccgtccagactttcggccgcaagaagaatgcggtggctgtggcctatgtgaagcgcggcaagggcgagatccgcctcaacggcgccccgctggagctggtgcagcccgagacgctgcgctggaaggcgtttgagccggtgctgctgctgggcaagcagcgcttctccaacgtggacatccgcatccgcgtcaagggcggcggccaggtgtcccagatctacgccatccgccaggccatctccaagggcattgtggccttctaccagaagtacgtggatgagcagagcaagaacgagatcaaggacatcctgctgacctacgaccgcacgctgctggtggccgaccctcgccgctgcgagcccaagaagttcggtggccacggtgcccgcgcgcggtttcagaaatcttacaggt

SEQ ID NO: 4549 - DNA, 452 bp, Chlorella sorokiniana
  Clone ID: LIB3602-054-Q6-K1-H5
ggtgcctgcgacgcggtgcccgcggaatgctcgccctgggcgccagcagcagggccctgcagctctccaaaggcgtgcgcagccctcagcgaccatcgccagctaggcgcgggcgcttggcggtgcaggtgacggcggcggcccagcccgctggacccggcggcggcgccttcagcggccggcccgcattgcatgctgttctgctggaaatgaggctgtttggcggcacgcctacacctgaggcagttcaggcgatgctggaggaacagcgccagcttgaggccaaggaacagcacttgacggagcaggccgacggcctgcccagcaaggcgccacggcgtcaggagcggtccggcgccaaggcagcccgcaaactagcggcagacaatgcagcgctgcgtcaggagctggcgctcagcgcggcagcgctgcgccagcagcggtccgacgcc

SEQ ID NO: 4550 - DNA, 325 bp, Chlorella sorokiniana
  unsure (1)..(325): unsure at all n locations; Clone ID: LIB3602-054-Q6-K1-H6
gccatgtcttagtgtctgctgttacactcatacgcgcttcgtttatttggtacacacactggccatctgcagcagtattgtactgtatacagcatacgtacggcagcagcatgctgcaagcgatacaaaacttcctgtgtaaagtctctatgttaagtggacagcanaaaaaaaaaaaaaaaaaaacagaaaaaaaaaaaaaaaaaaaaaaagcaagaggggaataaaaagttgagcatggcggaggcggaggcagccgtggagagcggcagggggcacagcgccgcacagacgggtgcagctcgacgccagacggtggtgtgcg

SEQ ID NO: 4551 - DNA, 439 bp, Chlorella sorokiniana
  Clone ID: LIB3602-054-Q6-K1-H7
cggacgcgtgggcgggcgctgcggccggcagcgtgcagatcactgacctgggcagcacaaacggcacctttgtggacggcaaggagctgaaggccatggaggcggtgcccctcaaggtgggcggcgaggtggtgtttggagacgccaacctggccaccttccggctggacctgctgcccgactcgctgcccgcggcgccggccggcaccaaggaccctctggaggacaagcgcgtggacgactgcgaggccgacccgtcccagccagagtgccgggtgtacgatgaatgagcgagagccgcggtcctgcaaacactgcccctgcccactgcactgccactttgcgtcaccgcaccttcatcacaaagccagatggccagacaatgatgtagtttctgccacatgaagatcgcccccacccctgtaatgcatgtatcctt

SEQ ID NO: 4552 - DNA, 447 bp, Chlorella sorokiniana
  Clone ID: LIB3602-054-Q6-K1-H9
cgctgaagaaagtgcggtccgcagtggatgccgcgatgaagctggccggcgacggcgtgtactccctggtgactgtggccttcatccccggctggggcaagcacagccccacgggtgagggcaagatcctgcccgccatccaggacctgctggacagcctgggcattgatttcgagatgccgaacgccggcaagatccaggccctgttccctgcggacgcatactaaactaggctgaacggctcaccgacaaagcgtgagcccgagccgtgcgtcccgggcgcaggccggcgggcggcttgaatagcacccgcccgccggatggcagcctggccaccagcttttttgctgccctgtctttctgctccgagctgctttgcttcctgctccgacaagccagctgcacccctcctgcccctttccttgccttgcgcctgtcctttacatg

SEQ ID NO: 4553 - DNA, 85 bp, Chlorella sorokiniana
  Clone ID: LIB3602-055-Q6-K1-A1
gcgcagcagtacagctggtctgagcagcaggcgcagcaggcacagcagacgcaagcgcactttgccggtggaagccaaggctacc

SEQ ID NO: 4554 - DNA, 193 bp, Chlorella sorokiniana
  Clone ID: LIB3602-055-Q6-K1-A10
ggcaggcggagagcatgaccgagaaatggaggcagcggcgcccgctcaccctgggcggcctgctccccgcccggcgcctcgctttggccgcctctggccactcgtacgcctccttgtccatgcccttgtgcttcctgagctgcccaacctggcatgcaagcagcctggccgtctgtaatgccattggcgtgtg

SEQ ID NO: 4555 - DNA, 473 bp, Chlorella sorokiniana
  Clone ID: LIB3602-055-Q6-K1-A11
cgacccctcggattctaccttcacttttgtggtgcaggtgctcagttatcaccctgtgttggacactcaccccttgcttgctgcgcactggctgtacacaatccatgcccacagtgccgacagaaacaaaattacatgtgtggtaaacatttcatacgcgcaacctggccgtctgtaatgccattggcgtgtgaaaaaaaaaaaaaaatattaacaaaaaagaaaaaaaaaaaaaagggcggccgatataaaaaaaaccggggtggcctttttaaggatccaaagttaacatccgtgttatagcgaaatctaaattcttttaaagggccaccaaaataaaatgcatgggcgggggttaacatggtggtgacgggaaaaaccgtgttgtaaccaatctaatttgcttgggatgaaatacccttttcgacgcctggagaatatagaaataggcccagacggacagcctttacaaa

SEQ ID NO: 4556 - DNA, 97 bp, Chlorella sorokiniana
  Clone ID: LIB3602-055-Q6-K1-A12
aaaaaaaaaaaaaaaaaaaaaaaaaaaaaaaaaaaaaaaaaaaaaaaaaaaaaaaaaaaaaaaaaaaaaaaaaaaaaaagggaaaaaaaaaaaaagg

SEQ ID NO: 4557 - DNA, 326 bp, Chlorella sorokiniana
  Clone ID: LIB3602-055-Q6-K1-A2
gcgcgcgtaccggccgtgtgtgcatgcatcacatacttccatgctctgcttgcacgcatatggggctaggtagcggatggcgggtgatgctctgatgaaaggcaaccttcttaaaggtgtgtgtcgtgtggccttcagagctgcatgtgatgatagcttgggatggaagcccgcgcagagtaccccccggcgtgtgtagggcaaagtagctactgactggtgcaatcagaggctgctgctgagttcaacaaaggctgaagtacacttgcagctgactggcggctgctgcgaacagcgctacgccatcctgaaaggcttgaaaggca

SEQ ID NO: 4558 - DNA, 226 bp, Chlorella sorokiniana
  unsure (1)..(226): unsure at all n locations; Clone ID: LIB3602-055-Q6-K1-A3
ggcgccacggcacagcaccacgtgcggctgaagctgctgctgccctcagccacttcctctgttttccccgtcctcagttttccagttcttctggctttcagactttcagatgattgtgctttcatcctgtccctacgccacagcctgctgcctcgccactgctgctgaggcagtgagcctgctgtgctgcaacggccgacccttctgtaacgaacgacgcangctc

SEQ ID NO: 4559 - DNA, 63 bp, Chlorella sorokiniana; identical to SEQ ID NO: 961
  Clone ID: LIB3602-055-Q6-K1-A4

SEQ ID NO: 4560 - DNA, 332 bp, Chlorella sorokiniana
  Clone ID: LIB3602-055-Q6-K1-A5
accgcggtggctacgactcgtacggcagccgcggcggtggcggtggcggctacgaccgtggctatggcggcggcggcggcggctacgatcggggctacgaccgcgggtacgaccggggctacgatgatcgctaccggaggtattgagagtgacgtgtgtgccagcctggcgggcctgcacagctgcacagctcgcttgcgtgtgcacgcccgaccccagctgcacagtcgtgtgtgtttgcctttccgtgccacctgttgctgcactgtctgcatgcgcgtgatgatgccctgtgacgcctcgtgttgatacgcttacccacatgtaacatg

SEQ ID NO: 4561 - DNA, 481 bp, Chlorella sorokiniana
  Clone ID: LIB3602-055-Q6-K1-A6
acatgggcgtcttcctcaaggtgaacaaggcgaccatgaacatgctgcagcgggtggagccctacgtggcgtacggctaccccaacctgaagaccgtcaaggagctgatctacaagcgcggctttggcaaggtcaacaagcagcgcatcccgctcaccgacaactcggtgatcgagcaggtgctgggcgacaaggacatcatctgcgtggaggacctggtgcacgagatcttcaccgtgggccccaacttcaagcaggccaacaacttcctgtggcccttcaagctgtcctcccccaagggcggcatcgacaagaagcgcctgcactacatcgagggcggccaggccggcaaccgccaggagtacatcaacaacctggtgcgcgccatgaactgagcgctgagccggcgagcacagcgcagcgcgcgcagcacgcacagcgcggcgcgtgcagcagcctggacggagcggccccctgatgc

SEQ ID NO: 4562 - DNA, 346 bp, Chlorella sorokiniana
  Clone ID: LIB3602-055-Q6-K1-A7
cgcgtaccggccgcgtgtgcatgcagcgtgactcgggcctcgactccaagtacctgggccgcgtggccggctcccgcgtcatgctctgaggcggctggacctgccttgtgctctgaggcggctggacccgagtcgtgctctgaggcgcaccctgcgtcgtgctctgaggcgcactctgcgccgtgctctagaggcggctgacccatttgctcttgggcacgccgtctcctgctggcaccatgccctgcggcagcgggagcagcctgtggcgtggcggcttggaaccgtctgggcagctgcggcgcttgagatgcccaagctgttgacgcctggggagctgcatgcg

SEQ ID NO: 4563 - DNA, 380 bp, Chlorella sorokiniana
  Clone ID: LIB3602-055-Q6-K1-A8
aagccatttggtgtgtgcgcgcgcgtgggcatcggtcagatcctgctgtccatccgctgcaaggacacgcacgctgcggtggcggaggaggccctccgtcgtgccaagttcaagttccccgggcgccagaagatcgtggctagcaggaactggggcttcactccctacctgcgcgacgattacttggagtggaagcgtgagggccgccttgtgaacgacggtgtgaatgccaagctgcttggcaaccacggcccgctggacgcacgggagcccggccagattttcgagggtcctgcccgtctgtggcgtgtgccggtgcatgcctaacatgttgcttgggttctaaagatgtaacgaacatctgagcaagacaaagaaaa

SEQ ID NO: 4564 - DNA, 245 bp, Chlorella sorokiniana
  Clone ID: LIB3602-055-Q6-K1-A9
tggcgaggctggggcggcggcggcgccggcagagggtggggaggaggcggcaggagccaaggccgactgaggtcctggattgttgaactgtggggccagaaagcatcccatgcatggctgccccggcccctgcccaatgaatggtccctaaccttatgcatcatggtgtgttgaacatgaatcctgtccgttgtatgcgcacacgtctctccaccgcaaccaagccgcttggaaaaaaacaaaaa

SEQ ID NO: 4565 - DNA, 352 bp, Chlorella sorokiniana
  Clone ID: LIB3602-055-Q6-K1-B1
ctagcagcccccctgtatcatacctgcgtacgtgtgtgctttgcatctcctgttgagctgcatacccaaccctctcttgctccacctgcactgctgttgaggcactgcatcagagacgatcacttgacatgtcttccccggtgtttcattggtctggtgtgtttgcctgcactcaatcgcattttccatcagcgagcatttcccgtcggcgcttttcccctctgcatctatcggaaccaaccaaacatgcctccccatgatccatacccctgactactcccttgatacactgcccgtgaggctgctgttgcactggcaaacacgtgtcctcccctgtaatccagtgtgcctg

SEQ ID NO: 4566 - DNA, 477 bp, Chlorella sorokiniana
  Clone ID: LIB3602-055-Q6-K1-B10
catcgacctgctgcaccccccggcggagctggagaagcggaagcacaagctgaagcgcttggtagcctcccccaactcctacttcatggatgtgaagtgccagggctgcttcaccatcacgactgtgttcagccacagccagaccgtggtggtgtgccccagctgcaacaccgtgctgtgcgtgcccaccggtggcaaggcccgcctgaccgagggctgctccttccgccggaagggcgactgagcgcgcccccgctagcggcagtgttggcgctgggcagcggttattgtgatgtccacgggcagcccgtagcagcggcactcgcactcctctcttgttgggatggagcaacaccttgcacgggcgtcggaggagactgatcgcccacagtgaggagcacgcggccgggggcctccgcccctgcagccgcgtgtgaagagccacgagtatagcaccccgcgctgccaggcctcgcg

SEQ ID NO: 4567 - DNA, 442 bp, Chlorella sorokiniana
  Clone ID: LIB3602-055-Q6-K1-B11
cggacgcgtgggcggacgcgtgggaaaaaaaaaaaaaaaaaaaaacaaaaaaaaaacactaaaaaaaaaaaaaaaaggggctacttaatagaatgtgaagcgccacagctgcttcaccatcacgactgtgttgcggctcagtcagaccgtgccgttgtgccccacctgctacaccgcgctgtgcgttcccactggtggcaacgactttctgaccactggctgctccttccgacggaagggctactgaacaccccccctctagcagaattgttggctctggacatcttttattttgatgtacatcgccatatagtaaaaggggcactcccactcctcttttgttaagatggagcaactcattgcacgaacgtaagacgacactgatcgcccacatagacgagcacgcggccgggttcctccgcacctgtacctctctgttaag

SEQ ID NO: 4568 - DNA, 361 bp, Chlorella sorokiniana
  Clone ID: LIB3602-055-Q6-K1-B12
agtgatcttcccttgcctttccctgccctgtctgcgcctcccctctgagaaacgaacccaacgtcgcagttttttggctagcccacgctacgtatgcctcgcaccctgcccccctctgtgcattatctcagctcccggtactaaggggcaccgcccccatctgcctattctttcgccgccgccacccctcatggccccagttttcgcgcctcacaccgccacagcctctgtctgctgattagatttggatttgatccggccttgccaggcccatcccgctccgtctccgtttcctttgttactgctcttctgccagatttggttcgcccccttcatcacttggcatgtaaagcacgacatc

SEQ ID NO: 4569 - DNA, 269 bp, Chlorella sorokiniana
  Clone ID: LIB3602-055-Q6-K1-B2
gcgctggcagccatgctgtatcatacagtagtgcgtaagagcattgcatctcttgttgaactggatcactatgcatatctggcgctacatgcagtcaaggagcggctcatcgtcagagaccagcactcagcaagccttctgcggctgcacataagcatgggtgagaatgctgcactgaagcgtgagctccattagtctacatagccacccgaagctcttgatctgtgcatctaaggacacataacacacgtgcatcctgatgatccata

SEQ ID NO: 4570 - DNA, 448 bp, Chlorella sorokiniana
  unsure (1)..(448): unsure at all n locations; Clone ID: LIB3602-055-Q6-K1-B3
cctagttggcgcggtggagtgggcaattcgttcgcgatggtgaacgtcccgaagaccaagaaggccttctgcaagggcaaggagtgccgcaagcacaccatgcacaaggtcactcagtacaagaccggcaaggcgtcgctctacgcgcagggcaagcggcgttacgaccgcaagcagtccggctatggtggccagaccaagcccgtgttccacaagaaggccaagaccaccaagaagattgtgctgcgtctggcctgcaccgtgtgcaaggcccagcacatgcacgccatcaagcgctgcaagcacttcgagatcggcggcgacaagaaggtcaaggggctatactagtaaaaaaaaggagagcggcaggcggagagcatgaccgagaaatggaggcagcggcgcccgctcaccctgggcggnctgctccccgcccggcgcctcgctt

SEQ ID NO: 4571 - DNA, 447 bp, Chlorella sorokiniana
  unsure (1)..(447): unsure at all n locations; Clone ID: LIB3602-055-Q6-K1-B4
ggacccgcagcagtaccaccagctgtatggccaggccagcgcggaggcctgaggcgacagagaccgccagcttggctcagctagggccggccggcgcgcccctgcacgtgtgcgccacaatgtcgtttgtatcatctatgggtcatctgcacgctgccctgctctgcttttccttttcttcctgcctgccctgcttccctgcctgccctgctcagcttccctgcctgccccgccttgcttccctgcctgcccctgcatacgtgtgcctgtgtggtggctctggacatgccacgccatgcctgcacagccatttgacagtgtgtaacaatagtggatcaaanaaaaaaaaaaaaaaaaaaaaaggggngncgataataaaagaatacaaaattcggtacgcgttcatgcgacgccatagcttactctatggtgcgccctaaataaaat

SEQ ID NO: 4572 - DNA, 341 bp, Chlorella sorokiniana
  Clone ID: LIB3602-055-Q6-K1-B5
ggaacaagggcatgattacagcctttgcaaccagagtacaggggtcagggacatgtttacattttgacagttacaacccattacgcaggggggacggggccttaacgcccgtactgggccgaatgttgccgccgccagcctgtgttgcccccccttgggccccccgttgttgttgcatttgttgcacctgggaggccaaccccttgccagcggtgttcattctggaaaacagcttgcctgtttgctccttgaaactgccctgttgccgaatgcggttgccgtctttggggctgccaaccctatccttctgagggctggtggcggcccttttaaaggatcca

SEQ ID NO: 4573 - DNA, 449 bp, Chlorella sorokiniana
  unsure (1)..(449): unsure at all n locations; Clone ID: LIB3602-055-Q6-K1-B6
cggacgcgtgggggctgctgtggccttctacgacggcaccgccgccctgatgaaggatgtgtacggcaagcagatcctgcccgtgttccccctgaagcccgtcaacaaggtcagcctgggtgacttcggcaccaagcgctttgtggacgccgagaagcaggccgcgtaaatgcgcgctgctgcgccatgcgtgcccttgctgcttgcggcgctcggccctcgggcctgcgctgctgaaacccaaccccctctgcctctttacttgcaaacccacgacccgcttccctgaatttggtgccctcacttcttgcttgcgtcggatacatacccagtccgcccaaattttcacggtgcgccgcccatgttgcccacacgccctccggactttcgttgcctgcccgctgccctggccgtgacattttccccttgttaagcccagcagcgnanaa

SEQ ID NO: 4574 - DNA, 337 bp, Chlorella sorokiniana
  Clone ID: LIB3602-055-Q6-K1-B7
ggcagatggtgcagaggaggaggcagcggcagacagcgaggcagagtggaccgtggtcagcggtgctgaaattgaggacgatgaagaggaggaggaggaggcaaccgagtcggccaaggcagagggaggggcagaggcagaggcaggaagcggcagcgacgctgagcccatggccgcgtgagcgccttgctaccaccagcactggccaacagcccgctgagcagatgaggagggctgcatgcttgtgcttacaggacacgatcgagcataacaactttcatcttggaggagcgtatggtgttttatagtagtccaggcaaattgtgccgcgcaacgc

SEQ ID NO: 4575 - DNA, 401 bp, Chlorella sorokiniana
  Clone ID: LIB3602-055-Q6-K1-B8
ggcaagggactctgaggagaacgaggcccgcgccgcagcagcagccttcccaggagcatctccctcgccggcagcagcatcgcccgccaatggcgccggccccagccgcagcgctgaggaagggcagggcagcggcaatggcagcagcagcagcgccgcggcgcaagaatgagcgaggcgcgctggccggcgggcggggcggcacagcatgtgagcccatccatcgctggatgcatagagcatgtgtaggcagcgctgcacccggccagccccctaaacgcagcaaactgatagcttggctcccattgtacttccagttctgaccactgggcgtgcccactcctgcagcatgcctcgttgcacagtctgtgtgtcaattccaccctctcctgagcattgat

SEQ ID NO: 4576 - DNA, 475 bp, Chlorella sorokiniana
  Clone ID: LIB3602-055-Q6-K1-B9
gtgcattatatgcagggacggctgcggctgcgcgctgtgaaacgagctgctgcgacgcacgcacccaggagcacatggtggatggcgcaccgtgtaagaaggacgggcaccaacctgctgcaagaaggtgatgcaccacagtttggtgcgcgcccataacgcctgcctgtggagtgactaaccctacatgttgttggcagataactgcagctagactgtctacactaatgtcgacatgaagggctccacgatcaccagctcggacagcaagaagagcacctacctccggacccgtgtgaggaggccaaacaacatcattgagtaacctgcgagctgtccggcttagagttgcaaggcagcgatccacactatgatacccagcagctgcaagcttacaatcctatgatgctgttatgcacatcccgctgatagatggtgcatgcactgcctgtcaaatctttggcatgtagctcaa

SEQ ID NO: 4577 - DNA, 386 bp, Chlorella sorokiniana
  unsure (1)..(386): unsure at all n locations; Clone ID: LIB3602-055-Q6-K1-C1
cacctcaccacgctgtgcgcaggcggtgctgggcacgctgggcgtgcgcgctgagtacaccaccaccaaccacatcatggaggtgcagcagttcctgggcatcgaggcggcgcgcaagacgattgtggacgagatccagaccacgatgaaagcgcacggcatgaccatcgacgaccgccacatgatgctgctggccgactgcatgacctacaagggcgaggtgctgggcatcactcgcttcggcattgccaagatgaaggacagcgtgctcatgctggcgtcgtttgagaagacgaccgaccacttgttcgacgccgcgctgcaccggcgaagggacaacataaatggcgttctgagagcatcattatgggcatncccatgccaac

SEQ ID NO: 4578 - DNA, 473 bp, Chlorella sorokiniana
  unsure (1)..(473): unsure at all n locations; Clone ID: LIB3602-055-Q6-K1-C10
ggctgctgctgcgcagtagcggcctggcggcagcaggcggctgaacagcggcgccggcgctcgcctgctctctgaggagcaagcccgctgccccggctgtgcagcccgctgactcgcactaacggcctcgtggcctagtgcagcccatgcggcgctgcctcaacccccttgtgcttttatgctgaactctgtagggaggtggcagaggctgtcgccgctgcaacacgcggtgcataccctacgctcacgtccacttgcttactctgcatgcatcccggacggacggccgcccttccncagggcgcgccgctgtaggcctgcgcacgaatcgcgctcccggcgcttgctgccgctgccgcgctccgcgccctggccccccttgccgtgtcctgccgaaccgcactccagcactgcatcgctcgtggcaattcagaacctgttgtgcattcctcccccggccattcctcacgatt

SEQ ID NO: 4579 - DNA, 286 bp, Chlorella sorokiniana
  Clone ID: LIB3602-055-Q6-K1-C11
aaaaaaagaaaaaaggcttaaaaaaaaaaaatcccttggggatgtattccaagagcaaaaaaaactgggggggaaaaaaaccaaaccgtttggtttaaaaaaccaccccgtgaaaaaaactaaataaatcccaaaacaaccccagggggggttaaaacgctccatctttaatggggttaaaaaaaaagggaaccctttaaagcccggcccaaccaaaaacgtatttaaagcttaaaaaaacttggcccttgttaaaaaaaaaaaacaccccagggggggcaagggt

SEQ ID NO: 4580 - DNA, 477 bp, Chlorella sorokiniana
  Clone ID: LIB3602-055-Q6-K1-C12
ctcatcggcatgggctccgaagccgacctgcactcccccgcctttgcgggacaggtgctgcgcactaagtcgaccacctaccagaccgcggagctgatgcccacggtggtgcaggaggtggatgtgcagctgcaggcggcgggccgctgggacgtgtactgccaggtgcacgaccactacacggccggcatgcgggcaacgctggtggtcactgatgcttgatgacaggccagccccgcagcagcagcagccgcagcaacagcaacagcagcagtcgcgggccccaccgggctcgcagcctcctagcagcaacccatccccccatgcatttttcctgtgccggtgcctgcacatggtggcttgccgccacacccccaaacccttggcacgtgcttttgctcgctcctttcgctcccctttgttcgtccttttgcattcatactcctttctaccctacacagcaccccgcagtgccaa

SEQ ID NO: 4581 - DNA, 393 bp, Chlorella sorokiniana
  Clone ID: LIB3602-055-Q6-K1-C3
aatggatacaccttcctggtggtagcggacgagcagtttgggcggcaaataccctttgccttcctggagaaggtgcgggaggagtggcagcagaagtgggcagagaagggccccgcggcggcggcgcactcgctggacaagtcgttcggcccgcgactcaagtactggatggagtactgcgagcagcacctcgaggagctgtccaaggtggcctcggtgcagaagaaggtggatgaggtcaagaacatcatggtggacaacattgagaaggtgctggagcggggtgagaagatcgagctgctggtggacaagaccgacaacctgcggttccaggcggacaagttccacaagacggggcggcagctgcgcagccgcatgtggtggcagaacatg

SEQ ID NO: 4582 - DNA, 479 bp, Chlorella sorokiniana
  Clone ID: LIB3602-055-Q6-K1-C4
cgttatcgtcgcgccccccgtggtcggcggctggggctttggcggctttggcctgcccttcttccccggctttggcgtgtaccccgtgtttgggtttggcctctccaccatcttctccctcatggtgttcatgttcctgctcaacgtggtgatcggcgtggtgcagggcttcaccaaccagaagaagaagagcgagttcagcgacgacgactggtaaacagccggccgctcgtaacggctgtggcgccccgttgccggcagcttggttaggttccaacccttccgactgcctgcgctggcgcgagccatcggccagcttggtgcctcgccctgtgggctcctctgaccacctttcagcccaggggaggcacggtagtaggtagacctcccctgcacacactcccggcattttgtgtgtgggcagggagcgtgtcctaactatcacccgcgtctcgtctaacaaagaccaaagcgtgccg

SEQ ID NO: 4583 - DNA, 477 bp, Chlorella sorokiniana
  Clone ID: LIB3602-055-Q6-K1-C5
gacggcactgtgtacgccactgcacgggccctgtttgtggcgcccaagccgaccaaggcgctcgtggacattggcaagtacctgctgcgccgcgtgacgggcgacatctgatgaacagtagatccgcgcaccgcacagcggacagcctggatacgtcctttccattccacaagcgcctggcggtcagatggtccctcgaattagaccagctcttcctcacccgcccatatgcctccccaaatacgcacattttgttctgcatacccttcacttctttcgttgacgcaccaccccttcatgccgagccgccccgcgccgctcattgatagccctgctggcgggcggggcttccctcccccagctaaccctcccctcccatgacacacctgcccagcactgccctttgttctctgtcctaccccgtcgtgtgcacgccccagcccctagttggaaagccgtatgccatgcccatgcatg

SEQ ID NO: 4584 - DNA, 478 bp, Chlorella sorokiniana
  Clone ID: LIB3602-055-Q6-K1-C6
cgagtttccccggacaagagcgaggatgccgttcgccaggcaggtctccatcgggcgcgtggcgctcgtccagtacccggaggcggaggccggcaagctggtggtgattagcgatgtggtcagccccaacgcggccctggtggacttccccggccagacgcggcgcgtgatcagcttcaagcggctggcactcaccgacttcacggtggacatcccccgcctcgccaagaaggcggtgctgaagaaggcgctggaggaggcggaggttgaggccaagttcgccaagagcgcgtggggccagaagctggccaagcgcgcggccaaggcggcgacgaccgactttgaccgctacaaggcggcggtgcagaagatgaagcgcagcgcgcaggtgcgccgcgccttcaactcgctgaagaaggccgccaagtgagcggagctcctcgcagccgcagcagccgcccaattcattgcgcccggc

SEQ ID NO: 4585 - DNA, 224 bp, Chlorella sorokiniana
  Clone ID: LIB3602-055-Q6-K1-C7
gaaaaaaaaaaaaacaaaaaaaaaatacctaaaacaaaaaaaaatactaaaacacaaatactaaaacatgggtttttttagccgggggctttccaaattaagattttatctcccaacccacccttttaacttttatagcctgactaaactctacatatccaccttttttttattcacttaattcactttacacctcttcccttttaccaaatagttcttaacca

SEQ ID NO: 4586 - DNA, 374 bp, Chlorella sorokiniana
  Clone ID: LIB3602-055-Q6-K1-C8
gcgccgccaggctgtggatgtgtcgccgctgcgccgcgtgaaccaggccatctggctgatcaccaccggcgcgcgcgagagcgcgttccgcaacatcaagaccattgcggagtgcctggcggacgagctgatcaacgcggccaagggcagctccaacagctacgccatcaagaagaaggacaagatcaaccgcttggccaaggccaaccggtaaacggttgtggcgcacccaccaaaacagaagcccgccaaggcgggacccctgggcaggatgccagaccgccagtgcagcagcacggtgtggttcaactgctgttatcgtggcaggctttccaattaggcgcgggtgttaggattgtgtaacacagcgcacc

SEQ ID NO: 4587 - DNA, 264 bp, Chlorella sorokiniana
  unsure (1)..(264): unsure at all n locations; Clone ID: LIB3602-055-Q6-K1-C9
ctttgaaggcaacatgtccagcacccgctgcctggctctccagctgccaaagcacgccattgcgttctgcgccgagagagagataaatgccactgattagtagcagcagctcacacagcctgctgcccagggttttactcccggctgcagtgttcattacgttgtgtcttcccgcaccagcagggggcagcctgagccgccttgctgggcgacacagagctgtgtcaagctaaagagaggggnnaaaaaannanaaannnnnaa

SEQ ID NO: 4588 - DNA, 479 bp, Chlorella sorokiniana
  Clone ID: LIB3602-055-Q6-K1-D10
aaaaaaaaaaaaaaaaaaaaaaaaaaaaaaaaaaaaaaaaaaaaaaaaaaaaaaaaaaaaaaaaaaaaaaaaaaaaaagggggcaatatataaaaatggaagcatgttctcaggggccggcttttttcaaggttccatttcctctttcccccgtttttccttcattttccttcttttttttttcccccccatttctttgcattgcccttctttttccccccttgtcttttgaaaaccccttccctttcccattttattgtttttgaccactttccccttttcccatgctgccttctttcctaatggccccctacttttgccctttcccactccttgccaccttcattggataatggccctcccctttttccggcccatctaccacacccatttgttagctctcctgcggggggccctttacctttttcacctctttttctcccgttttttcctctttttccctttccttttttgccccg

SEQ ID NO: 4589 - DNA, 419 bp, Chlorella sorokiniana
  unsure (1)..(419): unsure at all n locations; Clone ID: LIB3602-055-Q6-K1-D11
gtcggatgtgaacggccccgacgcgctgccgctgtttggctacctcaagtcggcgcagggcggcctgctgaccggtgacatcaagtggaacttcaccaagttcctggttgaccgcagcggcaacgtggtcaagcgctacggcagcaccaccagccccatgcagattgagagcgacatcaagggcctgctctgagcggtgtgagggcaggtgccagccgctgctgggaccgctgtgctgggcaacaggccgtgcacccgacagccgccacagttggcggctgcgctttgctgccgcaccttgtgtgctcgccccgatttgaatgtaccctggacccacccccacgccatttgattgattcctgtcagactgtctgccaaacttgaggagctgattgctgtgtgacaactagcagcttana

SEQ ID NO: 4590 - DNA, 477 bp, Chlorella sorokiniana
  Clone ID: LIB3602-055-Q6-K1-D12
aggacacgtgggcggacgcgtgggaaaaaaaatatacaaaacatgttcgacctgaccgagggcatggtgcgcgtcgtggacaatgacgaccacatcggccccttcaacattggcaaccctggcgagttcaccatgattgagctggcggagatggtgaagaaggtggtcaaccccaaggctgagctggtgtttgtggagaacacggcggacgacccgtcgcggtgcaagcccgacatcaccaatgccaagacgctgctgggctggcagcccaagatcaagctggaggaggggctgaacatgatggtggaggacttccggcggcggctgcacattgatgaggagacgtccaacggtgtcaaggcgtgaggtcttggcacgcccaggcgctttctctcggcccccgacgtcccactatcagtctctcttgctttctccagctctcacttgtgacccctgccggtgccgacccgcctgcaa

SEQ ID NO: 4591 - DNA, 399 bp, Chlorella sorokiniana
  unsure (1)..(399): unsure at all n locations; Clone ID: LIB3602-055-Q6-K1-D2
ggcctgctctgcggcccttcatacctttgtacctttctgtatcatcttgcagcaatggcagccggctgcatctttctgacatcgtcaccggcccactcgtttgtgccatgcccacctgcctccaacgtcacccttcatcaaccctcacccaacccatccacctgccacccatccactcaccttccctccgccacaacctctgccacccactcaccacccatcacccgctcaacgccctccatgcaccatccttcccattcaccaaatctggcaccccaaacgcacgttcggcggtggaccacctggcggccccttacccggacccatttttcacccggcacctttnctggcggtcaccggcggacattctaccttccacacctnacttcatgttcaccc

SEQ ID NO: 4592 - DNA, 476 bp, Chlorella sorokiniana
  Clone ID: LIB3602-055-Q6-K1-D4
agcggagcagggagcaagcgccatggctcccgcagacaagagcaaggccgccaaggccgccaaggcggtcaagaagagctccttcaagaagacgaagaagccccgctacagcgtggtgttccaccgccccaagaccctcgttcgcagccgggaccccaagttcccccgcgtcagcgcgccccgccaggcccgcctggatgagcactccgtgatcaagtaccccctgaccactgagtccgccatgaagaagattgaggacaacaacaccctggtcttcatcgtggacgtgcgcgccgacaagaaggcgatcaagaaggctgtggcccgcctgtacgacatccagaccaagaagatcaacaccctcatccggcccgacggccagaagaaggcgtacgtgcggctgaccgccgactacgatgcgctggatgtggccaacaagattggcgtgatctaaagcgtgcggctggagcggggcg

SEQ ID NO: 4593 - DNA, 470 bp, Chlorella sorokiniana
  Clone ID: LIB3602-055-Q6-K1-D5
cccccccccttttttttttttttttttttttttttttcagaacccactcattgcagtcattttgtaacataaaccgggttggatggtgctggcatgatagacagggcaggccaggcctggcatggctgcatggctgcaaccgcagcggcattcacttgtggctgcggctgctgtcgcatgccggctgtgatttccttctaaggctgccgcgctgaaggctgccacgctactgctagacttactgctgcaccggctcgccctcctgctggggctgattctgctgctccagtacctgccccgattccatcaccaccactcggccgcagctggcaatggtggcctgccggtgagccacctccatgatggttgccccgggaagctcgcgccggatgacctcttgcatcaaatcggctgttgcggagtccactcatgacgtggcttagtccagcaacagcaggtgcggggcacgc

SEQ ID NO: 4594 - DNA, 476 bp, Chlorella sorokiniana
  Clone ID: LIB3602-055-Q6-K1-D6
cgcctccatgcagctgattcgcagaggattctttcctcggggccagggccaagtgcagctaacagtagagcggctggctcccggcgcctgcctgcccgcaatagacctcacagagcgaggggagatcatgtcgattgctattcgtgcgttcaccgccggccgagtggtgccgtcagtgggtgagcggctggcagatgcggcactcaaagctgtcaaggcgcgcctgccgcgctgcggcgtgccacgctctgtgcccatcacgtgcgacggggtgcatgagccgccagagcgggcattctcagatggctgcggcctgctggtcaccgcagagagctccacgggctgcctgtggggcgcctcaaggctgggcgagcgaggggtgcgggcagaggacattggccaacgggcagccgatgagctgatggatgcgctggaagtgggcgcctgcacagacgagtggctgcaagaccagctga

SEQ ID NO: 4595 - DNA, 430 bp, Chlorella sorokiniana
  Clone ID: LIB3602-055-Q6-K1-D8
ggcgtgcccatgcactgcagctcacaccacccctaatgcacgtctgtccacccgccctcccgcccccactgcaatagccggctgcgattgcgcccatgtttcatgccggccgccccaacccacacacctcatccccctcccgttgtgtcccctgccagctgaggcccgctgctcggcccgtttttgcccaactttcttcgcatttggcgccgcagcgctgccgctgccgccgcgccccaaccaaccgcttttgcccgcgcgccgggccaccaatcaatcctaccactgccggccctgccggcatctgagcgccgcctgttttcgtcgcgagagaggctgccgctgcaggcccctgcagcgcacacgccgagagttctcagcttttcatgtgcccttcgcttttgtccccatccctgctcctgtgccctga

SEQ ID NO: 4596 - DNA, 376 bp, Chlorella sorokiniana
  Clone ID: LIB3602-055-Q6-K1-D9
gcttcagcagccaggcggcggtgcagggcaagggccccatcgagtgcctgcaggcgcacctggccgaccccggccacaacaacatcttcacctcgtctgtgggcaacgaggccctggctgccgtgctggtgctgtccatcaccccctgcctgatcgaggccaagaaccgcctgcagggcaccgacgaggaggagttccgccccctgccctggtaagcgtctggcactgcggccccggctcggctagccgctgaccggtgacgcggcggcgcgcggcagcggcgacggggcgctgggggcgcccgctccctgccgctgtatgcttgctgtacttccgagcgagaaaatttccaccaccgtcatttgtggaatctatg

SEQ ID NO: 4597 - DNA, 447 bp, Chlorella sorokiniana
  Clone ID: LIB3602-055-Q6-K1-E10
gcacgcgggggtgcttatccaggtgtacgagggtgagcgcgcgcagactctcaaaacagcatcatggaacagcggggcgagcataaatacaaatgttgcaaggcacacatcctagctatcaatagaggcatgccacataagccacctaggctattgcctagcgctagcactccggcatggctcggccattttacttgccaaacctccaccagctattattgttgaactcttcagtgtaatctccttacttgcctgccatattatgtgtcgaagacttattcagccgacacgacgagtccgcccacggtgccggccatgaactcagtgaccaactacgccttcaccccgcccatgatcgactgcgacattgacatctgtatcataatctatgaagctcctaaagccattctcgataatctcgtcaaacacactctagactgtctggct

SEQ ID NO: 4598 - DNA, 478 bp, Chlorella sorokiniana
  Clone ID: LIB3602-055-Q6-K1-E11
atcggcaacgtgaagccggtgggtgacatgcccgagggtaccatcatctgcaacgtggaggagaaggcgggcgaccgcggcagcctggcgcgctgctctggcgactacgccatcatcgtggcccacaaccccgacgccggcatcacccgcatcaagctgcccagcggctccaagaaggtgatcagcagcgagtgccgcgcgaccgtgggccaggtgtctggcggcggccgtaccgagaagccgatgctcaaggcgggccgcagctaccacaagttccgcgtgaagcgcaacagctggcccaaggtgcgtggtgtggccatgaaccccgtggagcatccccacggtggtggtaaccaccagcacattggccacgcgtccaccgtgcgccgcgacgcgccccccggccagaaggtcggactcatcgccgcccgccggacaggccgcatccgcggtaccgccatggtcaagcccgacaagg

SEQ ID NO: 4599 - DNA, 458 bp, Chlorella sorokiniana
  Clone ID: LIB3602-055-Q6-K1-E12
gatcaagttcctctcgctcatgatgaagcacggctacatcggcgagtttgagtttgtggacaaccaccgctcgggcaagattgtggtggagctgaacggccgcctgaacaagtgcggcgcgatctcgccccgctacgacattgcggccaaggacattgaggcgtgggtgggccgcctgctgccctcccgccagttcggccacatcatcctgaccacctcccagggcatcatggaccacgaggaggccaggcggaagaaggtgggaggcaaggtcctcggcttcttctactgagcggccttgttggatgcgccgcagcagccacggtggaccacagccgtggcggatgcagcacggccggcgcgcccggccgcggtgtttgctgcagcaccggcggcagccctgggtgctgcccccctcttagattgctgcaccgcacggttgtaacagaggttacatg

SEQ ID NO: 4600 - DNA, 245 bp, Chlorella sorokiniana
  Clone ID: LIB3602-055-Q6-K1-E2
aaaaaaaaaaaaaaaaaaaaaaaaaaaaaaaaaaaaaaaaaaaaaaaaaaaaatgaaaaacaatataaaaaaatacaagggggggtacacttacatgacgaagtaataactcttctataaagtgggcctggccttttattaagtccccatttttttacaccgttcttgactggaaaaaccttttttttacccaacttaatcttaattcagttcactccctttttaaacaggtggcattataaaaa

SEQ ID NO: 4601 - DNA, 302 bp, Chlorella sorokiniana
  unsure (1)..(302): unsure at all n locations; Clone ID: LIB3602-055-Q6-K1-E3
gcggcgagcaacaggcaaccatgccgtcccagaagcgcttcgccatcaagaagaagctggccaagaaggccaagcagaaccggcccatccctccttggatccggttccgcaccaacaacaccatccgctacaacgccaagcgccgccactggcgccgcaccaagctgggcatctaagcgcctcccacgaggagcagctgacggcagcagccccggcacggcaggcagtgcgctggccgcgcttgcaaggcagcccgtcagtggcatgatgacagcttaagcttgtaacgatggcctagcana

SEQ ID NO: 4602 - DNA, 479 bp, Chlorella sorokiniana
  Clone ID: LIB3602-055-Q6-K1-E4
gaccatgtttggcgacggcaagcagacgcggtctttccagtacgtgtccgacctgatcgagggcatggtgcgcgtgatggacaatgacgaccacatcggccccttcaacattggcaaccctggcgagttcaccatgattgagctggcggagatggtgaagaaggtggtcaaccccaaggctgagctggtgtttgtggagaacacggcggacgacccgtcgcggcgcaagcccgacatcaccaaggccaagacgctgctgggctggcagcccaagatcaagctggaggaggggctgaacatgatggtggaggacttccggcggcggctgcacattgatgaggagacgtccaacggtgtcaaggcgtgaggccttggcacgcccaggcgcttcctctcggcccccgacgtcccactatcagtctctcttgctttctccagctctcacttgtgacccctgccgctgccgacccgcctgcaat

SEQ ID NO: 4603 - DNA, 476 bp, Chlorella sorokiniana
  Clone ID: LIB3602-055-Q6-K1-E5
cggacgcgtgggttttttttttgtcgcagtgttatattaccggtgaaagctagaaaaatggcagcatggaacagcgtggtgagcataaatacaaatgttgcaaggcacaccccctagcttccgcagaggcatgcccagaagccaggtggctagtgcctgcgctggcactccggcatggctcggccattttacttgccaaacctccaccagctcttcttgttgaactcgtcagtgtaatctccgtacttggctgccatcttctgtgtcgtggacttgttcagccgggacgacgagtacgccgccgtgccggggctgtgcgcagtgacgccgtgcgcctgccgcccgccaatgctcgactgcagcttgttcatctgtatctgagcctctgagggccgtgagccattctcgttgctctcgtcaaacgcctcaaagtcgttctggcgtgggtagatgcacagccgcagcacgatggccac

SEQ ID NO: 4604 - DNA, 169 bp, Chlorella sorokiniana
  Clone ID: LIB3602-055-Q6-K1-E6
cgtttctgttcccttgctcttccgcccctcgttgctacagaggggccggcccaactccggctttcatttgtctcgcccccctcggtgctaagctagaaccgctccgtgcagcacccgctgccccaaccctctgaacctccacgcccccacactggtaactgacgaagcc

SEQ ID NO: 4605 - DNA, 469 bp, Chlorella sorokiniana
  unsure (1)..(469): unsure at all n locations; Clone ID: LIB3602-055-Q6-K1-E8
gctggtggcgcaccttgcttgctttgatgcttgcttcgggggcctaggcaccctcccatgcaacacatgaacccccaccacccctgccaacccaagtcttagcctgtgtttgcgcgcggtgaaggcaatgagaagaacagacccttgtaccctgcctcgctgctgcgtttttgctgcaagacatgagcctaaaaaaaaaaaaaaaaaaaaaaaaaaaaaaaaaaaaaaaaaaaaaaaaaaaaaaaaaaaagaaaaaagcatgatggcaaaaaaaaaatngnnnctatggacgagaggggcgcccctttttaagggatccaatctaaatacacctgcgttttgcaaattgaacaccttttttaacaacggcgcaaatttaaaaaaactggccttttttaaaaaactggagaatggaaaaaccctggttttaaaaaatttaaaaactttaagacgctcgctttttcaaaaa

SEQ ID NO: 4606 - DNA, 477 bp, Chlorella sorokiniana
  Clone ID: LIB3602-055-Q6-K1-E9
ccagcccgccgtgctcatccaggtgtacgagggtgagcgcgcgcagacgcgccacaacaacctgctgggcaagttcgagctgacgggcatcccgcccgcgccccgcggcatcccccagatcaatgtcgcattcgacatcgatgccaacggcatcctgaacgtgactgccgaggaccgcaccacgggcaagaagaacaagatcaccatcaccaacgacaagggccgcctcagcaaggaggacattgagcgcatggtgcaggacgcggagaagtacaaggcggaggacgaggcggcgcggcgcaaggtggaggccaagaactcgctggagaactacgccttcagcgtgcgcaacacgctgcaggacagcaacgtggcggacaaaattgatgaggctgataagtctaagctcgagaatctggtcaaggagacgcttgagtggctggatgccaaccagctggccgaggaggaggagtttga

SEQ ID NO: 4607 - DNA, 481 bp, Chlorella sorokiniana
  Clone ID: LIB3602-055-Q6-K1-F1
ctcgctgggagcgccataggcggcggccgtcgctgcaaaaccgtcgagtgaccggccggccagggttgtagcccaggcggctcaaggggcgatggccctgcgttctagggcgctgcaggcgctggccgcgcacgcgcgcgccttctccacacagacggagattgcggtggtcagcggcctgccgccgctggatgtggggcgcaaggtgatcatctactcacctgcccgcaccgccggccagcagggcatctcccagactgccattggcggcggcccggcgtggaaggtgcagcacgagaacaagggcaagtggatcaacccgctgattgggtggaccagcaccgccgacccgctggagaacgtggcgcgccagctgtacttccccaccaaggaggacgccatcgcttttgcggagaagaacgggttcacatacgaggtgcaggagtaccacaacccctcgggccagcggccaaagcgcttc

SEQ ID NO: 4608 - DNA, 475 bp, Chlorella sorokiniana
  Clone ID: LIB3602-055-Q6-K1-F10
agggcctcggccctgtctgctacccacctgctccctgccaggctcgttgctttgcacccccgcctgcctcggtatgcaccctcccttcctgggccctggcccagtcgcacaaccccccacctgggcccttggccctgtttgctttgaccccgctcgctgccgcactgcggcgcaccatgctccttccccacaccgaccctgcaccttggccctcgtattgctgccgtccgtcgcctgccgtgccccgccagcccgcctcatggggcgctccatgcagctcacatccccctggcaggctggctgagcacttaggctagacagcagctgcccgttggcctccctgcacccggttttgctcccttcttgcttccacaacccgcttgcagcaacgttgctcgtgcactgctcccagcagccggtggtgctcaacgatggggtcacccggacacccgacctccgctgttgttgtttcatt

SEQ ID NO: 4609 - DNA, 239 bp, Chlorella sorokiniana
  Clone ID: LIB3602-055-Q6-K1-F11
aaaaaaaaaaaaaaaaaaaaaaaaaaaactaataaataaaaaaaaaaaataataaaaaaaaaaaaactaactaaaaaggggcctttttttactggaaacctgaacccatccctccgccccccacctggtcccttggaccctgtgttgatttcactggcggtccctgcctttatgcggctcaccatgtgtccttccccacgccgaccctgaactttttcacttggcccgctaccctcctt

SEQ ID NO: 4610 - DNA, 382 bp, Chlorella sorokiniana
  Clone ID: LIB3602-055-Q6-K1-F12
gaaacgatgatattttcaggggggcggcaatgtaatagctgctgttcgggagctggtctgacttgcaggcccagccaggactaactgtggttgcacagtaccatcaaattgaggggtgcatatccagacggctccgcacatgtggcacgtgacgcaaatcatcaaatcggatcaaaggcaggactgcttccaagcaattcattcaaccgcatccaacacattagtactggtccacgctgttgtccaccctgcctgctgcactgctgcctgccgcactgctgttgcctgcgggctgcccccgcggcggcggcacgggcgccccgcctgccggcagcaggctgaggcccttgaagtatcccgcagaggtgcgctccgcatcggg

SEQ ID NO: 4611 - DNA, 441 bp, Chlorella sorokiniana
  Clone ID: LIB3602-055-Q6-K1-F2
gtgcatgcctgctacaccggcgagggcgccctgtgctccctcaacaagttcgccaacggcttctaagcagcccggcgtgactacgggctgggcctagcgcccggccgctttgcagccacttgcagccggcccctttgcggggccacccacacccaacaccactttcatgagaagattaacaccctgccatcgatcccttgctacgcctaccacgtccgtgcgctctctgcatcggtcgttctgtttgcctgcggacgcgcttgctcccgggcgccccgcagattttgcatctgctcgctcgtgtgctgtcaggagtcagcggttgtatgatttcctgttgtaattcgtaacgttcaaaaacgtggcgcgccagctgtacttccccaccaaggaggacgccatcgcttttgcggagaagaacaaggggcggtccttttagag

SEQ ID NO: 4612 - DNA, 446 bp, Chlorella sorokiniana
  Clone ID: LIB3602-055-Q6-K1-F3
gaagggggcctgagcgtgctgctgccatccgggcaggggctggagcttgtgagcactgcccccgcggtgcagctgtagcgcccctggtacctgcctgctgtgggcaggctggcacgccagcgcatgcgctgccaccagggtggcgcagcaagcagccctgctgccatcatgcatccctgtgtttctgtgctgtaccatagccggggagcatgctaccgcccatgcgcctctctgcaattgcctcagctgtccagtcgcatgctcgtgttgtaccattcacacccttcttactgctaccatcgttcgttctcccaactaacacgtttctacaccgcaccgtaaaccttggctctgcttgttgtgtatatctggaatgctacccctgctttgcaacctcacctgattgtctgcctcttcaatataagctgcctgctgtaatggatttc

SEQ ID NO: 4613 - DNA, 479 bp, Chlorella sorokiniana
  Clone ID: LIB3602-055-Q6-K1-F4
gggaggcaggggggccacccgaggaggagctcacccctgagcagctggctgagaagcgagcaaaggaggaggaggagcggcgggcgcgcatccaggccgcgctgcgggcgcaggaggaggagaaccggcggctggccgtggagcgcaagcgcaagctggatgaggaggccaaaaagaagctggcgcgcgaggaggccaagcggcgcatgatggacacccagattgagctgatgcgcaagcgaattgaggagatggaggcccgcaagaagcgcaagctggacagcggcggcgggagtgctgcagagcctgccgccagcggcggcgagggcggcgcagctggcggcggcggcggcggctcggctgcgctatctgcaggcggccaagggggcccaactgcctctggcggcgcggcttccagcgagccagcagcggtcagcagcggcggcggtgctttggccggcggcgagggtggtgacgct

SEQ ID NO: 4614 - DNA, 481 bp, Chlorella sorokiniana
  Clone ID: LIB3602-055-Q6-K1-F5
ggccgtcgtcgaggtagccagcacgatggccaaaatcaaggcccatgagctgcgcggcaagggcaaggaggagctgctgcagcagctcaaggagctgaagcaggagctgagcggcctgcgcgtggccaaggtcaccggcggcgcccccaacaagctgtccaagatcaaggtggtgcgcaagggcattgcccgcgtgctgaccgtggtcaaccagaagacccgggacgctctgaaggaggcgtacaagggcaagaagtacgtgcccctggacctgcgcgtcaagaagacccgcgccatccgccgccgcctcaccaaggcgcaggccaacgccaagactgagaaggctgccaagaaggcgcgcgccttcccgcagcggaagtacgcgctcaaggcgtgaaggccttggaagcagcccgctgcagccgtgcaggcacacctctaggcagcggccgctccggccccatgtaacttgacgcccgaa

SEQ ID NO: 4615 - DNA, 105 bp, Chlorella sorokiniana
  Clone ID: LIB3602-055-Q6-K1-F6
aaaaaaaaaaaaaaaaaaaaaaaaaaaaaaaaaaaaaaaaaaaaaaaaaaaataaaaaaaaaaaaaaaaaaaaaaaaaaggggaaaaaaaaaaaaaaaaaaaagg

SEQ ID NO: 4616 - DNA, 479 bp, Chlorella sorokiniana
  unsure (1)..(479): unsure at all n locations; Clone ID: LIB3602-055-Q6-K1-F7
gcccgtgcccgctggtgtgccgctcgaggagacgatgcacgagctcaaggcgctggttgaggaaggcaagatccgccacatcggcctcagcgaggtgtcggcggcgcaggtgcgcgcctgccacgccatccacccagtcacttgcgtggagctggagtggagcctgttttctcgcgatgccgagcgcgacatcgttcccaccctgcgggagctgggcatcggagtgctggcttattcgccgctggggcgcggcctgctggccggccgctttgccagcactgccgagcttggagagaaggacttccggcgctggggccagccgcgctttgctggagaggcgtttgagcacaaccgccagctggcgtccaaggtggccgccattgcggagcgcaaggggtgcacccccgcccagctggcgctggcctggctgctggcgcanggcgatgacatcatccccatcccaggcaccaagagcgcgg

SEQ ID NO: 4617 - DNA, 345 bp, Chlorella sorokiniana
  Clone ID: LIB3602-055-Q6-K1-F8
aaaaaaaaaaaaatgaaaaaaaaaataaaagaaaaaaataaaaaaaaataaaaaaaataaaaaaaaaaaaaaaaaataagggggaacgtcctctatatggtgtcggaggtccatgttttttcctgttgggggctgcgtttttgggggttgcctgttaacttccttttgcttgcggtgttttgctttttttttaggttgcgttatttctattcggtggctggttattttcaattgctggtttttgggatatctgtttgttgcctgatttttttcctgttggggccctttccctttttcccttgtggtgatttcccaaagtgggaccggccgtgttcttttccatat

SEQ ID NO: 4618 - DNA, 281 bp, Chlorella sorokiniana
  Clone ID: LIB3602-055-Q6-K1-F9
cgtggattggctaggctgatgcagccgtccacttgcgcactgccaggccgcaggcagtgagtgcggcttggatgggcaatggatggaggcagcaagaggcagcggctcagcagcacctgcagagagtcgtggctgaagtggcggccttgcattaatgttgctgaacgccatcagctgttgtttgttttatcaagacacttaccgcgttgtgtatcttcggcttctgagcattgctacagacctgtgctttatcgatgcaatgatgtaaatatcttcagccc

SEQ ID NO: 4619 - DNA, 485 bp, Chlorella sorokiniana
  Clone ID: LIB3602-055-Q6-K1-G1
cgtcgctcagcctcttgggaagctgcaagcaccactccgacattcactccctctctgtcgaatcccccactccccaaccgccctcctcgcccgcttgcgcatcgtcagaacacaagtcaggccaccatgatgccgatcaagacagcttgccccaaggaagtgctgcaagccatttacggccccaagtcccccaccaaggcagaggactgcgtccacgcccaggagaggtggtggaagacctattccagccggaaaatggcagagtctgaagagtacacagccaatgccatggtgtacgatcccaaccacatgccgcacagccccaccgccccccagacaacaccgcctgcaaattgaggggtggcagcggcggcagcacacagtagcagggcatgcaatgccatccaggcttcgaccgctggcgacgccagcgggcatgccgccaaatattgatgcctagtggggcacccatttccttgccccgg

SEQ ID NO: 4620 - DNA, 479 bp, Chlorella sorokiniana
  Clone ID: LIB3602-055-Q6-K1-G10
cagcgtactcgcaccaactcaccatgccagcagccaagcaggaggaggagcggccaggccgcgacggctcggcggcgtcccacctgctggcctttgcgctgggggcggtgtcagtgggcgcagcgctgctagtgcgagcgctgcaaaagaagctgagaaagaggcggagagtggtgggcgtcctgccggcgcgctaccagtcctcgcgcttccccggcaagccgctggtgccaatcctgggcaagcccatgatcctgcgcacctacgagcaggcctgcaaagccaagctgttggacgcggtagtggtggccacagacgatgagcgcattgcagaggcgtgccgggccgcgggcgcacaggtggtcatgacgcaccccgactgtgcaaacggcacggagcggtgcgaggaggcggtcagcaagctgaagcggcagtacgacattgtagtgaacatccagggcgacgagccgctgatcgag

SEQ ID NO: 4621 - DNA, 476 bp, Chlorella sorokiniana
  Clone ID: LIB3602-055-Q6-K1-G11
cgcagcctgcgcagcgggcgcccactgatcgccggaagcgtacgctgcttgtgtgtgctgaggacacgccgcaggcggctgccgcctgcgaatgggcgctgaacaacatttaccaagaaggagatgtggtgcaccttgtgtatgttgtcaagtgtctcatgcagcccattgaggtgttccatggcatgccgggcacagcttacagcttcagcccgccaggcgtgcaccgcgagcaggcgctgattgacgatgccaaaaaacggctagaggatcgcttcctgccgctgctgcagccgcagattgtgccgtaccagctacgcctgtatgcggagcagacggatgcaacggtgcagcgagtggcagaaatcatccaagaggacatcgagaagaccgagcctgcgctgatcatcatggctgcacacaacaagccgggcacgcaggaggggcttgggtccgtggccgagtacctttcgcgc

SEQ ID NO: 4622 - DNA, 479 bp, Chlorella sorokiniana
  Clone ID: LIB3602-055-Q6-K1-G12
gcgaccacttcctggcctccatcggggagacggaggacagcgcgcgctcgcacgccgagggctttgtggacgcggcgcacaagctggtgggcatgattgacaagctgtacgcgggcgtggagatgcccaggtccgacttcagtgtgggcagcttgtggaagtgaagcaggagtgcttgccaggggctgctcgtgcacggctgcacaccgcacccctgcccacccgctcgccacgcccaccctcccagcaccgcataatagcagcaatattattctctcggcattgcaccctgcccacgtgacgctgccggaccggacctacagccggccgacgacaaccgacgcactgcgacgctccccaccgccgcaggggcacgggcccattttaggcgcggcaccgccgcacgcacttggaactgcggctttccttctgatcgcaaactggctgtacactgctcggtctctctgtaactgaacctg

SEQ ID NO: 4623 - DNA, 505 bp, Chlorella sorokiniana
  Clone ID: LIB3602-055-Q6-K1-G2
ccggaattccgcgggccaaccacaccggtcgcgtagaaaatactcttgcgaagctgcaagcaacaatccaacattcactccactctatgacgaatccaccactccccaacgtcccttctcgcccggttgcgcatcgtcagaacacaagtcatgccaccatggtgccgatcaagacagcttgccccaaggaagtgctgcaagccatttacagccccaagtcccccaccaaggcagaggactgcgtccacgcccaggacacgtggtggaagacctataccagccggaaaatggcagaatctgaagagtacacaaccaatgccatgttgtacgatcccaaccacatgacgaacagccccaccgtcccccatacaacaacagctgcaaattgaagggtgacagcggccgcatcacacaatagcacgacatacaatgccatccaggctttcaccgctagcgacaccatcggacatgccgacaaatattgatgcctagtggggcacccatt

SEQ ID NO: 4624 - DNA, 85 bp, Chlorella sorokiniana
  Clone ID: LIB3602-055-Q6-K1-G3
ctgctccctccggctggctggctgcgtgcttgatgcactggctccagccgcctctcacacttgaatttgtaacactttgcactac

SEQ ID NO: 4625 - DNA, 462 bp, Chlorella sorokiniana
  Clone ID: LIB3602-055-Q6-K1-G4
aaaaaaaataaaaataaaaaaaaaaaaaaaaaaaaaaaaaaaaaaaaaaaaaaaaaaaaaaaaaaaaacaataaaaggggaaaaattcaaccgttttgggggggcggtttcgtggctcacctctcctagcgcgatttctgttggggagctcttaaataggcccactgtgttgggcttactgcccccgcgcttgaaaacccctgtgctggacccaccttgacctccttgaagttctttccctttcgccctttcgccttttccccggttgggcttgcaccgattggccttccaataatcccctctttcccacaggtgcattgcttgcggccctgttgggtctctccctctttggggcctttggcgttgccggtcacgtagatccttcccctagcgttcgctccacttcccgcccctttggctccctttcttttctttttatacatttccttcggtgcccccttt

SEQ ID NO: 4626 - DNA, 390 bp, Chlorella sorokiniana
  unsure (1)..(390): unsure at all n locations; Clone ID: LIB3602-055-Q6-K1-G5
gctgccgctgccaagccgcgcaaggcgccggcagcagctgcggcgcccactgcacagctggccagcaccgccccagcatcagcggcagcgcccaagcgcaagcgggagacaccacaggcggtaatacggtctggggaggtggcagcagcagaggatgctcctccgtcctcgccgcctgcagcagctgcggcgggagaggcagctggggcaacagcggcggtggaaccgacgatcccagccacagccaagcggcagcggcgggagcggccgccagacgccaagccctggtggtgtgtctgagcagcagctgctggctcaagccgttttgtgcaagtactggagctcccatgctgcaaaatcgccccccatgtgatgcggtgcancananaa

SEQ ID NO: 4627 - DNA, 440 bp, Chlorella sorokiniana
  Clone ID: LIB3602-055-Q6-K1-G6
ccaacccatccacctgccacccatccactcaccttccctccgccacaacctctgccacccactcaccacccatcacccgctcaacgccctccatgcaccatcctccccatccaccaaatctgccaccccaaacgcacgtccgccgctgcaccacctgccgccccctcacccgcacccatcttccacccgccacctttcctgccgctcaccgccgcacatcctacctcccacacctcactccatgtccacccttcacccgcgcttcacacagcggctgctgccatgcaaagctgctgccaaacccatccatcatgctcgcacacccactcacccacacgtccaacgtatccagacccattttcaaggcccgactgtacagtgcctttttgcgtccttatgccgatctggtaccaggacttaatgtgtaacaaatggtatgt

SEQ ID NO: 4628 - DNA, 380 bp, Chlorella sorokiniana
  Clone ID: LIB3602-055-Q6-K1-G7
aaaaaaaataaaaaaaaaaaaaaaaaaaaaaaaaaaaaataaaaaaaaaaaaaaaaaaaaaaaaaaaaaaaaaaaaaaggggaaaaaaaaaaaaaaaaaaaaaaaactaaaaaaaaaaaaaaaaaaaaaagggggggccctttttaggggtcccaactttatgtccccttctttccaacacaattctttttttttggggccaccaaaattaattccatggcccgtggtttaaaaacctcttgactggaaaacccttggttttcccaactttattcgcttggaagaaaatccccttttggccggttgggttattatgaaaggggcccaccccgttcccctttccaaaaatttgtccactctaattggcaatgggacccccc

SEQ ID NO: 4629 - DNA, 481 bp, Chlorella sorokiniana
  Clone ID: LIB3602-055-Q6-K1-G8
gcagcagctgtggagcagccctcggcagcagcggaggaatcagccagcaggagcgacccacctgccgctgcagcccctgcccagccaagcccagcagccaccgtcagctcagacgccagtgtggcgagtggcgagcactggcaggttgtgagctcgcccaagccagctgccaggagcgagcagcagccggcagatgtggcgcagccggcggagaaaacgcagcagcagcagcagcagcagcagccggaggagcactccgaagagcagccagaagagcagcagcagcagcagcagcagcaacagcagcaatcaaagcaggcaggggcagcagatgccaaggccaaggcgcctgcagaaaagcaagcggcggcagcagcgagcagttccacggcggccgtagcggcagcagcggcaggaggagcgccagacgatggggagctgtctgactggggcgatgaggacgatgctgctctggaggctg

SEQ ID NO: 4630 - DNA, 251 bp, Chlorella sorokiniana
  Clone ID: LIB3602-055-Q6-K1-G9
aaaaaaaataaaaaaaaaaaaaaaaaaaaaaaaaaaaaaaaaaaaaaaaaaaaaaaaaaaaaaaataaaaataaaaaaaagagaaaaaaaaaaaaaaaaaaaaaaaaaaaaaataaaaaaaaatataaaaaaaaaaaaaaagtgggggtttgagcttaacaaccattgaaagaggggggggtgtcggatatttgcgcttcggcgagaaaacgcacatcagctcatgtttagtgtcttttgagcactccgaa

SEQ ID NO: 4631 - DNA, 480 bp, Chlorella sorokiniana
  Clone ID: LIB3602-055-Q6-K1-H1
cttcttccgcaactgcgtgtccaccggcgagttgtacccagtggagacggatacgcggctgtgcgaggagctggagacggggcgcgaggttgaggtggacatggaggcggacgtgctcacagacctgaccaccggcaagaagtactcgctcaagccgctgggagacgcgggcccggtgattgacgcgggcggcatctttgagtttgcgcgcaagagcggcatgatcaaggccaaggcatgagggacttctggttggaagggctgagctgggctgtgtcccagcctgcacaaatggctggggccctccctgcaccaacccctcttctacttccatgtccctctgctgctccgctccttgtgctgccttcttgcttgcttgctcttgccgctgaaacttgttcctgatctctccgcttgctgcccccagtcccgctcaaaccctatgtgtacctattgaccctttcagccgtggaccagaat

SEQ ID NO: 4632 - DNA, 471 bp, Chlorella sorokiniana
  Clone ID: LIB3602-055-Q6-K1-H10
cggtggggcgcgacccccgcctctcttctccgctcatggctgccagcctggcggcggggctggcggcggcgggcgccggcgtggcgcgctttggcccctgcaccaccccagccatgttcatgagctgcatcctgcctgggcacgagtacgacggagcggtgatgatcacagcctcccacctgcccgtcaaccgcaatggcgccaagttctgcacgggcgagggcggccttgagaagaaggacatcacgcagctgctgacccgggctgctgagctggcggaggaagcgggtcagcgcccctcagaccgccacaccgacgccgcattcgtcatcacagccgcgctgcaggccagccgcagcctggtgtcgtacgtcgatttcctgccggagtatgctgcctacctgcgtgagctgatgaagcgcagcatcgcgcaccccaccaaccccgacgccccgctcaccggcttcaaaa

SEQ ID NO: 4633 - DNA, 292 bp, Chlorella sorokiniana
  Clone ID: LIB3602-055-Q6-K1-H11
tgaaaaaaaaaaaaaaagaggcactctgataaaaaaaaaaaataaaatgggcacttcaagacctgaagaggaactgcgtcctgagtgcaagctgtacgttggcagcttgccgaacaatgtggacgagcatgcactgacccgagagtttgcacgctttggtccagtagtcagtgtacgggtcatcactgatcgagacaccggcaggccgtgtggctatgggtatgtcaacatggcaaacactgcttcacacagatccttatggcaggcatggatggctatgaccgttggggcg

SEQ ID NO: 4634 - DNA, 482 bp, Chlorella sorokiniana
  Clone ID: LIB3602-055-Q6-K1-H2
gacctccttccgcatcatgcccaacatgctgaccatgcgccccggtgacggcaacgagaccgcgggctgctactacgcggcggtgcagaacgccatggcgcagaaccccaagggcatcaagcgcccctccaccctggtgttctcccgccagggcatgcccaacatggacaccacctccattgagggctgcctcaagggcgcctacgtggtgcacggcggcgacgccaagcccgatgtcatcctgatcggcactggctccgagctggtgatggctgtggatgccgccaagaagctggaggctgagggcaagaaggtccgcgtggtgtccatgccctgctgggagctgtttgaggagcagccgcagagctacaaggacagcgtgctgctgcccgaggtgaaggcccgcgtgtctgtggaggccggcagcacatacggctggcagaagtgggtgggcgacaagggcaagtccatcggcattgacg

SEQ ID NO: 4635 - DNA, 402 bp, Chlorella sorokiniana
  Clone ID: LIB3602-055-Q6-K1-H3
gtggaatgcaaagggttacatgcgttgccccccgccgtttggaaattattgggccccccggggccggttttttaggggccaggtttttgcaaggggggcggtgttttttccaccgccggaaaatggggggttttattaagggaagaagggcgtttgaagcttttgaatcccgtgctggggttgttgttgttgttttcaagggtttaacccagaaaggaaagaggcctttattccaccctgtttaaaaggagccaaacccttttttggccccaaaccccggggggataacccccaccactttaaaccccacctttttgaacaggggccggaattggccaataaccacggggtccccttcttggcaacgaaagcagggcaaaatgtcccccaaaattttggtgt

SEQ ID NO: 4636 - DNA, 471 bp, Chlorella sorokiniana
  Clone ID: LIB3602-055-Q6-K1-H4
aggaagctgtgggcaagaccaaggcggtgcccttcctgctggaggacaagctgaaggagctgggcggcgactacgtggtgggccccgactggcagcctctggcagtggcgtcgggcaagctgatcacggggcagaaccccggctcctccaagcgcgtggccgagctggtgatcgaggcggtggcccccggcctcaaggagccggtgcacggcaagggagccggggaaggcttccaccaccggtaggcggctccgcctcaagtgcactacccagcccacatgcccacgagagcgagaagcgcggagaggaggagcaccaccacgatcaccacgatgagcacccacgcgctggcgtgcgccacgacgcgcccgacgagtccaagcagcgcagcagctggcaccagtcgtaccgcccgcccatctgagctgcggctagcagcggagaatgcacgttgatgggttagtgcgacac

SEQ ID NO: 4637 - DNA, 477 bp, Chlorella sorokiniana
  Clone ID: LIB3602-055-Q6-K1-H5
gtggcagcacacgtggcagacgcaaacaacgaccgcctcatgtccggcaccgcctgcatcaagtttcccaagctgcaagaaatgggcgctgagggtccgttcatcctgcaacgctacaaagacttgtatcgcgaggcgcaggagtatgagaaaaagttcaagcgctgggcgccgggctcgctggtccgcatgtaccaggggagcgctgtccaagcaaagcagcagctggacagcgcgcaagagcgaggcttcactatggacgacatgattgaacccaagacagccggcctgctgcagcagtcgcaggaggactggcacgaggtgcaccaagctgcgctggaccgcgcacgctgcgccgcctgcacccgcgtcggcatcggcctcatgcgctgctcagcctgcaagtcggtcaagtattgcagcagcgcctgtcaaaaagccgattggaaagcccacaaggaagtgtgcgcctcgttg

SEQ ID NO: 4638 - DNA, 477 bp, Chlorella sorokiniana
  unsure (1)..(477): unsure at all n locations; Clone ID: LIB3602-055-Q6-K1-H6
actgtacgtgtgcgcagcgaggcgcctgctggaccacgccgaggcctgggcacttcaagacctgaagaggaactgcctcctgagtgcaagctgtacgttggcagcttgccgcacaatgtggacgagcatgcactgacccgagagtttgcacgctttggtccagtagtaagggtccggttattaattgacgaaacaaccgcaggccgggtggctttgggtttgtcaacatggcagaccctgcttcggcaaggagcgcgatggcaggcatggatggctatgaccgttggggcggaaggattgttgttcggcctgctggcacaggtgacacgggacgaggtcctcggccgttaccaatgggtggttttcctactggcgcaccaacatttccagcaggcccgccaccgncaccaatgccccctgtgccgcattgttacccttctccccctggatacgcaccagcgccgccgcctggtgcat

SEQ ID NO: 4639 - DNA, 375 bp, Chlorella sorokiniana
  Clone ID: LIB3602-055-Q6-K1-H7
gcgaatgttacgtactcgttcttgtatcgtgttacctattttaaagtgactgctcgatgtaatacactggccggactggtacaaccctggcattggcaaactcatggggtttccaaaataaatcgctttgcccagcaggcgtatttgcgaagaggccgtaatcgatagcagttccgaacagttggccattctgaatggttaatgagactcactgtgtaatgggacattcactgcagcggctctttaagctccgcgcatgtggagctttccactagcgagaccgctacactcgcctgcttcctatcgctcgcttttttttcttgctacgtttgcttgcttgccacgttaagctgttattccggggatgctttaaag

SEQ ID NO: 4640 - DNA, 442 bp, Chlorella sorokiniana
  Clone ID: LIB3602-055-Q6-K1-H8
cggacgcgtgggcggacgcgtgggtttttttttttttttttttttttttttttttttatgggaggtttgtaacaaggcaccgaaaggccgtttacaggcgggtggggtgcgccacgccttgcaggcgggtgccagtcaaaagctgagtccgtccgtcgtcaagccgccgccgaaagcctaggtgcgcggcgccgacccgcccgcctgctgccccgcccgccctcgagagcgccacggggcgctgctgctgctggcgggcccgccgggcgagatcatgaaacctaagcctgcgtggcacaccggctgggaccgccgtttaaggccgaaggtgctcacgccttggggctggtctacacctactttccgactatgactgaggttttgtcttataggaaggcgatgtggcacaatccctccgtgaacttgtatgactccaccacct

SEQ ID NO: 4641 - DNA, 479 bp, Chlorella sorokiniana
  Clone ID: LIB3602-055-Q6-K1-H9
cgagcaggcgcaggcggaggcgctggagctgatcagcgactggacgcacgaggagcgggagttcctgcgggacgaggtgccacgcagcgggctgcgcacgcccttccgcggcggcacgatgcaggacttggcgcagcgggtgctgcagatcagcaggggcgggctggagcggcgcggcaagcaggagaccaagtacctcaaggagctggaggcgattgcggagagcggcgtcacgcaggcagaccacctgctgtcgctgtactatggcgagtggaatgagagcgtggatcccatctactcgccgcagttcacctactgaccagccagagcctgacctgagagcacttgaattcgattgtccgtgactagcgatgaacaaacgcgccggcggcgccccatcggcaacagcaaggcggcgcgtgccccggcgcaggcggctggcggctgcatgtcagatgtaatgagcccgccctgtgact

SEQ ID NO: 4642 - DNA, 442 bp, Chlorella sorokiniana
  unsure (1)..(442): unsure at all n locations; Clone ID: LIB3602-056-Q6-K1-A1
ccggagctgctgcccttcttcgagtccctggacatgcaagagcagaagatgaagcaggtcaagttcatgagcttcgtgtttggcggagcagaccaatacaagggccgaagcatgtacgacgcacacgcccatctggtcaagggccacggcctggaccaccgccactttgacaagatcaagcagtaccttggagagacgctgcaggagatgggcgtcaagcaggatgtgatccagcacgccgccggagtggtggagtccacccgcgacgaatttgacttccccaacaactgcgcacccaactgattttcatcaacccaaccccagcctgagcgctcattccatcgattttgagcggngagcgccagttgccgagcgcgcccagggggcccaggagcctgcaaatcgtttgccagcccttgctgcattgaagagccatcagcca

SEQ ID NO: 4643 - DNA, 441 bp, Chlorella sorokiniana
  Clone ID: LIB3602-056-Q6-K1-A10
aaaaaaaaaaaaaaaaaaaaaaaaaaaaaaaaaaaaaaaaaaaaaaaaaaaaaaaaaaaaaaaaaaaaaaaaaaggggaaaaaaaaaaaaaaaaaaaaaaaaaaaaaaaaaaaaaaaaaaaaaaggggggggcctttttaaaggaccaaagtttacttccccgtgtttggaactaattattttttttttagggtcacttaatttaatttcattggccgtttttttaaaacgttggaattggaaaaaccttgggtttcccaaatttaatcgctttgaaaaaaatccccttttcgcaagttggtttataacaaaaaaggccctaaccgttcccctttccaaaaatttgcccaccttaatgggcaaatggaacccccttttaagcggccttttaagcgcgggggtttgggggtttacccccagggtaaccgttaattttgcaag

SEQ ID NO: 4644 - DNA, 438 bp, Chlorella sorokiniana
  Clone ID: LIB3602-056-Q6-K1-A12
cggacgcgtgggtgagatgggggtgggccccgcggcagcgcccgtcgcggcgtaagctgtgcggcgctctggcggagtggcggtgtgccatgcagcgcttgccgcccccgccggccctccctgctcttttgcccccttgcgctcacttctcttgtagcttcctttgccgccgcatgtgcgtgctcgctgtatgaacattcacgtttcattgcccataccaacgaatgccgttgcttcccctcagccttcttgaaccctccccccctggccccctgcaccgatttcaaagcttctcctccacctgcccctctctgcgtgccctcaccggcgtgcaacccccctcccagctgcaccctccctgagggtgcgctgggcctctccagttttgctaagccccacgcgagtcgacactcccaacacgtcatgacacacaagtct

SEQ ID NO: 4645 - DNA, 441 bp, Chlorella sorokiniana
  Clone ID: LIB3602-056-Q6-K1-A2
gggccgtgacccaggcgctggtgggcgagcggccaggcagccatggcgtctgcggtgcagcgcctgcgggcgagccacctgtacaggcactcgctgaagaacatgctcagctgggcggtgcggcgtgaggtgttctatgccgaggctgagaggatccggtcggaatttgatcaactgaagacactggacgaccccatccagatagagcgtgcgctggagcgcggagaggcgcgcctgcgcgaccacctgcacccagacccttacatcgtgccctaccgcccaggcggcagcatgtacgcgcgcaacccgcccttcgacccgtctgtgcacatccatctggactttggccgcgagggccactgagcgcttgctggcggcggctgcagaccgacgcagggcagccactggagccgctgtcctgccgtcctgcagcagcgcaca

SEQ ID NO: 4646 - DNA, 442 bp, Chlorella sorokiniana
  Clone ID: LIB3602-056-Q6-K1-A3
acggcctgctctgcggcccttcatacctttgtacctttctgtatcatcttgcagcaatggcagccggctgcatgtttctaacatcgtcaccggcccactcgtttgtgccatgcccacctgcctccaacgtcacccttcatcaaccctcacccaacccatccacctgccacccatccactcaccttccctccgccacaacctctgccacccactcaccacccatcacccgctcaacgccctccatgcaccatcctccccatccaccaaatctgccaccccaaacgcacgtccgccgctgcaccacctgccgccccctcacccgcacccatcttccacccgccacctttcctgccgctcaccgccgcacatcctacctcccacacctcactccatgtccacccttcacccgcgcttcacacagcggctgctgccatgcaaagct

SEQ ID NO: 4647 - DNA, 405 bp, Chlorella sorokiniana
  unsure (1)..(405): unsure at all n locations; Clone ID: LIB3602-056-Q6-K1-A4
ctcgggatcagctgctggagtacttggagggcaggattgcgcgctggtggatgccagacgacgtcgttttcgtgaaagagatccctcacaccgccaccggcaagatcagcaagctcacgctccgcaagcagtttggcagccaccgccccgcgcgctcgcggctctgatgaggtgctctggctgctggccaggcatgagccgctcacggcctctcgccggcggaccaagaaggagtgaactctattgctcgaggattttgctcgaggatttctgcaggccccagcactaaacagttggatccaagcgcaagtccctgttcgtaaccacgctgtacaatgccattcggtccaggagttgtttctctttgcacctgttccattgttgccctgtaagattacaagcngg

SEQ ID NO: 4648 - DNA, 438 bp, Chlorella sorokiniana
  Clone ID: LIB3602-056-Q6-K1-A5
gcccttgcagcagctgcagctcggtacacccgaatctatgcagccaggattccgctgcacgctgtggcgctgtgtctctatcgaacattagcagcccagggagcagcagctcccgtgctggccgccagcgcggtctactgcggcgtcactgcacccatcaactgggcgttcatttcctggctgggatggggcctagacggctcggccgcagcggcagtcgcatgcgaggcagtgtacgtggcggcgcttgcggttgcctgcgcgctgcacaatgcgcagcagccggccggccagcagtggtggcagggatggagcgctgaagcgctacgggactggggcccatttgctaagctcagcgtgtcatcaaccctcatgattgtgctagactggtgggcatacgacatccttactttcttggcaggcctgctgccgcagccc

SEQ ID NO: 4649 - DNA, 441 bp, Chlorella sorokiniana
  Clone ID: LIB3602-056-Q6-K1-A6
ggcggtgccccggcgtgcggcgattggcctgctggccgctgccgtgctgggcctgagcgcggacgctgcccaggctgtgggcgttgccaagaacggatcccgcgccggctccgagggctacgtgctggagggcaccaagaagcagggcatcagccccaagcgcaagcgggccgtgctggacaaggtgcgcaaggccgccggcaagcagtgagcctcgctcgcaactcacgagcgctgagcttccgtcccggctgcgccactgttccggcgaggcacgcgcagcagcaccctcccttgcggccctgccctgccctgaatgtgaaccagccctggctctgtaccctcttaccgtcttcacttcccgagcagaaaacttgcatcgagactgcgtttttggcacctcaccttgtcctgctgccgcgtgtaaactgccatgttaaa

SEQ ID NO: 4650 - DNA, 433 bp, Chlorella sorokiniana
  Clone ID: LIB3602-056-Q6-K1-A7
atctgagaagacttcatcagtaggacccgcccggcccccgggctgacacgaatcctccacccacccgcacctgcacccgcgcgagactgcagcagccagccccccgtcacccccgtgcccgacacacagaccccgccgatcccccgcaagcaaacgcacgcagcatgcgcacgtcggcgccccaccccatgccggggccgcgtctcatactagcccttctgttccttccccccaggcattttattgccacctccccttgctccccgctttgtattgtttcgttttgtgttttgtcgttgcgccacaacgccaccacctgatcgcacacacttgagatgcagcactgcctgtaagtgatgaagagggtcacaaacgcgcccaagagacccaggagcttgcacatcatctggaaatgcttgctgggggcggccgc

SEQ ID NO: 4651 - DNA, 431 bp, Chlorella sorokiniana
  Clone ID: LIB3602-056-Q6-K1-A8
ctgctgttggttcctccgcctctgtgccctctgacgctgtttcgatgcgatgctgagaatgctctcatgccctggcgctcattcccctgcccgccccgttctcgccgctgatcctcttgctgtgtcgctgatttgagccgatgctcgggagcccgggtggcgggctcccctttgcttcgcccacctgacccccgcactgaccctaggctgggccggccggcattcccgccggcagccagcccccacccacagccatgcattcactcctagagtcttatggtgcctgtgtcgagcgagacacctccctgacgaaccttcaaacttgataatcttaacttgaccctgtgagggccgtgccgatcgtctgagcaagagatttcacgtccctgcagacactgtaactaatacgcttcaaaaaaaaaaattgacac

SEQ ID NO: 4652 - DNA, 427 bp, Chlorella sorokiniana
  Clone ID: LIB3602-056-Q6-K1-A9
gcactttgacagcctgctgcactgcttccgccgaaccaggcagttcgcggacgcacgagggacactgccgaggaaccggcaggaagctcgtgcgcggcaaccgcaccatggagcgcaccgtgcatcgcatccacagcacgcagtgcgcatgcatggacagccagcgcagcatcatagagtcagtagtcggcagcagtcaacgagggcagcagccagcgcatgaccagcatgagcatgcttgggaccctcagcagctgcggggagcatagcagttgacgtgaacgctgcgcactgtcagtatgccttggctactgatgagctggatgagtgtgatggcgcaggatacatgcacggttgctccgagcgcactcggcaatttgctgatcaacatgctcagtctcccactctgtactacttctccgaattg

SEQ ID NO: 4653 - DNA, 441 bp, Chlorella sorokiniana
  Clone ID: LIB3602-056-Q6-K1-B1
ggcagcgccacaacgacgcgctgtccgccaccggcgccggctccgaggcctacaagctctgagctgagccgacgtcttttgcaacagctctgagccgctgagctgaccctggctcatgccagctggcatgctgcagcacccccagcccgccaagcagcctggacagcagctggctgattgtttgcccgctggcctgtgcagcaggggcgctgcccggctgccacagtaatgcatccttaatccacagcatccctcacttcacctcgctgcgtgctgcatctcacgagcactattattgccgctacgttgcttcataccttggattgcgcagcctgccgccaccggtcttgcttccgtgccgccaggctgtgcaatgcaaagccgtcttaccgccctcagcctttctttgggcgctcctttcatccctgcccaatcgccatc

SEQ ID NO: 4654 - DNA, 441 bp, Chlorella sorokiniana
  Clone ID: LIB3602-056-Q6-K1-B10
gaggcggccaagggggagagcgagctggagaagaagctccgcagccggcagggcatccaggcgcagatgctggccaaggcgcagcgcgagcggctgcaggtcatgctggatgaaatcaaagaccgcagcgcgcagagcgaggcccggtaccgtgccgcgctggacggccaatccctgggcacacacagccacggcagctcagcaggggccgtggccatcaagcgaggcgatgagagcggggcagcgttgtcatcgcaggcatccccagtagcggcggggaaagcagcggcagcagccgcagcggggcagcaggcggacaacggcacgacgcgataggttgcagccagccgacctttgtttgctctgctcaacttctctgcgtttcgcacatgctctccttttacatgctcccctttgaacgaacgctcagtccccaaccaa

SEQ ID NO: 4655 - DNA, 437 bp, Chlorella sorokiniana
  Clone ID: LIB3602-056-Q6-K1-B11
ctggatcgctggcgccaccgaggtggatgtgtcggcggcgcgcaaggccatcctgatcaaggtgccctaccgcctgctgaaggcctaccacaaggtgcagcagcgcctggtgcgcgagctggagaagaagttcagcggcaaggacgtggtgattgtgggcgtgcgccgcatcctgccgcccgccaagcacagccgcaaggcggagcggccgcgcacccgcaccctcacctcggtgcacgaggcgtacctggacgacctggtctaccccaccgagatcgtcggcaagcgcatccgctaccggctggacggctccaaggtgctcaaggtgctgctggaccccaaggaccgcaactccgccgagtacaagaccgagacctttgcgagcgtgtacaagcggctgaccggccaggacgtggcctttgagttccccgtcagcg

SEQ ID NO: 4656 - DNA, 440 bp, Chlorella sorokiniana
  unsure (1)..(440): unsure at all n locations; Clone ID: LIB3602-056-Q6-K1-B12
ggaggcggccaggagggcgccgctgccaatgcgcagcagcacgcggtacagggggtcgagcagcagcaggcggcgcctgcggcggcagtggatgtgcagcaggcaggcggcagtgcaggtgctgtggagcgcacgcagcaagcagcagcagcagcagcagagcagcagcagcagcagcagcagctaggcgacgacagcatacgattagagctgcggcctcgacctggggaccccagctgcatacaggcggtgctcacactggctgaagcaggcaggcagcaagcagcggggcagcagcaggcaacaggtgagacagctggaggcgcagcagcggatgagccagacagcagcgacaagcgcggcggccagcgcggcaccaagggcatccgagtgaagcacaagccggagcaccctgngcgcaaccagaagtgctcatgcgg

SEQ ID NO: 4657 - DNA, 444 bp, Chlorella sorokiniana
  Clone ID: LIB3602-056-Q6-K1-B2
ccaggcgccgcaggagggtaaagagcaaagatgccggcgggccagggctaccgcgcgcgtacgcgccacatgggcagccgcggcttcaggcagaagggcttcatcccgctgtccacctacctgaccaactacaagctgggtgactatgtggacatcaaggtcaacgccgcggtgcacaagggcatgccccacaagttctaccacggcaagactggctgcgtgtggaatgtgaccaagcgcgccgtgggcgtggagctgctcaagcaggtcaacgggcggtacatcaagaagcgcatccacgtgcgcatcgagcacgtgacccccagccgctgccacgaggagttcctgcgccgctgcaaggagaacgacgcggcgcggcacgcggccaaggtggagggcaagccgctgccggtgctcaagcgccagcccaagggcccccgcacc

SEQ ID NO: 4658 - DNA, 426 bp, Chlorella sorokiniana
  Clone ID: LIB3602-056-Q6-K1-B3
gcgtggcgggtgcgctgcgctgccactctctcacgtttggtcgcttgcggctctggggtgctcattgcgccatgagggttcacctgtccagcggacgatcgtcgcttgccctgggtatgcgcccctgcgcccgtgtctgtggctgcccgtcacacagtccccggccgtccagatttgactcaagtccctctcccaaaccctccccctctcacctcgccttccactacgcgaccccgccctgccatgcagacgatgtgtcggaggacgacctgcgcgaccaattctacccctatggcgagctgaagagcgtgaagaaggtggcctcccgctcctgcgcctttgtcacgtacgcgacgcgcgaggccgcggagcgcgccgccgacgagctggccaacaagtgagtggggcgcttagaggctgcctgct

SEQ ID NO: 4659 - DNA, 441 bp, Chlorella sorokiniana
  Clone ID: LIB3602-056-Q6-K1-B4
gggcaagaaggtgctcaaggtggactgccactttggcaagcgcaagagcctggcgtccatccgcacctgcacgtcgcacgtgcagaacatgatcaccggcgtgaccaagggctacgagtacaagatgcgcctggtgtacgcccatttccccatcaacatcaacatcgagaacaagggcggcaaggtggagatccgcaacttcctgggcgagaagattgtgcgcgtggtggacatgctgccgggcgtgacctgcgagcgcagcgccgccgtcaaggacgagctgatcctgaccggcaacgacatcgagctggtgtcccgcagcagcgcgctgatccaccagaagtgcctggtgaagaagaaggacatccgcaagttcctggacggcatctacctcagcgagcgcggcaccctggtgaagcccgagtaagcggagcccgcacg

SEQ ID NO: 4660 - DNA, 410 bp, Chlorella sorokiniana
  Clone ID: LIB3602-056-Q6-K1-B5
aaaaaaaaaaaaaaaaaaaaaaaaaaaaaaaaaaaaaaaaaaaaaaaaaaaaaaaaaaaaaaaaaaaaaaaaaagagagaaattaaaaaaaaaagaaaaaaaacaaaaaaaaaaaaaaaggggcgcccgttttaaagaatcaaagtttacttccccttgcttgcaacgtattagtttttttttagggccacttaaattaaattaattgcccgtcttttaaaaacgttgaaactggaaaaaccttgcctttcccaaatttaatccctttgaaaaaaatccccttttccccagttggcttaatagaaaaaaggcccaaaccaatcgcctttccaaaaatttgccaaccttaaatggaaattggaaccccccttttagcggcccattaaacccggggggtgtggtgtttaccc

SEQ ID NO: 4661 - DNA, 105 bp, Chlorella sorokiniana
  Clone ID: LIB3602-056-Q6-K1-B6
aaaaaaaaaaaaaaaaaaaaaaaaaaaaaaaaaaaaaaaaaaaaaaaaaaaaaaaaaaaaaaaaaaaaaaaaaagaggaaaaattaaaaaaaaaaaaaaaaaaaa

SEQ ID NO: 4662 - DNA, 450 bp, Chlorella sorokiniana
  Clone ID: LIB3602-056-Q6-K1-B7
gtccgcaagcgccgaaaaaaaaaaaagaaaaaaaaaaaaaaaaaaaaaaaaaataaaaaacaacatacacaccacatgagcagccaagagataaaagcagaagggctaaaaaaaaaaaaaaaaaaaaggggcggccgttttaaagtacccaactttccgtccacttccttgcaacgcaatagtttttttttggggcccccaaaattaattccactgcccgcctttttacaactgcaatattggaaaacccctggcgtcccccaatttaatccctttgtaaacatccccttttcacagaatgcattaacatgcaaatggcccacatgatccccattcgctaacagtaggagttcctgattcgctgaaaggacaaccactcggcgcgccaataaaccccgggggggggggggtttccccccagggtgaccgttaaatttgccagccccttac

SEQ ID NO: 4663 - DNA, 440 bp, Chlorella sorokiniana
  Clone ID: LIB3602-056-Q6-K1-B8
caagggcaagaaggtcgcggcggcgcccgccgccgtgaagaaggcggcggcccccgccaagcctgtcaacccggtctatgagaagcggcccaagacgttcggcattggcggcgacctgccggccaagcgcgacatgcgccgctttgtgaagtggcccaagtacgtgcgcatccagcggcagcggcgtgtgctgaaccagcgcctgaaggtgccccctgccctcaaccgcttcacccgcacgctggacaagaacatggccgagagcctgttcaagctgctgatgaagtaccggcccgaggacaaggcggccaagaaggagcggctgctgaaggaggcggaggcgcgcgaggctggccaggaggttgagaagaagaagcctgtggtggtcaagtacggcatcaaccacatcacgcagctggtggagagcggcaaggcgcagt

SEQ ID NO: 4664 - DNA, 388 bp, Chlorella sorokiniana
  Clone ID: LIB3602-056-Q6-K1-B9
gccacgcatgcgggccgcgctgcgggcaactgttgctggcagtgatgctagacgacaagccacacccgccgcagcagcagccacagcagcagtagcagccccaatcggggtcgcaacctgcttggaagactcctagcagcaatgcattcttcctggcatggtgcctgtacatgggggttcgcatggagacttgcaaacactcggcaagagctttggctcgctcttttggttgctctttgcgctcccttttgcatgcatactcgtatttatactacacagtaccctacacagccaattgcagcgctgattgaaccctgttatcattcatggctggatcgaacgttagtcggcggctgagctgtggttcatcatttgtgcgagtactaat

SEQ ID NO: 4665 - DNA, 440 bp, Chlorella sorokiniana
  Clone ID: LIB3602-056-Q6-K1-C1
gtcgccaacttcggcgaggctgtgtggttcaaggctggcgcccagatcttccaggagggcggccttgactacctgggcaacccctccctgatccacgctcagtccatcgtggccatcctgctgacccagctggtgctcatgggcctgattgagggctaccgcgtcaacggcggcccggccggcgagggcctggatgccctgtaccccggtgaggccttcgaccccctgggcctggctgacgaccccgacaccttcgctgagctgaaggttaaggagctgaagaacggccgcctggccatggtgtccatgctcggcttcggcgtgcagggcctgatcacccgcaagggccccattgagaacctggctgaccacctggcggcccccgacgccaccaacttctgggtggactacgcccccaagtccgccggcatcggctacta

SEQ ID NO: 4666 - DNA, 437 bp, Chlorella sorokiniana
  Clone ID: LIB3602-056-Q6-K1-C10
gcggtgagggctgacagagcgccaccatgcggcagctcatttcttctcggaccctcgtcatccccgatgaggggtctatcgaggtcaaggcgcggcgggttcgcgtgaagggccctcgcggcacgctgcagcgcgacttcaagcacctggctgtggacatgttcctgactgaggaggagggcaagaaggtgctcaaggtggactgccactttggcaagcgcaagagcctggcgtccatccgcacctgcacctcgcacgtgcagaacatgatcaccggcgtgaccaagggctacgagtacaagatgcgcctggtgtacgcccatttccccatcaacatcaacatcgagaacaagggcggcaaggtggagatccgcaacttcctgggcgagaagattgtgcgcgtggtggacatgctgccgggcgtgacctgcgagcgc

SEQ ID NO: 4667 - DNA, 402 bp, Chlorella sorokiniana
  Clone ID: LIB3602-056-Q6-K1-C11
tgcgcgaccaattctacccctatggcgagctgaagagcgtgaagaaggtggcctcccgctcctgcgcctttgtcacgtacgcgacgcgcgaggccgcggagcgcgccgccgacgagctggccaacaagctggtggtcaagggccatcgcttgaagctgctgtggggcaagccgcaggcgccgcggccagcagccgagggcggcgcagcaggcggcgcggcggcagcagcagcggcggggcagccatcgggctctgccttcccctcttacatgcctgctgcacctggcgcctactcttactctagcatggacccactggcaatgggcagccgacagccgcaggcaggcgggccgccacggccgccgggaccaccgcctgtgcctcggcagtgagccccgcacg

SEQ ID NO: 4668 - DNA, 448 bp, Chlorella sorokiniana
  unsure (1)..(448): unsure at all n locations; Clone ID: LIB3602-056-Q6-K1-C12
aaaaaaaaaaaaaaaaaaaaaaaaaaaaaaaaaaaaaaaaaaaaaataaaaaaaataaaaaaaaaaaaaaaaaggggaaatttttaaaaaaaaaaaaaagggcccccccttttaaggtttccctgctttccttccccttcttgcccccctcttggggtttccttttttgtggctccctttttttcccccgggccctttttttcaatggctttttttttggaaccccttgttttcccttttttgccgggttttttaaacattcccctttggaccccctcttgtttccccaatttgaccccccctgttccccttccctttttntcccgtggcttttttgccaatgggccccccccttttgcctttccttaaagttggccatttttgttgtttcttggaacccccctttttccctttcttttacccttgggccctttttttttcccttttt

SEQ ID NO: 4669 - DNA, 434 bp, Chlorella sorokiniana
  Clone ID: LIB3602-056-Q6-K1-C2
cctacttcatggatgtgaagtgccagggctgcttcaccatcacgactgtgttcagccacagccagaccgtggtggtgtgccccagctgcaacaccgtgctgtgcgtgcccaccggtggcaaggcccgcctgaccgagggctgctccttccgccggaagggcgactgagcgcgcccccgctagcggcagtgttggcgctgggcagcggttattgtgatgtccacgggcagcccgtagcagcggcactcgcactcctctcttgttgggatggagcaacaccttgcacgggcgtcggaggagactgatcgcccacagtgaggagcacgcggccgggggcctccgcccctgcagccgcgtgtgaagagccacgagtatagcaccccgcgctgccaggcctcgcggccggcgcgcacaaatgactagcacccgcgcctg

SEQ ID NO: 4670 - DNA, 167 bp, Chlorella sorokiniana
  Clone ID: LIB3602-056-Q6-K1-C3
gcgcgtgggcgggcgccggcggcctttgttaggtcccattcattcctttctgctgcttgtgttctcccctcgcctgcggcggcggtgggcagcaacggccttcgaatccgtctgccccgctgccacctctcagcatgactccttgcaatgtgtaaggcccagctttg

SEQ ID NO: 4671 - DNA, 443 bp, Chlorella sorokiniana
  Clone ID: LIB3602-056-Q6-K1-C4
gcggggggagcagcagagatgggcatcgacctcaacgccggtggccgcaacaagcgggtgcaccgcaccgctcccgagagcgagaacccctatgtcaagctgctggtgaagctgtaccgcttcctggtgcgccgcaccgagagcgacttcaacaaggtggtgctcaagcggctgttcatgtccaagaccaaccgcccgcccctctcgctgtccaagctcgccaagttcatggccggcaaggacggcaagattgcggtgctggtcggcaccatcaccgacgacgtgcggctgtttgaggtgcccaagctgcgcgtgtgcgcgctgcgcgtcaccgagaccgctcgcgcccgcatcctcaaggctggcggcgagatcatgaccttcgatcagctggcgctggtggcgcccaccggcagcaactgcgtgctgctgcgcggccccaa

SEQ ID NO: 4672 - DNA, 442 bp, Chlorella sorokiniana
  Clone ID: LIB3602-056-Q6-K1-C5
cggacgcgtggggttggctgcagctgcagaaggccgtgccgccgctgcggcagggcccagcacgagccgtccggcgcccgagcaggggcagctgcaggctgccaagcggcagcgcacagggaagcagcaaaagggacaggagcagccggctggtttgggccggcagcagcagcagcaggggcaggagcagtcggctggtttgggccagcggcagcagcagcagagcaggcagcagccagaggagcaggagcagcaggaggagcagaacaatgggcaacaccagcagcacccaggatccggccagctgcggcaggaggccacatctcagcagcacgaacagcgtcagaatggcacagctgtgcagcagcagcagcagcggcggccacagcaggctgctggtgcacatgcggctggggcggcaccggttgctggcactggtgcg

SEQ ID NO: 4673 - DNA, 98 bp, Chlorella sorokiniana
  Clone ID: LIB3602-056-Q6-K1-C6
caactacgccggcgtgagcaccaacaactacgcgctggacgaggttgaggaggtgaaggcgtgagcagcccctgaaggcatccgcagcagctggggga

SEQ ID NO: 4674 - DNA, 435 bp, Chlorella sorokiniana
  unsure (1)..(435): unsure at all n locations; Clone ID: LIB3602-056-Q6-K1-C7
gccgggttagacgcagcgccctgcgctgnccggccgcgccgcttgcttgcacggncccgcatacctgcacataccccctgcgcgtattgantttgccgcccacaaccaggctgctttcagagactgccccgtccatgcccccccggtggtaatcaacgctcgttccatgcaacccgccttttgagctacctacccacttgtgtctgcgctcccgctgtgcccacggccgctgcccaaattcatccgatcccggcccatgccggcgccaggcagcccccagccaggccggcctggcgcccccatgcccttagcgactctgcactgtgtgcgtgtgtgtttctggaaagatttgtaccctgcgtttctggctcgctatgtccgccaactcgtcgtcgctgctgtccaaataactaatgaatgcaaacatcctcctgc

SEQ ID NO: 4675 - DNA, 316 bp, Chlorella sorokiniana
  Clone ID: LIB3602-056-Q6-K1-C8
aacatcgcgctgctgcccagcgtgcacaccggtgtggaacgctgcgtactgctggcttgcctcttgcggcgcgacggcagcggtgtgtgcccctaagcttgccgccgcagtcgctgccggctgctccgagcttgccgtcgctcccctctttgctcctctctgctgttttcatctcccgctgattgcctttcttgcttctgcttcacctgctgctccgcttcctaactggctcccccaccacactctacctacttgatgatattgacctgcgaccgccgcacactgccgcgcgcaacttggcaacaactgcaatgcc

SEQ ID NO: 4676 - DNA, 439 bp, Chlorella sorokiniana
  Clone ID: LIB3602-056-Q6-K1-C9
cgagggaccgctggagaacaagttccctgtggagaaccgcctgctgccccagggccccgccgagctcaaggcgcacctgcagcagcggcgggcagcgccctactgggcccgcctggccgacttccacctcctgctctacctcgctcgccagcccaactttgacgaaccggaggtgtcggtgctggcggatgcggtgcacaccaagcaggcggtgcccgagggcttccaaatcatcatcgactcaatggcgggcctgtgaggcgcagccggaccacgcttgcaggcgcctgatcgcagttggcaccaaaccggtgtaaagagcactcaatgcggcaatgagacgagctgcaggcgcatgcgtaacacacatgtaggcgggaatgcaagcgcacaggatgcagctgcagcggcatgcttgtcagcttaccaagccagcaga

SEQ ID NO: 4677 - DNA, 441 bp, Chlorella sorokiniana
  unsure (1)..(441): unsure at all n locations; Clone ID: LIB3602-056-Q6-K1-D1
cgaggaatggttcttgtacaagttccctgtggagaaccgcatgttggcggaggcgcacgacgcctactaggggggnctctagattgggacgcacacgctgtagtactcggacaactggatcaacttcacgctggaccagttcctgcccgacattgagggcgtgcgcacctggctcaacggctcgtgcggcatcccacacgacgtgatgactgggttccgcgcccccgactttgcggcaaacgacctcatgggcgacgcgctggccaagctgggtttccagtacgactcgtctgtgcaagagctggactacacgcagcgccccggccgcctggatgaccccaacttcaagctcaagaagtgcaagaaggacgtgtgcctgtcgtgggagggcctgcccttctgggaggtgcccatctactgcctgccgccctgcacgggccg

SEQ ID NO: 4678 - DNA, 442 bp, Chlorella sorokiniana
  Clone ID: LIB3602-056-Q6-K1-D10
cggagcccaccatctaccgcatgaagctgtgggccaccgacgccgtgcgcgccaagtccaagttctggtactgcctgcgcaagctgcgcaaggtgaagaaggccaacggccagatcctggccatcaacgagatctttgagcgcaaccccaccaccgtgaagaactacggcatctgggtgcgctaccagtctcgtaccggctaccacaacgcctacaaggagtaccgcaacaccaccctgaacggcgctgtggagcagatgtaccaggagatgggcagccgccaccgcgtgcgctccccctgcatccagatcatcaagaccgccacgctcacggcgtcccagtgcaagcgcgcggccacgcagcagctgcacgacagcaagatcagcttcccgctggcgcgcaaggtgctgcgcccctcgtcccgcaagttccgcaccacctt

SEQ ID NO: 4679 - DNA, 434 bp, Chlorella sorokiniana
  Clone ID: LIB3602-056-Q6-K1-D11
aaaaaaaaaaaatataaaaaaaaaaaaataaaaaaaaaaaaaaaaaaaaaaaaaaaaaaaaaaaaaaaaaaaagggaataaattaaaataaaaaaaaaaaaacaaaacaaaaaaacaaatcataaaaataaaaaaaaatgggggggcctttttaaagtttccaattttacttcccgtttcttgcaacgctatcttttttttttagggtccccaaattcaattcaattgcccgggttttaccaccctgaaaattggaaaacccttgagttccccaaatttattccttttgaaaaaattccctttttccccatttggattataaaaaaaaaggccctcacaatttccttttccaaaaatttgcccaccctaaatgtaaattggaccccccctttattccccattttaacccggtggtttttgttgtttaccccaag

SEQ ID NO: 4680 - DNA, 435 bp, Chlorella sorokiniana
  Clone ID: LIB3602-056-Q6-K1-D12
cgtgggcgcgtacggcggcaagaaggagatcatgaagatggtggcgcccgcgggccccatgtaccaggcggggaccctgtcgggcaaccccctggccatggtggcgggcatcaagacgctggagatcctgggccgccccggcgcctacgagcacctggacaaggtcaccaagcgcctgatcaacggcatcctggacgccgccaaggagacgggccacgccatgtgcggcggctccatctccggcatgtttggcttcttcttctgcgagggccccgtggcctcgttcgaggacgccaaggcagcagacaccgccaagtttggccggttccaccgcggcatgctggagcacggcgtgtacctggcgcccagccagtttgaggcgggcttcacctcgctggcgcacaccgaggcggacattgacgccaccatcgaggc

SEQ ID NO: 4681 - DNA, 444 bp, Chlorella sorokiniana
  Clone ID: LIB3602-056-Q6-K1-D2
gcctgccgcgccggtctgtgtatgtacaggagaagaagcggatcaacaaggagggggagctggtcatcacctcgcagcgcacgcggtcgcaggcggacaacgtggaggacgcgctggccaagctgcaggagatcctggatgcggcctggaaggcggtgcagcccattgaggaggacccggagaaggccaaggagatcaagaagcagctggagcgcggcaacgagcggcggctgcaaggcaagaagatgcagtcggacaagaagaaggagcggcgcgccaagatcgactggtgacgcgctcgcagcacgcatgtctggcggcccagcacctcaagaccgtcagcctcactcccttgtaccaatccagttttccatccctccccctttcattgacgcctccagctcacacccctcctgcccgcctcgccctggtctgaccggggtt

SEQ ID NO: 4682 - DNA, 441 bp, Chlorella sorokiniana
  Clone ID: LIB3602-056-Q6-K1-D3
gcggggcaacggcctgattgagctgcgccgcatcgaggcggcgcgcgacattgccggcacgctgtccaagtctcgggacgtggtgtacctgccttcgggcggccagaacatgctgctcggcctcaaccccagccagcagtaggctggcggggcacaccgctgaccacagcgcacgaggcacggtatgtgtggcatgatcgctaccctaacggcagctgccgactgccggcccgccgactgtggacctcgctgctcttagaaatgctataccgcttctgtcctgttttccgacaacgaacccacccaccgttgttgctcaatatgatccccttgcttctgccgtcgccggctgcattgagccggtgacgtctggggcgttcagtgttgcacccacccaatgtaaaccgcagagggagaaaaggaagcgcgcgccgaaaacgc

SEQ ID NO: 4683 - DNA, 427 bp, Chlorella sorokiniana
  Clone ID: LIB3602-056-Q6-K1-D4
gcgatgctttcgtgcgccggcgcagacaggctgcagacaggcatgcgcggtgcgttcggcaagccatttggtgtgtgcgcgcgcgtgggcatcggtcagatcctgctgtccatccgctgcaaggacacgcacgctgcggtggcggaggaggccctccgtcgtgccaagttcaagttccccgggcgccagaagatcgtggctagcaggaactggggcttcactccctacctgcgcgacgattacttggagtggaagcgtgagggccgccttgtgaacgacggtgtgaatgccaagctgcttggcaaccacggcccgctggacgcacgggagcccggccagattttcgagggtcctgcccgtctgtggcgtgtgccggtgcatgcctaacatgttgcttgggttctaaagatgtaacgaacatctgagc

SEQ ID NO: 4684 - DNA, 62 bp, Chlorella sorokiniana
  Clone ID: LIB3602-056-Q6-K1-D5
gcgcgcttgcctgcgcggcctgaacggcgaccccgatgtcgtgtagtgctcgcacgtggcct

SEQ ID NO: 4685 - DNA, 90 bp, Chlorella sorokiniana
  Clone ID: LIB3602-056-Q6-K1-D6
aaaaaaaaaaaaaaaaaaaaaaaaaaaaaaaaaaaaaaaaaaaaaaaaaaaaaaaaaaggccaaccactataaaagatccatttttaaaa

SEQ ID NO: 4686 - DNA, 160 bp, Chlorella sorokiniana
  Clone ID: LIB3602-056-Q6-K1-D7
cgaggacatgggcttctccctgttcgactgagcgcacacggcggctccgggcggcggcggcgcgcccgcggggtgagctttcctgcagctcgcgcaggctggcgcaccgccccgcccgcctctccccttgctacccttcgatgtaacgcgccgcgttgca

SEQ ID NO: 4687 - DNA, 227 bp, Chlorella sorokiniana
  Clone ID: LIB3602-056-Q6-K1-D8
cagctggcagccattaaagcaacgcactgtcggtgcagcgtttgcggcggcgtgtgccggatgcagccaggggcgaggctgccgcagcagtagcagatgagcggcggcgggcctgcccgcctgttgtgccgctgtgctgacgtatgctgctgctcaatagttcgcataacttttctgcagtaggctcgctggctgccgttccagatgctgtgtaacaactgcaggag

SEQ ID NO: 4688 - DNA, 439 bp, Chlorella sorokiniana
  Clone ID: LIB3602-056-Q6-K1-D9
ggcagcggcgggcggcgaggcggcggccaacggcgaggcgcccatggccaccgatgccgcccctgccaaggtgaccaagaagaaggtgaagaagcatgcggtgcccgtggccagccacaccgcggccctcagctccgagcagatggccaagctgtacgagatcgaggtggagctggccctgcaggcgcgcgtccagaacgagaccaacgacgccaagaacgcgctggaggcctacatctattcgctgcgcaacaagctgtacgacgcgctgtctcccttcatccgggaggaggccaagacgcagctgctggagaagctggagaacctggagaactggctgtacgaggagggcgaggaggagaccaagagcgtgtacgtggccaagctgggcgaggtcaaggcgctgggcgggcccgtggaggcgcgcgccgcaaaacgc

SEQ ID NO: 4689 - DNA, 90 bp, Chlorella sorokiniana
  Clone ID: LIB3602-056-Q6-K1-E1
gcgaaaaaaaaaaaaaaaaaaaaaaaaaaaaaaaaaaaaaaaaaaaaaaataataaaaaacaaaaaaaaaaaaaaaagagagagggcctc

SEQ ID NO: 4690 - DNA, 389 bp, Chlorella sorokiniana
  unsure (1)..(389): unsure at all n locations; Clone ID: LIB3602-056-Q6-K1-E10
cgcctgcctgcagtgcgactgagcaacacaccggcgcagctaaggaaagcactctcaagcgcatcaagcaaggcaagcagcatcaatgcagcaccatgctcgccactttacccacatgcccgtgcgtccaacactaattggctgcgcttccccgcccctgattctgatccttgcactctcaagaaccccccgttgatacccccctcgtgatgcttcctatctgtattcttgcccatccagtttttcttctctcccaatcactaacacacaggggagcccgcaagattgcgctgccgggccagcgctccacacgccgctcatatctgttccgattcactcccactcagttggctctctcctggcccagatgcctgttacacaacangatc

SEQ ID NO: 4691 - DNA, 441 bp, Chlorella sorokiniana
  Clone ID: LIB3602-056-Q6-K1-E11
cccacgcgtccggtacacaaccctgtttgacttcccaacgaagggcatcctgcaggaggcggtgaagcacacgcaatatgaccggctcaaggacagccagggcaaggcgcccggcctgctgggctggtggcccgagaaggcctgcacctttgtggacaaccatgacaccggctccacgcagcagcactggcccttccccagcaagcacgtgatgctgggctacgcctacatcctcacccaccccggcatcccctgcctgttctgggagcacagctttgactggggactggccgcagagattgacaagctggtggcgctgcggcagcgggcgggcatccaggccaactccaagctggagatcctggccgccgagaaggacatgtacgtggcccgcatcaacggcaacgtgacagtgaagcttggtccccgctatgacatggg

SEQ ID NO: 4692 - DNA, 441 bp, Chlorella sorokiniana
  Clone ID: LIB3602-056-Q6-K1-E12
gcctgtttgcctccgagcccaacgggcccttctccttctggccccgctccaccgacccggccaaggcggcggcgcagcagccggcgcgcggcaagaaggcggacaagccggccgccgctcccgctcagtcgagcctcgacacgtttgagcctgatgccccggtgggcgcgccccgcttccgctccgcgcttgagcaggtctccatctacaccagcgagcaggcgtacatgcatcgcaacgactgaagggctgccatccgcgcctgacgccacttgcggccgtattctttgacaactctggcccgccgcgccgccctccccgggggcggctgccccggcgcgcgacccaaagactctgcacagctgctgggcccgtctgcgtgccctacgcatatacacacccggtttttccagaccatttggtttttccacggcctagcgc

SEQ ID NO: 4693 - DNA, 444 bp, Chlorella sorokiniana
  Clone ID: LIB3602-056-Q6-K1-E2
cggacgcgtgggtttctgtatcatcttgcagcaatggcagccggctgcatctttctaacatcgtcaccggccgactcgtttgtgccatgcccacctgcctccaacgtcacccttcatcaaccctcacccaacccatccacctgccacccatccactcaccttccctccgccacaacctctgccacccactcaccacccatcacccgctcaacgccctccatgcaccatcctccccatccaccaaatctgccaccccaaacgcacgtccgccgctgcaccacctgccgccccctcacccgcacccatcttccacccgccacctttcctgccgctcaccgccgcacatcctacctcccacacctcactccatgtccacccttcacccgcgcttcacacagcggctgctgccatgcaaagctgctgccaaacccatccatcatgctc

SEQ ID NO: 4694 - DNA, 409 bp, Chlorella sorokiniana
  unsure (1)..(409): unsure at all n locations; Clone ID: LIB3602-056-Q6-K1-E3
acttcggtcatccgcggcgcaaacaacatgattggcggcatttcctttgtcatgattgccaaggcgctgggcgtgcagaaggccggtggtgcagaggaggcagcagcccctgcacccgccagcaccaaggacagcaagaagaagaagaagtaggcgcctctttttcccctataactctagaaggaggggaacaaaagtagactgcccaaacgtgcactgccttgcttgctctccgcccctgcttgccgcttgcggcgggagtgccgcccccacccactttgtacttgccaccccgctttacccaacctgttcccattctttccgagtgtctgattcccgcgttctgtcggctcccgtggcactgccaatcatccagctgctgatacttttgtgaaagccgagtgacana

SEQ ID NO: 4695 - DNA, 422 bp, Chlorella sorokiniana
  Clone ID: LIB3602-056-Q6-K1-E4
aaagcactcgcggttacatgggtctgcggacacgaaatccaagtggtggtagaggaagcgaagcgaagcgggggagtcagagaggagggtgcgccgaatcaaaacacaaggggggagcaggtggcaacggattggtgtttggggaaggtattgccgccgataaaattgcgtaggaaaagaggcgaggcggctgtggcgagccagggctgggctagcacagcccgccgtggcgccgggcgagcgccggccgccatcgaaaaactgcctacttaaggagagagcgggcgcgcctgccaatcaggccagggcgcgcgctaaaactcagcagcacgggcgccgctgtgggaaggtactgaggaaaacaattggcgggcctcggggagaggcggctggcggggggactgagggtggccgtgcgttgg

SEQ ID NO: 4696 - DNA, 400 bp, Chlorella sorokiniana
  Clone ID: LIB3602-056-Q6-K1-E5
gcgctttcatttttttttttttctaaagcactcactgttacatgggtctgcggacacaaaatccaagtgctggtaggacgatttaaaaaaagcgggggacccacagcacacgctgcccctaatcaaaacacaaagggcgagcagatggcaacgtattgccctttgtgagaaggtattgccccccataaaatttcctaagaaaagacgccaagcagctctcgcgacccattgctagtctaccacaccccaccgtggcgcctagcgatcgctccccgccatcgaaaaactgactacctaaggagagaccagcccctcctaccaatcataccatggcgcgcgctaaaactcaacagcacggtctcccttatgcaaaggtactgatgaaaacactttgccgacc

SEQ ID NO: 4697 - DNA, 436 bp, Chlorella sorokiniana
  Clone ID: LIB3602-056-Q6-K1-E6
caaaaaaaaaaaaaaaaaaaaaaaaaaaaaaaaaaaaaaaaaaaaaaaaaaaaaaaaaaaaaaaaaaaaaaaaaagagaaaaattaaaaaaaaaaaaaaaaaacaaaaaaaaaaaaaaaaaaaaaaaaaaaaaaattttttcccccccccccccttttaaaaaaaccaaatttaccccccccttctttcaaatttatatttttttttttttgcccccaaaattaaattcaccccccccttttttaaaaactctaaaattaaaaaacccttgctttccccaatttaaacccttttaaaaaaaaccccttttccccactttccttaattcaaaaaaacccctcccccaacccccttcccaaaaattttccccacttaattggaaattgaacccccctttttaatgacataaaaaaccgggggtttttttttttccccc

SEQ ID NO: 4698 - DNA, 442 bp, Chlorella sorokiniana
  Clone ID: LIB3602-056-Q6-K1-E7
gggtggggggcgatactgcgccctgcccgagccccctttggttttcctccacaacacatctgtcgcgattgggacgtccctctttacactgcacctggccagtcctgccctcctgaaagttgtcccacgccccgtggcatgcagccttgctccctggattcactttgagccagccagcgaaccgagcaactgcctcccttactaaccaaaaaaaaaacgttgcacctacatacacagaccgagctagatgccgttctagccgagccggccgccccttgcaagcgtttgttcgacggcggccgcctccctcccctctcccttgcacgcttttcagcgcattctaacatggcgggcccggcgcatgtgccggcagccccgcccttgcaaccgaatcgaaccaaccagtcgacagctagctgcctgtatccagctagttcacgta

SEQ ID NO: 4699 - DNA, 416 bp, Chlorella sorokiniana
  Clone ID: LIB3602-056-Q6-K1-E8
aaaaaaaaaaaaaaaaaaaaaaaaaaaaaaaaaaaaaaaaaaaaaaaaataatcaaaaaaaaaccaaactaacaggcgcatttttacaaacgctggcgctctcctatatcctccctctaaatacactttcctgcacccccttttcacatcttttttcaccgctaatactctgtcgactcccctcttaatcccctctctcacttcctacttacctcccctgtcccattttatttaagtccccaaccattcctccttcccaacctttcctaaccctgaatagcttataacccttccccttccccaacccatttacctcccttaattcttatagttatgcgcactgtttctaatattattgcccccgcccttgggcccgttccttcagctttcttccctaacttacctaccctttcccc

SEQ ID NO: 4700 - DNA, 293 bp, Chlorella sorokiniana
  unsure (1)..(293): unsure at all n locations; Clone ID: LIB3602-056-Q6-K1-E9
ggcagccgataaaaaaaacaaaaacaaaaaaacaaaaaaaaaaacaaaaaaaaacaaacacacaacaaaaaaaaaacccacaaagacaaattttaaaaaaagtggagctccccaccancgccctcacccaaattaacccactactcctaacataaccccaaagatcctcaaatctctctactatcaaccttaaaccaaatacatctttccccacctaccacaaaagctaagatgcccctacctacccaccttcccaacattatcacactctacatatcaaaaaacactcaccc

SEQ ID NO: 4701 - DNA, 441 bp, Chlorella sorokiniana
  Clone ID: LIB3602-056-Q6-K1-F11
agtagggcttgggccagatggtgctcaagacccagacctgccgcttcagcggcctcaggatctaccctggcgagggtgtgctgttcatccgcgtggatggccagcaattcctgttcctgaagcagaagtgccgctcgctgttcaaccagcgcaagcggcccgccaagcttgcctggaccaccctgtaccgcaagcagcaccgcaaggacctggaggcgcatgttgcccgcaagaagcggcgcaacgtgaacaaggcggccacccgctccgtggcgggcgccagcctggaggtgatccagaagaagaagagcgagaagcccgaggcgcgcaaggcctcccgcgaggcggcgctgcgtgagatcaaggagcgcgccaagaaggccaaggccgacaaggcggtgcagaaggcgcaggccaaggcctcgggcgccggcaaggctg

SEQ ID NO: 4702 - DNA, 384 bp, Chlorella sorokiniana
  unsure (1)..(384): unsure at all n locations; Clone ID: LIB3602-056-Q6-K1-F12
ggctgagaaggagagcgtaaactcgtcaccatggtggccgccaagaagaccaagaaggctcaggagagcatgagctcccgcctggcgctggtgatgaagtcgggcaagtacacgctgggctacaagaccacgctcaagacgctgcgctccggcaaggccaagctggtgatcatctccaacaactgccccgccgtgcgcaagtcggagatcgagtactacgccatgctgtccaagaccggcgtgcaccactacaccggcaacaacgtggacctgggtaccgcgtgcggcaagctgcaccgcgtgtccgtgctgaccgtcaccgaccccggagactctgacattgtgtccggcatgtaagcggcgcagcatggcnnnnnaaaaaaa

SEQ ID NO: 4703 - DNA, 426 bp, Chlorella sorokiniana
  Clone ID: LIB3602-056-Q6-K1-F2
ggcatgcccaagcagaacggcatgacccacctgcaggctggcgatgctcgcgctgaagaggcgtctttcattgtaaaggaccaacgaccccgccggcttcaccgtcgtggacgtcatggcctggggcgccctgggccacgctgccgccttctacatcctcgcaacctccagcctgggcctcgaccgcaaccccttctaaaccagtccacggccgcagcctgcgcccaggccacaaccccatcccgagaagagcatttgtccggcgctgtgcctttttctgttgggcatggcgactgcagccacgcatgtgatactgctatgtaaacgaccgcttgtgaaataaaaaaaaaaataaaaaaaaaataattaaaataaaataaattaattaataaacaaaaaagaaaaaatataccagaaaagatataa

SEQ ID NO: 4704 - DNA, 444 bp, Chlorella sorokiniana
  Clone ID: LIB3602-056-Q6-K1-F3
gcggggcgcccggcctccccaagacccgctccggcaagatcatgcgccgcgtgctgcgcaagattgcttcctttgaggaggaccagctgggcgacacctccaccctggccgaccccagcgtggtcgagacgctgctggagatgcgcggcaagtaagcgcacccccctgaggaggagaaaccctaagacgaatcgagcggccggcccggcggcggcgagcggcggcgcggtcgcccgcccgcccagcccgcccccggcgctgctcaggcgcccggcagctgcccacccccaaacatatgatgcatccacgtgcacttgttgttgattgtccccattcaatcccctgctcactgcccacccaacgacatccattccaatccatcccttgcactgcccgtcccgtctgagctgcatgcagctgggcggcgttttttgctgcgccgct

SEQ ID NO: 4705 - DNA, 305 bp, Chlorella sorokiniana
  Clone ID: LIB3602-056-Q6-K1-F4
cgaaaaaaaaaataaaaaaaaaaaaaaaaaaaaaaaaaaataaaaaaaaaaaaaaaaaaaaaaaaaaaaaaaaaagaaaaatttttaaaaagaaaaaaatatatcgtcgccttccttttttttccaaacttccttcctcttgcttcccgccttttaaacttttctttttttttaccttacatacctttctttgactcccttttttttacctccctctttttacatctttgccttccccctttttacttgttttgttgaaaatctcctttcctccccttgatttattccctaaaaacccttaccct

SEQ ID NO: 4706 - DNA, 443 bp, Chlorella sorokiniana
  Clone ID: LIB3602-056-Q6-K1-F5
gcgtgcccatctactgcctgccgccctgcacgggccggcgcaccaacccggtggatatggacggcatgaccgcggtgcagcgcctgcaagccgactttgaccgcaagcgcgggctgggcgtgcccacgctgatcatggctcacgagccatacctgcgggagcccggcaacgcaaccaatgtggtcaccttcctgaagtgggccaacgagcagcccaacacctggttcctcacctaccagcagctcatcgcctactactccgcgccggccggcacctccatcttcgatgtgatggacgagttcccctgcgacgaggcgtagagcatggcccattcgcacctggcccagcctctgagcctctccgcaagctagggctgccacagccagggcgctgcctatgcaacgccaaggccactggcgccacagttgctgccgttgctgtct

SEQ ID NO: 4707 - DNA, 443 bp, Chlorella sorokiniana
  unsure (1)..(443): unsure at all n locations; Clone ID: LIB3602-056-Q6-K1-F6
gcggctggaggccggccagctagctgaataggccaggatggagctgcaccaccgcctgcggcgtgaccccagctgggacccctcggcctgcaacatttgcgggcagctgggccaccaggcggcgcaatgcaccaccggcacggtgaactggcgggccatgtatggcgagaacgccttcactatccggcccgcggtgttccagtcagacatagaccgagccaagaaggccaagcaggtcaactttgaggacctggagcggcgggcacgcgactatgcaaagatgcggctggagggcccggcgccggcgcagcagccagcagcagcggcccccgcggcgcagcagccgccgcccggngacgaccccaagaagaaggcggaggaggagcggcggaaggaggcggagaaggacctgcccgagggctgggcggtggcgtttgacgcgc

SEQ ID NO: 4708 - DNA, 441 bp, Chlorella sorokiniana
  Clone ID: LIB3602-056-Q6-K1-F7
gggctcgacagctcgcagattgtagctgggagcggctagtggcccaggagctcggggtttcgctgggggacgatgctgcgcgcccttgccgccaagcggctcctccagcagctggcagtcgcgggggcgcccgcggtggctgtgcaggcgggcatggccgcgcctgccatgctgctggcggtgcgcggcgccaagacgaccaccggcattgtgggcctcccgctggtgccggatgctcgcaacgtgctgaaggagcagctgcaggcggtgctggatgccatccaggtcatccccgccgaggccgagtaccggcgcagcgtggagaagacggtgcggtggaagctggcggcggtggagagcgactcgcccgacgagcaggtggaggagctgctggggcggcagctggagtcggacatcaagctgtgccgggaggagctgacg

SEQ ID NO: 4709 - DNA, 138 bp, Chlorella sorokiniana
  unsure (1)..(138): unsure at all n locations; Clone ID: LIB3602-056-Q6-K1-F8
gaacacaacagctacacatattgtatctgggagccacttaatggcccattacctacaaagtttcnctcacaaatagatgcttttctaaaattggcggcgagcccctcctccaacacctagcantctctatggctcccg

SEQ ID NO: 4710 - DNA, 446 bp, Chlorella sorokiniana
  Clone ID: LIB3602-056-Q6-K1-G1
ggcgggccgctctcgctcagcgtctggctctggtcaagcccacccggggcgcccgcaagcaggtgacccgcgccgccggcgagttctacggccccgaccgcgccaagtggctgggccccttctccgagggctccgtcccctcctacctgaagggcgagttccccggtgactatggctgggacaccgccggcctgtctgccgaccccgagaccttcgcgcgctaccgcgagattgaggtcatccacgcccgctgggccatgctcggcgccctgggctgcctgacccccgagctgctgcagaacaacggcgccgctgacttcggcgaggcggccgtctggttcaaagccggcgcttcgatcttcaacgaggacggcctgaactacctgggcaacccctccctgatccacgcccagtccatcgtggctgtgctgctgacccagctggtg

SEQ ID NO: 4711 - DNA, 436 bp, Chlorella sorokiniana
  Clone ID: LIB3602-056-Q6-K1-G10
cgaagcgagcgcacgcagaagctgcgcgaggcggagatcaagcacgcccgcctggccatggtctccttccggggctacaccgtgcaggcctggtacaccggcgagggcgccctgggctccctcaacaagttcgccaacggcttctaagcagcccggcatgacgacggcctgggcctagcgcccggccgctttgcagccacttgcagccggcccctttgcggggccacccccacccaacacccctttcatgagaagattaacaccctgccatcgctcccttgctacgcctcccccgcccgtgcgctctctgcatcggtcgttctgtttgcctgcgggcgcgcttgctcccgggcgccccgcagattttgcatctgctcgctcgtgtgctgtcaggagtcagcggttgtatgatttcctgttgtaattcgtaacgttc

SEQ ID NO: 4712 - DNA, 439 bp, Chlorella sorokiniana
  unsure (1)..(439): unsure at all n locations; Clone ID: LIB3602-056-Q6-K1-G11
gcggaagcagacccgtgccggtcagcgcacccgcttcaaggcgtttgtggtggtgggcgactacaacggccactggggcctgtgcgtgaagtgcgccaaggaggtggccaccgccatccgcggcgccatcatcctggccaagatggccactgtgccggtgcgccgcggctactggggtaacaagatcggcaaggtgcacaccgtgcccaccaaggtcaccggcgagtgcggcagcgtgaccgtgcggctgatccccgccccccgcggtgccggcattgtggcggcccgcacccccaagaaggtgctgcagatggctggcattgangactgctacacctgctcccgcggttccacccgcaccctgngcaactttgtgaaggccaccttctacgccctggccaacacctacggattgctcacccccgacctctggcgcgag

SEQ ID NO: 4713 - DNA, 439 bp, Chlorella sorokiniana
  Clone ID: LIB3602-056-Q6-K1-G12
gccggcagcgccggcagggcagctggacgatcagggcaggcggcggtcgcgctggacagaggagaggggcgaccaggagtttggtcaggagtttggccagcagccgccaggcggcatgctgccgccgcccggggctggtcagccgccggctcccgggccaatgggtcccatgcaccgtgcaggcatgccgcctccttcggccatgccaccgcagcaaatgccgccgcccggcatgcagccgcccatgcagccgcagcagcagccgcagcagtatggtgggccgccaggcagcatgcctatgcagcagccgcagtttggcgggccgcccggcagtgtgccgatgcagccgcagcagtttggcggtgcgccgccgccgggcagcatgccgttccagcagcagcatgggccgggcggcctgccgccgccgccgccaatgcag

SEQ ID NO: 4714 - DNA, 322 bp, Chlorella sorokiniana
  Clone ID: LIB3602-056-Q6-K1-G2
tccgaaacaataataactaaaaaaaaaaaatctaaaaaaaccccccaaaacacccaaaacaaaaaaacccaaccgagagaaattataaaaacgaaccgccccatccctcccccttctccaggctcctccctccttcctaacctagctcccttactatcctgtacacctccttctctctccacccccaaccttctgcactaccctatattacgcattcactccccctgtccattctctcttccttacttgctgtaccccgaacttctcacaccaactgccccttttactaatgccaagccaacacctggctaaaaccccactc

SEQ ID NO: 4715 - DNA, 442 bp, Chlorella sorokiniana
  Clone ID: LIB3602-056-Q6-K1-G3
gcggcgggccgaacgctgtacccgccagacctgttcagggccatgcgcagctaccactacctgcggcccggctgagggggctttctgctcctacccctgcctagctcactgctcttgctactttgctgctcttttcgcccttggcaatacgctcttggttgtgttggttgtcttcctgcacccctgtccttgctcattgctcttccaaattgctgctcatcctgccctggatgtcgacctgttgccttcccccatgcgcccgacagctgcgcccctcattccttgatcctctagcttttattgcacaacaagccttgcactgcttcttcctacccctgttgattcgtgcatccccttgcatctgtccttccacgccgcttaacctgaccctagccgagccaggctgctgcagccgccgcacgcctggccggccggccccaga

SEQ ID NO: 4716 - DNA, 247 bp, Chlorella sorokiniana
  Clone ID: LIB3602-056-Q6-K1-G4
gcgctgagttgcagcacgcgatcatgcgtcacttcttgcctcttttgctcctttgagttgccagcttcatgtccagatgcaaatgaacacgggaaaaaaaaaaaaaaaaaaaaaaaaaaaaaaaaaaaaaaaaaaaaaaaaaaaaaaaaaaaaaaaaaaaaaacaaaaaaatgggacgacataaaaaaatatatagggttaactaaaaaaaaaaaaaaaagacatatactttacaatgatgagacat

SEQ ID NO: 4717 - DNA, 444 bp, Chlorella sorokiniana
  Clone ID: LIB3602-056-Q6-K1-G6
gcgcgagtcgctgttcggcgccttccatgcctccatgctggagaacctggccaacttcccccaggcaagaagtgcaggtggtctaagtagggtttgaatgcaagggagtggttcggagcatttgcatgtcgccgtgctggagaacctggccaacttcccccaggcaagccatgctgattgagttaggggttgattacaaccatgcgcaagggaatggttcggagcacttgcatgtgacctctgtgctgggaacctggccgacttcccccagtgataaaactggagccagctaacggcagagcccagcctcaaaccttgcaagagcggcagccagctgatgtggtgcagagtgcttctccgggggcgccagtgtgtgtggtccatcagccgtgcagtgcgcctgactgttagactgctggcaacccattcttgcagggccctgct

SEQ ID NO: 4718 - DNA, 443 bp, Chlorella sorokiniana
  Clone ID: LIB3602-056-Q6-K1-G7
gccgtgctcatcaagaacaccctcctctgagcggcttgaccaaccctggtggtgtgacgcggcccgcggctggcagcccgcgcccgcagccgcccgctcgctgctgcttcttgcaagcagcccctagatagcgagcaggcggcacggaagccgggcagccagccgccgcagcttacctgtccatgtgtgcgcctcggcgtgctgttgcagttaccacccgtattttttccctcggttggcgcgcctcccgtgcgtgtactctcccctcccacccttgacggcgacgcgcgcccggctgcccacgcgccccgcgcaattttatgagccctccgcctttcatcgcagccgcgcattgataagcgacctgagcagaacctgccccctgccgcccccggcaggcgggtgcccctcatttcattcctttccgccgcacaggccgcaac

SEQ ID NO: 4719 - DNA, 445 bp, Chlorella sorokiniana
  unsure (1)..(445): unsure at all n locations; Clone ID: LIB3602-056-Q6-K1-G8
gcgaccctcaccaaggcctggggctccctcttctccggcaccagcggcttctaagtttggtgctagccagcaggcgtcttgggtgttaggcagcagacttccgactggtgtcatccagcaggcttctaagtctggcatcatccagcagctcctgacttgaagcttctaacagccacgtccgttgttcccagcagccacggctttcaaggcggctgccatccttcaggcctcggcgctgcttttcctggcggcggcagccgctcttcaagccggagccaagctgctctgttcctcttccaccaccccatgcgcctncccgcccgacccaacacccgccaaagcccgcactctctccctctaccccagcagtttgatggactgcagttgcagaatttattgggcagacttcgcccgcatgtgccgccccccagttttggcaagcgct

SEQ ID NO: 4720 - DNA, 434 bp, Chlorella sorokiniana
  Clone ID: LIB3602-056-Q6-K1-G9
ggggagagcacgatgcagatcttcgtgaagaccctcacgggcaagaccatcaccctcgaggtggagtctggggacaccatcgacaatgtgaaggccacgatccaggacaaggagggcattccctctgaccagcagcgcctgatcttcgccggctagcagctggaggacggccgcaccctggcagactacaacatccagaaggagtctacgctgcacctggtgctgcgcctgcgcggcggcatcattgagccgtgcctgcagatcctggcccgcaagtacaaccaggacaagatgatctgccgtaagtgctacgcccgcctgcacctccgcgctgtgaactgccgcaagaagaagtgcggccacacctcgcatctgcgccccaataagaaactcaagtaaactactcgcttcggaacgagcggaagcggcatgag

SEQ ID NO: 4721 - DNA, 337 bp, Chlorella sorokiniana
  Clone ID: LIB3602-056-Q6-K1-H10
agaaattcccgagccaaccacacgcggccgggaagaagcatcctacaagctctgcaaggtgaagcgcctggcattcaacaagggcgacatcccccacatcaggacccattatgaaacgcaccatgcgctaccccgacccctagatcaaagtgaacgacacggtgatgctggacctgaagactggcaagatcaaggacttcatcaagttcaatgtgtgcaacctgcccattgccaccaaaggccacaacaacagccgtgtggtcaccattgtgcacaaggagaagcacaagggctccttcgacattgtgcacatcaaggacgcgaccggccacacctt

SEQ ID NO: 4722 - DNA, 281 bp, Chlorella sorokiniana
  unsure (1)..(281): unsure at all n locations; Clone ID: LIB3602-056-Q6-K1-H11
gcggcataaaagcgtgcacgcccccccttttattgttttcttctcttgagcaccagctctacttgggggctcctatcgctgcctctgtctgcagccatgcttgtttccctgccgacccctccaccgacgctgcccccacctttgtttcatcggacacccccttctttcattgcccggtacgtcacgggtggcataaaaaagatcaagaaaacaccaaaaacaaccaacactgtaaagctctgcngcacanaggctacttcgacattgagcacaataaggac

SEQ ID NO: 4723 - DNA, 222 bp, Chlorella sorokiniana
  unsure (1)..(222): unsure at all n locations; Clone ID: LIB3602-056-Q6-K1-H12
gcggcattggtatctaaaacagtaaattttgcatgaaaaaaaaaaattaaaaatnggacggcctcccccacttggggggccactataaaaaaaccgtgcgctcccccaaccaaatcttctctgtcgaccactcgatccaactttacctgcacactgttacaaccaagtacctgttcaatcactatcggatccacaattacattgccaccagaaaacaccact

SEQ ID NO: 4724 - DNA, 240 bp, Chlorella sorokiniana
  Clone ID: LIB3602-056-Q6-K1-H2
gcggagcgagcgctgagcccttgctggccgcacctgaggcaggcagccattgctgactgccggggggcaccgggcggccacccgctgcccggcagcatgggcgaggcggcgtgagaaagagaggacttgtgcactgccacacagttttttggacacctgtgctgtaacatatacttgaggagaaaaaaaaaaaaaaaaaaaaaaaaaaaaaaaaaaagggcggacgatataaaagaacca

SEQ ID NO: 4725 - DNA, 446 bp, Chlorella sorokiniana
  Clone ID: LIB3602-056-Q6-K1-H3
gcggctgggtgctgcgctgcaccgcctgcttcctggtgaccaaggagatgggccgcctgttctgcccgcgctgcgggaacgcctccctggacaaggtgcagctggtggtggggccggacggcgcggagcagtacggcgtgcggcgcaagcacgtgctgcgcggcacgcgcttctcgctgcccaagccaaggggcgggcggtacaacgacctcatcctgcgggaggaccagctgctggccaaggcgcaccggctgcgtgcgcggaagaaggacaaggcggagctggacccctttgcgcccgagtacggcgaggacacgtggcaccaggcggccggcatgcaccacggcgccaagggagcggcggcgctgctggctgggtggaagaacaaccccaacgagcgcaagcacattgccaccaaccggcggcgcaagtgagcggcggcgcgc

SEQ ID NO: 4726 - DNA, 98 bp, Chlorella sorokiniana
  Clone ID: LIB3602-056-Q6-K1-H4
tggtgcgaaaaaaaaaaaaaaaaaaaaataaaaaaaaaaaaaaaaaaaaaaaaaataaaaaaaatggggtaaaaaaaaaaaaagaaattttttaaaaa

SEQ ID NO: 4727 - DNA, 447 bp, Chlorella sorokiniana
  unsure (1)..(447): unsure at all n locations; Clone ID: LIB3602-056-Q6-K1-H6
gtgcgatgagatctgggtggtggacaagggcacggtgcagaagtgggatggcgacatcgtcagctacaagcagcacctgcgccaacagcatgctgcgcttgcaaagcgcgatgacatgaagtgaggcggcgttgcggccaactccgcccctgcccacacggcttatgcaccgncaaccgngcccagccggcgcctccacagcttaccctagatgcttgttgatagactgatttgatgggggcttccctcccgcctctgctgcacacttccatgcgggctggggctgcctctgctttgactgtttcaaccactctgctcattgctgcttcgcttgtgcgtttcttggttgcttttgctctgctacgtttcgttctgctcctgctcccgctgctttgtctgctcacttgcttcgcatcaattcaactgtgacgtaattacctgtccttg

SEQ ID NO: 4728 - DNA, 442 bp, Chlorella sorokiniana
  Clone ID: LIB3602-056-Q6-K1-H7
cgccatgcagctggacacggggctggtcatacaaaacctgaagcaggcgcaggccagcggcgcgcggggcgggccctcgcctcgcggcgtgcctgccgccatgaacccagaagtgctgctgcgcatcctgtgccaccgcgccgaccacgccgccagcaagtttctgaaaaaggactacaagatccccaagaagatccccggcagcctgtccgcctcggtcagcgatgtggcatccaaggcgggcggcctgctgcggcgcagcaagacgagcccgcgcacatgacgctggcatggcatgaccccaatcttcctgcgtgcgtcaagtttgtagctgcacagcggccatggccatagtcagcggctgcaggcttgaagctgcatgccggtggaggggaccgccgggagccagccgtgccggtcctcagttgaatggcactagata

SEQ ID NO: 4729 - DNA, 443 bp, Chlorella sorokiniana
  Clone ID: LIB3602-056-Q6-K1-H8
gctgcccgacggtcatgatgcggcgccgctgaagggcaaagccctgctgcccgcagaccagtgcaagcacatggacaaggaggtggccaagatgaggacggagggcacagcggcggtgaacaacgtgatcaacgccatgtggaccaagttcggcaccgccgcgcgggcactgacaatgaagcagtggcgcgcccaagtgcgcagcgcggggcggcgcttcatggcgcagcagaagaagaaagcagccgagggggaggcgcacatcgcgccgcgggcagtgcagaaggcgcagaaggaggaggagcgcaagcgcaagcgcaagggagagaagattgtgtctgtgaagaagctgacgaaggcgcgttgaggcggcggtggcagcggtgcagggccaccatgcgcaggcgggcgctcccaagagcctccgcctttctcacattgca

SEQ ID NO: 4730 - DNA, 440 bp, Chlorella sorokiniana
  Clone ID: LIB3602-056-Q6-K1-H9
ggaggaggcatcctacaagctctgcaaggtgaggcgcctggcattcggcaagggcggcatcccccacatcggcacccacgacggccgcaccgtgcgctaccccgaccccgagatcaaggtgaacgacacggtgatgctggacctggagactggcaagatcaaggacttcatcaagttcgatgtgggcaacctggccattgccaccggcggccacaacaacggccgtgtgggcaccattgtgcacaaggagaagcacaagggctccttcgacattgtgcacatcaaggacgcggccggccacacctttgccacccgcgtgaacaacgtgtttgtgattggcaagggcgacaagcccatgatctcgctgcccaagggcaagggcatccggcagagcatcctgcaggagcaggccaagctgtacggcaagtctgcctaagcgc

SEQ ID NO: 4731 - DNA, 170 bp, Chlorella sorokiniana
  Clone ID: LIB3602-058-Q6-K1-A1
gttgtgcgggggtttacacctccggggtgacccgggcaaaaaggatgggggggaaaaaaaggaaatgctcttctcacaaaaaaaaaaatttaatgttgtcgcgacagaggggggttctcctgttcacacgccaccaccgcgatataaatatcgtagaaggcggccgctct

SEQ ID NO: 4732 - DNA, 69 bp, Chlorella sorokiniana
  Clone ID: LIB3602-058-Q6-K1-A10
accccaactggtgcacgctcatccatcgtggccatcctgctgacccagttgtgctcatgggcctgattg

SEQ ID NO: 4733 - DNA, 55 bp, Chlorella sorokiniana
  Clone ID: LIB3602-058-Q6-K1-A11
catgaacacaacccccgcttgcgcgctagccagctgcaacagccaaatgtgtgcg

SEQ ID NO: 4734 - DNA, 339 bp, Chlorella sorokiniana
  unsure (1)..(339): unsure at all n locations; Clone ID: LIB3602-058-Q6-K1-A2
gcgcgagcacttcaggcagcgctgggagcaggctgctgacgaggcgatggagcagctgatggtctacccaaagggctgggacttctcctttgtgagcgacctggagggcaccaccgtctccaacatgctggagcacctgaggtgcttctaccctggctccattgccctgngggtgatggcgggcggcgtggagggcgagaaggcggnccgctacctcgagtttgcctccacatgaccaccgnctgcttcagctgtacaaccaanaccgctcgggcctgggcgccgagcgcatcagctttgacgaccagacgggcgaagtgcagctgatggattcccata

SEQ ID NO: 4735 - DNA, 476 bp, Chlorella sorokiniana
  Clone ID: LIB3602-058-Q6-K1-A3
cgcagctgcagcatcgcgtgagcccgcgcgacaagattgtgggctggttctcgaccggagacccagatgcctcccggagccgcgatgcgctcatccactccttctacggcaacgagtgccccaacccggtgcacctggcgctggacacgagcgggcagggcggccgcatgggcgtgcgcgcctttgtgtcgcgggccctgggcctgggcggcaacgagctggcgcgcgagttcctggaggtggagtgcgaggtgcgcagcgcggatgtggagcgcatcggcgtggatgtgctgagcagcgagctgcaggacaagctgccgggcgacatggagggccttgcggagagctttgagcggctgcagcacagcttgcaacaagcacaggcgtatgtcgatgcagtggtggccggcaagcagaagggcaacaccgcggtgggccgctacctggctgagaccgtggcggcggtgccccacttc

SEQ ID NO: 4736 - DNA, 484 bp, Chlorella sorokiniana
  Clone ID: LIB3602-058-Q6-K1-A4
aacatttgaaaaaaaaaaaaaaaaaaaaaaaaaaaaaaaaaaaaaaaaaaaaaaaaaaaaaaaaaaaaaaaaaaaaaaagaggaaaaaaaaaaaaaaaaaaaaaaaaaaaaaaaaaaaaaaaaaaaaaaaaaaaaaaaaaaaaaaaattaaaaaaaaaaaaaaaaaaaaatgggggggccctttttaaagaaacaaatttttttccccgttttttggcaatttttttttttttttttgggccccaaaattaattttccggggcccgttttttaaaccttgggatttgaaaaaaccttgttgttcccaattttaattttttttaaaaaatttcctttttcccaatttggttatattaaaaagaggcccccccatttctcttttcaaaaaatttggccccttttaatggaattttgccccccctttttaagggttttttaccgcggggttgtgttgttttttccactttgggtatctttttttttt

SEQ ID NO: 4737 - DNA, 490 bp, Chlorella sorokiniana
  Clone ID: LIB3602-058-Q6-K1-A5
agcgagcgtgccccccccggcctcctccctaggtgccccgccccgctggcggcgtgcccatgcactgcagctcacaccacccctaatgcacgtctgtccacccgccctcccgcccccactgcaatagccggctgcgattgcgcccatgtttcatgccggccgccccaacccacacacctcatccccctcccgttgtgtcccctgccagctgaggcccgctgctcggcccgtttttgcccaactttcttcgcatttggcgccgcagcgctgccgctgccgccgcgccccaaccaaccgcttttgcccgcgcgccgggccaccaatcaatcctaccactgccggccctgccggcatctgagcgccgcctgttttcgtcgcgagagaggctgccgctgcaggcccctgcagcgcacacgccgagagttctcagcttttcatgtgcccttcgcttttgtccccatccctgctcctgtgccctgaccgttgcgag

SEQ ID NO: 4738 - DNA, 488 bp, Chlorella sorokiniana
  Clone ID: LIB3602-058-Q6-K1-A6
cactggcagcagcagcggcgccgcggcaggcggcaagaagaagcgtcgcagcaagaaggcggccggcggttttgagatgggggtgggccccgcggcagcgcccgtcgcggcgtaagctgtgcggcgctctggcggagtggcggtgtgccatgcagcgcttgccgcccccgccggccctccctgctcttttgcccccttgcgctcacttctcttgtagcttcctttgccgccgcatgtgcgtgctcgctgtatgaacattcacgtttcattgcccataccaacgaatgccgttgcttcccctcagccttcttgaaccctccccccctggccccctgcaccgatttcaaagcttctcctccacctgcccctctctgcgtgccctcaccggcgtgcaacccccctcccagctgcaccctccctgagggtgcgctgggcctctccagttttgctaagccccacgcgagtcgacactcccaacacgtcatgac

SEQ ID NO: 4739 - DNA, 489 bp, Chlorella sorokiniana
  Clone ID: LIB3602-058-Q6-K1-A7
cggacgcgtggggtttgcctttggcattgtcatgtgggagatgctgagttggcagctgccctggggccggcgcgatccctggcagattgtgggcgctgtgttgcacggcaaccgcccggatctgccgcctgccgagcggctgccgggcctcaactctacagggcaggcggggctgcctgcttacctggacctaatgcacagctgctgggctcaggaggcagctgagcggccggattttgaggcgatcgttgtggagctgcgggggcagctggaggccgcgggcggcatgcagggcgggcccagcggcctgcacagcatgcccagcgtgtgcagcgcgcccagcggcatgcccagcacgcccagcgccagcattccgtagtgatcatggtgttttgcgctcggctttgcatccgatgcaaaggagtcctcggcagttgttttgagaagacatcaatccctgctgaagacttttcgcgtgcctccgtgtgg

SEQ ID NO: 4740 - DNA, 490 bp, Chlorella sorokiniana
  Clone ID: LIB3602-058-Q6-K1-A8
cggagccgaaggccgccaaggcccgcgggtccgacctgcgcgtccacttcaagaacacgcgtgaggccgccttcggtctgcgcaacatggacctgaccaaggccaaggcgtacatgcaggcggtgattgaccacaagcgctgcgtgcctttcctgcgctacaacggcggcgtgggccgcacctcccaggccaagaacgagggcaactcgattggccagggccggtggcccaagaagtcggccgagttcctgctgggcctgctgaccaacgcggagagcaacgccgagagcaagggcctggacgtggatgcgctgtacgtgagccacatccaggtcaacaaggcgcagaagggccgccgccggacttaccgcgcgcacggccgcatcaacgcctacatgtccagcccctgccacattgagctgatcctggcggagcgcgggcaggcggtgaaggccgaggcggaggacaagcgccgcaagctgagcaagaa

SEQ ID NO: 4741 - DNA, 403 bp, Chlorella sorokiniana
  Clone ID: LIB3602-058-Q6-K1-B1
agaagatcctggaggtggcgtacgtgaagcgcgtgattgaggaggcggacggcatccagccgcacttggtggcgcccgaggcgggctaccgccggctgctggaggaggcgctgggctacctcaaggaccccaccgagaagagcgtggaggaggtgtttgtgctgctgcgccgcatggtggacaacatcgccaacagcgacgacgtgcgcgcgctgcggcgctaccccacgctgcgccgcgagattgtgacggcggcgtaccgcgcgctggagaagttcaaggaggagacccgcaagatggtgagcatcatggtggagatggagcgcaactacatcaccgccgagtacttccgcaccatccagatgggcaagatgccggacgcaaggtgatgtacacgctgacg

SEQ ID NO: 4742 - DNA, 224 bp, Chlorella sorokiniana
  Clone ID: LIB3602-058-Q6-K1-B10
gctacgtgtggggccgcctgtggctgcccgccgccgtcaacccctacgtgccagctgtcatggaggcgctgctcacccccttctggctggcttacaaggtgttgggcccccgtctgacctggcgcatcctgcagcacccaatctttggcagctgggacatgggcaatatcattgtgggcaacctggcagtctggggtcaggcagccgctgctctgctggcggcg

SEQ ID NO: 4743 - DNA, 422 bp, Chlorella sorokiniana
  Clone ID: LIB3602-058-Q6-K1-B11
ggaagcgccccgcgtgtttagcctgcagattgcgtgggactccaaccgggcgagccccgccgagattgcagagacgctggcggctgtggatgaaacagtggggctgcaggaggtgtatcccgactctgctgccggcgcccggcgctacgcgctgcgctccatggtctgctactacggccagcactaccaggcgctggtgctggtgccggaggcgggcggctggctcatgtttgacgacacgcgcgtcacccgcgtgggcagctgggccgacgtgcggcgcaagtgcgaggcgggccgcatccagcccagcgtgctcttctacgaggcggcgtgattgggaaccgggctgcaagcttgttgcaaatagactggggtacttgctgccttgtatacttcagctaggcgtgtaagcacgcacctgc

SEQ ID NO: 4744 - DNA, 463 bp, Chlorella sorokiniana
  Clone ID: LIB3602-058-Q6-K1-B12
ccttgccgactgcagcagacatctgagcaaccatgggtaaggtgcacggctcccttgctcgtgccggtaaggtgcgcggccagacgcccaaggtgcccaagcaggagaaggcgaagacccccaagggccgcgcccgcaagcggctgcagtacaaccgccgcttcgtgaacgtggtggtgggcttcggcaagaagcgcggccccaacagccagtaagctgactgcggcgccagcagcagcggcaggcatgtgctgaacgcacggagcgcaagcgcgtcccgcgcacagccgccaccgaagcggcctgccagcgtcgacggcagcgaggcagcaaggcgcggcctggcatgctagcagcgcgtactgcgcgccacggcgctagcagccgcaccctggaacagcatcagcagtaattcagcagcccacctgcatgccgaacgctccgctgtaacaggttctcagga

SEQ ID NO: 4745 - DNA, 472 bp, Chlorella sorokiniana
  Clone ID: LIB3602-058-Q6-K1-B2
gcgagaaaaaaaaaaaaacaaaaaaacaacaaaaaaaacacaaataaaaaaaaaaaaacaaaaaaaacaaaaaaaattatttgcggggaatggcctccccctggtggagaaccacatttcatgtccctctccttcccaaatcttatctttcctttattgtcccctaattacatttacatgcccgtggttttacaacatgtcgactggaaaacccctgtcctttcccaacttaatctctttgaaacccatacccttttccccaccatggcgctttaacgaaaaaaccccgcaccactcgcccttcctaataatcgcgtagcatgaatgacgaatggaccccatcctgtcgctgtgcattaactacttccatagtggtgtttaccccctctttgacctttacacttgccaccgccatagcgcccgctattttcgctatcttcccttccttattctcaacgttgaccagctttcc

SEQ ID NO: 4746 - DNA, 495 bp, Chlorella sorokiniana
  Clone ID: LIB3602-058-Q6-K1-B3
gcgccgagtttccccggacaagagcgaggatgccgttcgccaggcaggtctccatcgggcgcgtggcgctcgtccagtacccggaggcggaggccggcaagctggtggtgattagcgatgtggtcagccccaacgcggccctggtggacttccccggccagacgcggcgcgtgatcagcttcaagcggctggcactcaccgacttcacggtggacatcccccgcctcgccaagaaggcggtgctgaagaaggcgctggaggaggcggaggttgaggccaagttcgccaagagcgcgtggggccagaagctggccaagcgcgcggccaaggcggcgacgaccgactttgaccgctacaaggcggcggtgcagaagatgaagcgcagcgcgcaggtgcgccgcgccttcaactcgctgaagaaggccgccaagtgagcggagctcctcgcagccgcagcagccgcccaattcattgcgcccggctcgccccctggtg

SEQ ID NO: 4747 - DNA, 488 bp, Chlorella sorokiniana
  Clone ID: LIB3602-058-Q6-K1-B4
catggagtttgcgctgagcaagagccgcggcgatgctgcttatctgcgggcgctcaaggaaatgatgcacggcgatgtgtgagctcgcagcagcctcgttaggccatttgcacgggaggtatgggtttctttagcccttctgcctactatttgcctcgcgtgctccttgcgatgcgctgcctgtgtgtgccccgtgtcgtgccgtgttttcccccatcccactgtccctgtcccccatcgtcgcactacccttgctgctgcgcattcattcgatctatcgcacccccgccggatgcacgttttgatgtaccatccatctgccgctagcgccctgcactgcaatttcgcttccatttggttggcctgcacatttgccagcccgctgctcgcgccttttcgagacgagccttgccatgcaagcaagcagccgcccaaacgtcaacaaccgacccctcttgcatttgagagccatgcacccctccccgacc

SEQ ID NO: 4748 - DNA, 56 bp, Chlorella sorokiniana; identical to SEQ ID NO: 645
  Clone ID: LIB3602-058-Q6-K1-B5

SEQ ID NO: 4749 - DNA, 407 bp, Chlorella sorokiniana
  Clone ID: LIB3602-058-Q6-K1-B6
aacccaagcaaccacctgggggcacacagctccatgtgttggctgccactcgacccctcccctgcccctgccttatgcacccacacaaggcacccctgccgtggcggccaacccctccccagaaccggcctgccgctcagtccctccccctgtcgtataactctgaactggccagcactcggtgtgcaccggccagcatccccagtcctctgcggcccccctgcatggtcattttcttgcatggccctgcatgagtcctccacccttctcctgcctccatccttctcctgccttgcaccactcgccgattgaaacacctctgcccactcccctgcatgctctgcctctgtttgccacgagctgagaatgcaacccatctggcagctaggctgtaatgttttgttgtt

SEQ ID NO: 4750 - DNA, 484 bp, Chlorella sorokiniana
  unsure (1)..(484): unsure at all n locations; Clone ID: LIB3602-058-Q6-K1-B7
ctttgtacctttctgtatcatcttgcagcaatggcagccggctgcatctttctaacatcgtcaccggcccactcggtggtgccatgcccacctgcctccaacgtcacccttcataaccctcacccaacccatccacctgccacccatccactcaccttccctccgccacaacctctgccacccactcaccacccatcacccgctcaacgccctccatgcaccatcctccccatccaccaaatctgccaccccaaacgcacgtccgccgctgcaccacctnngccgcccccttcaaccnccgcacccattccttccaaccccgccaaccttttccttgcccgctcacncgnncgcnacattnctaccctcccacacctcactccatgtccacccttcacccgcgcttcacacagcggctgctgccatgcaaagctgctgccaaacccatcatatgctcgcacacccataccacactcaacgatca

SEQ ID NO: 4751 - DNA, 489 bp, Chlorella sorokiniana
  Clone ID: LIB3602-058-Q6-K1-B8
cacggcccccagcccagcgccgcacgcagaggcacagctgacaggcagcgccacagcggccagcagtttttttggcgaggaagagcgcggccgggcggcagggagcaaccatggggctcacgttcaccaagctgttcaaccggctcttctccaagaaggagatgcgcatcctgatggtcggtctggatgccgccggtaagaccaccatcctgtacaagctgaagcttggcgagatcgtcacgaccatccccaccatcggcttcaacgtggagacggtggagtacaagaacatcagcttcaccgtgtgggatgtgggaggccaggacaagatccgcccgctgtggaggcactacttccagaacacgcaaggcctcatctttgtggtggacagcaatgaccgcgaccgcatcggcgaggcgcgcgacgagctgcaccgcatgctgaacgaggacgagctgcgcgatgcggtgctgctggtgtttgccaaca

SEQ ID NO: 4752 - DNA, 310 bp, Chlorella sorokiniana
  unsure (1)..(310): unsure at all n locations; Clone ID: LIB3602-058-Q6-K1-B9
cgtacgtgtacaaggcgaagaccgagaagaagggcagcaagtaccgcgtgatctggggcaaggtgacccgcgcccacggcagcgtcggcaccatccgggccaagttccagaagaacctgccccctgcggccatcggcagcaagatccgcgtgatgctgtacccctcccgcgtgtgagggtcggttgcttcccggagcagcagcggtgcggcacggcgcggcggtgacgagtcgtggcagtgcgaccccgctcggcacggccgcccgggtggcgccgccgtcgcctccatgtaacccttgattagccaana

SEQ ID NO: 4753 - DNA, 496 bp, Chlorella sorokiniana
  Clone ID: LIB3602-058-Q6-K1-C1
cgtttttgctgcaagacatgagcctaaaaaaaaaaaaaaaaaataaaaaaaataaaaaaaaaaataaaatataatttatcaggcgctattttttataaaaataaaatattccccaatatttcttttctttcttctttttttatttttttttttaattttttatttttttcttccccttttctatctttgttttctttttttatttttttttttctcttttttcttttttttctttttttactattttttccttttttatttcctttattactttttttcttcttttttctttttaactcttttcctcctcttattttttacttaaaatccctttttccttttcctttttcttcccttcttctattttatacttctttttttctctacctttttctatttattttctctcttttattcatctcctttctcctttattttttctctttccctttccctcttttattttttctttcccttgtttttttttttcttcttc

SEQ ID NO: 4754 - DNA, 458 bp, Chlorella sorokiniana
  Clone ID: LIB3602-058-Q6-K1-C10
gggcctggctgacgaccccgacaccctggctgagctgaaggtcaaggagatcaagaacggccgcctggccatgctctccatgctgggcttcttcgtgcaggccatcgtgaccggcaagggccccctggacaaccttctgcagcatttggaggagcccggggagttcaacttctacgccctgtacgccaactccctggcgtaagcagcttgtttggagcacctgcggcggccgaggcggcggcgctgagctggcgcaaagcgcggttggcgaccgccgccgcctcacgctgttgcccttgaccctcttccctttacgcgcttgcatgcgttcccgactccgctgcatgttgcctgtgtgtgcaattgtgcatcaggcaaaagaaacgagaagaaaactccacccaaacaccattttgcctgttgtaccatcctgtacgaaaaggaggctgtagtggtgt

SEQ ID NO: 4755 - DNA, 340 bp, Chlorella sorokiniana
  unsure (1)..(340): unsure at all n locations; Clone ID: LIB3602-058-Q6-K1-C11
gaacggccgcctcgccatgttctccatgttcggcttcttcgtgcagggcctggtgaccggcaagtcccccctggaaaacctggctgaccaccttgctgagccgtctgtgaacaacggcttcgcgtccgccaccaagttcctgcccctggcctgaacgccgtcgtcaacctggagcgacctgggcatcccatattaacggcggccagccggttttggacaagcacacacaacatatgagattcccaacctccctgcgcactgcttgtaacaatcctggctccctcttgtacccttgacccgcactcgggcgtggatatgtaacgttccgcgggacananna

SEQ ID NO: 4756 - DNA, 500 bp, Chlorella sorokiniana
  Clone ID: LIB3602-058-Q6-K1-C12
cccaaaaccccgcacccacacgccggctggcaggctggcccccaacttctcatggctggctccccgctgcccgacgggccagctggcactcgcgtcgcctttctaagggggggggcgcctcgcccacgcccagcggcggcggcttgggtgggccaagccccgccggcggcggtaccggcactggataccggccactggcctctgttcttccgcgcagcagcagtcttgctccagaggaggaggcatccagcgatggcgctcccaccctgcccagccgcctgcgaaaggtgctggtggcgtgctcatttgacaccaactttgcagatgtggaaggggcattgccgccagtcatcgcacaggcgccgctgattgtaacgccatccttctacagcggcctcaccagcccccgcatcccagcagaccgctctccgggcaagtgagcaagccacactgttcacctgcagcaaacgcagtcatcaaggggacgaaagcgcccataa

SEQ ID NO: 4757 - DNA, 191 bp, Chlorella sorokiniana
  Clone ID: LIB3602-058-Q6-K1-C2
gcggcaggctgccgtgtacagtgcgcagcagcagcaggcggccatgcaaggggctgccggaatgcagcggcttggcagcgggtcggcagtgctgatgcctcctgcgcccagctggccgcgcctgcctggtgcctagcaagcccacatgcacagaagctttttaggcaatgccgtgtaactgcttgtagccc

SEQ ID NO: 4758 - DNA, 239 bp, Chlorella sorokiniana
  Clone ID: LIB3602-058-Q6-K1-C3
gccggaaaaaaaaaaaaaaaaaaaataaaaaaaaaaaaaaaaaaaataaaaaaaaaaaaaaaaataaaaaattaaaaaaaaacggggttaaataaaaataacgtaatagggcccccctcttttttaatgcttccatatttttctcccccttccctgccaaaatataatttttttgtttgttcaaccaatttttaatccccgcgcctttttttaacaatgccatttctttttaaacccct

SEQ ID NO: 4759 - DNA, 494 bp, Chlorella sorokiniana
  unsure (1)..(494): unsure at all n locations; Clone ID: LIB3602-058-Q6-K1-C4
gcgggtgtgcagaagaaggaggttgcctactcgtccgctgcgctggcaggcgtgctgggggcgctgtgcctgtggcgcgggttccgcaacaacgatgacgatgccaaggagctgtgagctttaacacaatttctgacaccttttgtgtttgatgcgttgcacaactgatgggaacaatgagcaggacgcccaggcatgtggagacgggggctaaagggcagttgggggatgccgagctgcagcaggaggcagctggcggacagcaaacagcctgactctgaatgatttttgtgcacagcagggacgaggcgcttgtgcatcgccctgccctggcacacgctcctgacgcccttttggctttgatccgttgcatagcgcaaattcgactagcgttgctgtactgtaatcgtatggacacanaanaaaaaaaaaaaataaaaaaaaaaaaaaaaaaaaaaaaaaaaaaaaaaaaaaaaggggcggccgttctaaag

SEQ ID NO: 4760 - DNA, 491 bp, Chlorella sorokiniana
  Clone ID: LIB3602-058-Q6-K1-C6
cacatctggggccgggacgctgacgtggacgacgcgctgcccaacagctggaaggagcgcagcggacaggagaagcctgccacgcaggaggccaagctctagctgcggatgagacgcatgagcaatttcaggacgacgcactagctggctaccctcttttcggcgccgcacctgcggggatgccaaccgccgtcccctccctctctcgcctctgccccgctgcatgcgctgcgctgcccagcgcgtgctcgattactctgtatctgtcccgcggggctgcggcgctctgatgactgtgcattgactagctatggtaatgagtgctccgacaaaaaaaaaaaaaaaaaaaaaaaaaaaaaaaaaaagggcggccgtcgcgatctagaactaggtcggacgcgtgggcggacgcgtgggcggacgcgtgggcgcaaggacctggaggcgcaggttgcccgcaagaagcggcgcaacgtgaacaaggcggccac

SEQ ID NO: 4761 - DNA, 239 bp, Chlorella sorokiniana
  Clone ID: LIB3602-058-Q6-K1-C7
caagtacaagatgatcactccctcggtgctgtccgaccgcctgcggatcaacggcagcctggcgcgcgccgccatcaaggagctgctgggcaaggggctgattaaggaggtggccaagagccgcgcgcagcagatttacacccgcgcgacggcagccgccagctaagcagccacccagcagtttggcagcatgctagtgcactcgttgtgcttgccaatctggtaacaggtccctcgca

SEQ ID NO: 4762 - DNA, 488 bp, Chlorella sorokiniana
  Clone ID: LIB3602-058-Q6-K1-C8
ggcgggagcacagtcggtcgtgaaacacgcgcctccccacaatggccggcgagcgtgtgcggctctacgtcacgggccagttcctgggctacaagaggagcaaggccaaccagtacaaccacaccgcgctggtgaaggttgagggcgtgaacagcaaggaggagaccgagttctacctcggcaagcgcctggcgtacgtgtacaaggcgaagaccgagaagaagggcagcaagtaccgcgtgatctggggcaaggtgacccgcgcccacggcagcgtcggcaccatccgggccaagttccagaagaacctgccccctgcggccatcggcagcaagatccgcgtgatgctgtacccctcccgcgtgtgagggtcggttgcttcccggagcagcagcggtgcggcacggcgcggcggtgacgagtcgtggcagtgcgaccccgctcggcacggccgcccgggtggcgccgccgtcgcctccatgtaaccc

SEQ ID NO: 4763 - DNA, 461 bp, Chlorella sorokiniana
  Clone ID: LIB3602-058-Q6-K1-C9
cacatctcctcgtttccctgccgacctcccgcgcgtgactactttaaatgcacacgctcctgttgcgagcaccaccgactagcgaacgctctactcccactctcgcctgcgtctggcagcccttccatccacactgagcaaacgttgcgcggcactgcatgccgctgctctcccaactgcaccccaggcagcttgtgcctgagcacagctgcaccacaagcgtgaactctgtgcccaacttgcatggtgtgcagcgtctgaagcactgctgcccctgccaccccctgaatcactttggccgttctttgttaatcactggggatcatactgtactgggccgattcctttcatcattcattttctgtccactttgcatctcacctccaagcccagaccaccgcacacacagatcagcccttttcaccctgtcagcacagcaaggcttgcttactgttgagtcg

SEQ ID NO: 4764 - DNA, 79 bp, Chlorella sorokiniana
  Clone ID: LIB3602-058-Q6-K1-D1
gcgaaaaaaaaaaaaaaaaaaaaaaaaaaaaaaaaaaagaaaaacggtcgccgattaaaaacatataacaaatgggcgg

SEQ ID NO: 4765 - DNA, 488 bp, Chlorella sorokiniana
  Clone ID: LIB3602-058-Q6-K1-D10
gcgagcgcaagctggagcacaccaccaacgcctttgcgcaggacatcaccgccaagatggaggcggagctgcagcacgggctggccatgtgcgaggcggaggtgatggccttcatcgagcccctggagcagctgacggtggcagaggtgcggcgactggaggcggcggaagcggggcgggcagacctggtgggcagcctcgaccgcttgaagcagcgtgtggcaaacgtggagtgattctgatgcggtgcgcctgattggaatggcggcagcgctccgtgaaagcactgaaagcaccgggccaccggtggccgcccttcttctgtgccaattttcgctgctggaagagctgctgcgcgctcaggcacttccttacccttcgtcttgtgagcttgagccgcttgatccgaccctaacttaaccctcgtgctgctgctcgatttgggcctgcgtccagctgagcatgcccctgccacccagctgccctcg

SEQ ID NO: 4766 - DNA, 108 bp, Chlorella sorokiniana
  Clone ID: LIB3602-058-Q6-K1-D11
aaaaaaaaaaaaaaaaaaaaaaaaaaaaaaaaaaaaaaaaaaaaaaaaaaaaaaaaaaaaaaaaaaaaaaaaaaaaagaggaaaaaaaaaaaaaaaggagaaaaaaaa

SEQ ID NO: 4767 - DNA, 259 bp, Chlorella sorokiniana
  unsure (1)..(259): unsure at all n locations; Clone ID: LIB3602-058-Q6-K1-D12
cggacgcgtggggcagatcacctccatcagcatcgagccgggagtcgaggttgaggtcaccatcgccgacgtgtaagcagccatttcagctgtggaagctggtcgcacggtgcgcccctgaccgccgctggcgggcgggtcggnccttcggagccgcggccgccgccgcccgcgaggcaccccacttgccctgttccttgccatgcgctgctttgttcttcttggactggctgctcctggcattgtaacatgggcaagc

SEQ ID NO: 4768 - DNA, 491 bp, Chlorella sorokiniana
  Clone ID: LIB3602-058-Q6-K1-D2
gcgggcggtatgcaccctactgagcggccgcgccgccaaagttgaaccagcacagcaggtcacgcttttctgttcactttctgaacctcttcagtttgtttttgcctcttttcagcttggccctttttgcctggcacgtctcaccttcaccaaatctccaccttgccaacaccaacacccacacactggggcgaccgtgactgcatgttttacaactggacccccctgcacaatgccctctcttccggcgctgccctgccgtcctcccaagcttcgctcacaactccaaacacatgtaacctttttgcactgcagcgccctttaatttctccacatctcctcgtttccctgccgacctcccgcgcgtgactactttaaatgcacacgctcctgttgcgagcaccaccgactagcgaacgctctactcccactctcgcctgcgtctggcagcccttccacccacactgagcaaacgttgcgcggcactgcat

SEQ ID NO: 4769 - DNA, 491 bp, Chlorella sorokiniana
  Clone ID: LIB3602-058-Q6-K1-D3
gcgggcaggcgtgctgggggcgctgtgcctgtggcgcggcttgcgcaacaacgatgacgatgctaaggagctgtgagcttgagcacaatttctgacaccttatgtgtttgatgcgttgcacatctgatgggaacaatgagcaggacgcccagacatgtggagacgggggctaaagggcagtaggaggatgccgagctgcatcacgaggcagtttgcggacagcaaacaggctgactatgaatgatttttgtgcacagtaagcacaaagctcttgggcatcgtgctgagctggtacacgctgctgactccctatcggctgtgattcattacatagtgcagattcagactagcgttgttgttctgtcatcaggtggacacgcggccggacttgcttggcggcagcccgcgcggcacgcggcgggtccgtagtgcacggcccgacgagcgctgtgcggcggcgggggtgggcgttttaaaggatccaagtttac

SEQ ID NO: 4770 - DNA, 477 bp, Chlorella sorokiniana
  Clone ID: LIB3602-058-Q6-K1-D4
gcgctgtggcatggctggccgcgcaggcgtcgcagggctggcgcgccacgcgtgcccgagcgggccagctggccactcggagtcgcctggccttaggcggcggccgcctgcgccgaacgcccagcggcggcggcttgggtgggccaggccccgccggcggcggtaccggcactggataccggccactggcctctggccggcggcgcagcagcggtcttgctccagaggaggaggcagccagcgatggcgctcccagcctgcccagccgcctgcgggaggtgctggtggcgggctcatttggcagcagctttgcagatgtggaaggggcatcgccgccggtcagcgcacgggcgccgctgctgggaacgccatccttcttcagcggtctcaccagcccccgcaagccagcaaaccgatcgtcgggcaagtgagcaagccacactgttcacctgcagcaaacccagtcagcaaggggga

SEQ ID NO: 4771 - DNA, 490 bp, Chlorella sorokiniana
  Clone ID: LIB3602-058-Q6-K1-D5
catcctgtgggccttcctgctcctcttccgcgtctcgtccatcctggccctcaaggtgctgaatttccagaacaggggatacctagctggacgagaagagcgaatgggacgctctcggccgcggcccgcggcatgttgggaggcatctcccgcccaccttgctcccctcgcgcggcctgccgcctcagcaacgttgcggcacgccaatgaatacctcaagccttttgcaataagggggtgcctgcccgcccccgctgctgcgctttgctagcggagtgcgcggaatggaccgcccgctcgctcccgccttgttttttcccatttggcagccccgcgaccaatcagtaccgcctctgcctcgccctgcgccattcacaactcgaaaaatttcattcgccgcgtaggctgccctttgcttccacactttttttccactccctccttgtgccctgccagttctttcgaggacctctgcaaagcctttcctcgt

SEQ ID NO: 4772 - DNA, 307 bp, Chlorella sorokiniana
  Clone ID: LIB3602-058-Q6-K1-D6
ctacaatcaatcccgctccccgctgaccatgtctgcgctgtgccattgccagcttcccctgttgtttcaccgctgacgccaaccacactggcccgttgactggcatcctgccgtttcttgatgcatttctgtgccttctgcagccacctgcgtagagcaggcctttcatgactacaacaagcactgctctctgagcccttgccagcctgctttttgccatgctgcccaccactatctgccctgcctttagcgccttcttgtcctgacgagcaatgcacactatgcactttgtaaatcaatttatgcc

SEQ ID NO: 4773 - DNA, 488 bp, Chlorella sorokiniana
  Clone ID: LIB3602-058-Q6-K1-D7
gcttcccccaggtcccgtcggagccatcgcagcaaactcagccacgatgcaggccgctctgtgcagctcccagaccgcgtttgtgcgccccaccgtggcggccaagccccagcagcgcgcggctcgtgcggcccggcctgtggtgtgcagcgccgtgaagaaggagcaggtggctgccggcgtgaccgccgccgccgccgcggtgctggccaaccccctggctgcccaggctgctgccacccccagcctgaacaacctgatcggctccgtggtggcgggcggtctggtgctggccgccattgctggcgccatcaccgcggtctccaacttcgactccatccgccgctaagctatgcggactggtgtaccgcaccccgagaagagaatcaaccccttgcttgctaggccctgcttagagtttttgctgctcagcgctggggcgccggcgggacgccctatgtcggacaacacctgtgtgcactaaagag

SEQ ID NO: 4774 - DNA, 93 bp, Chlorella sorokiniana
  Clone ID: LIB3602-058-Q6-K1-D8
aaaaaaaaaaaaaaaaaaaaaaaaaaaaaaaaaaaaaaaaaaaaaaaaaaaaaaaaaaaaaaaaaaaaaaaaaaaaaaggggaaaaaaaaaaa

SEQ ID NO: 4775 - DNA, 494 bp, Chlorella sorokiniana
  unsure (1)..(494): unsure at all n locations; Clone ID: LIB3602-058-Q6-K1-E1
gcgtggggcgctgatgctgatggtggctctcgcagccacagtcggcgcggtgcatggaatcgcacagaacgccagcagctatgaattcgttagttagcggcgcaagctgctcagcagtctccatcgacgccctcacagccatgcagcgtgcagctgggtgtcaccaacagcgcgcacccaacgtgctgcgccgcaacagttggcggcgcatgcaatacaaaccatggaagccccttgtgcaccagcagaaatgtcagcactcccccttgatttgtgattcttccaaattgtacggaagcagcgcgtagcttgcttaccggcagtttttggcagcgtgagcgtgtgtgatcttgttttggcgcccatgtcgcggcagtggcagcattgccacataaacgatctcttgaagagtgtaaaggcagcctcaccaagtgtaacgattcgagttgaaaaaaaaaaaanaaaaaaaaaaaaaaaaaaaaaaaaagggcggc

SEQ ID NO: 4776 - DNA, 490 bp, Chlorella sorokiniana
  Clone ID: LIB3602-058-Q6-K1-E10
gcaggagggtaaagagcaaagatgccggcgggccagggctaccgcgcgcgtacgcgccacatgttcagccgcggctgcaggcagaagggcttcatcccgctgtccacctacctgaccaactacaagctgggtgactatgtggacatcaaggtcaacgccgcggtgcacaagggcatgccccacaagttctaccacggcaagactggctgcgtgtggaatgtgaccaagcgcgccgtgggcgtggagctgctcaagcaggtcaacgggcggtacatcaagaagcgcatccacgtgcgcatcgagcacgtgacccccagccgctgccacgaggagttcctgcgccgctgcaaggagaacgacgcggcgcggcacgcggccaaggtggagggcaagccgctgccggtgctcaagcgccagcccaagggcccccgcaccgaggccatcatgctggagaacgtgaagatggagaccatcacggccatcccctacg

SEQ ID NO: 4777 - DNA, 349 bp, Chlorella sorokiniana
  unsure (1)..(349): unsure at all n locations; Clone ID: LIB3602-058-Q6-K1-E11
tgcagcttatgcagcatcgttgcggctgtcccgctgttcacccctttgcctcacctccctgcccctgctagctccttcccctccccacaaatgaacccaacagctggcctcgctcggctgtgaaccagcccctaaccttgccagaacaattcgttcgcttcgcgcgcttgcaccctccatactgcaccgctgccgaccctccttcccttccctcctgcacaccaaaacaccctgctgcacacgtccctgccactcgcccggcgattgatcccgggagggttgaaccctccaacccgctgcgcggttttttcccttcaatttttgcagttgtaacatgtggcagcgccna

SEQ ID NO: 4778 - DNA, 445 bp, Chlorella sorokiniana
  Clone ID: LIB3602-058-Q6-K1-E12
cacgtgctgcgcatcaacaagatgctttcgtgcgccggcgcagacaggctgcagacaggcatgcgcggtgcgttcggcaagccatttggtgtgtgcgcgcgcgtgggcatcggtcagatcctgctgtccatccgctgcaaggacacgcacgctgcggtggcggaggaggccctccgtcgtgccaagttcaagttccccgggcgccagaagatcgtggctagcaggaactggggcttcactccctacctgcgcgacgattacttggagtggaagcgtgagggccgccttgtgaacgacggtgtgaatgccaagctgcttggcaaccacggcccgctggacgcacgggagcccggccagattttcgagggtcctgcccgtctgtggcgtgtgccggtgcatgcctaacatgttgcttgggttctaaagatgtaacgaacatctgagc

SEQ ID NO: 4779 - DNA, 492 bp, Chlorella sorokiniana
  Clone ID: LIB3602-058-Q6-K1-E2
ggcgggctttggcagacgccctttcctgccctactccacctttctgttcttcccgctgctgtacggcgcctcccgcactggcggacagtacgcggtcgccccggcggtggacatgcagcaggcggtgctgctggacaactctacgactgccattgcgagggtggacctgccgccgcctgaggccagcggcgtgcagccggtgctggtatccctgccgcacttcaacgagaccgcgcagtacgatgcaattgccaccatttcagagagcgaccttgcagtgaccgagggcctccagcaggcgatagcagaggtgatggcctggaatgacacagtcagcgccagcagcagcagcggcagccatagcctaaaggcccatgccagcgcggccggtgcgctagccgtggcggcggcagcgctgctgctgtggctgtgaggctggcccaaggcccctcttcgaatgtatgattcacctggcgagtgcgctgcctgcaa

SEQ ID NO: 4780 - DNA, 494 bp, Chlorella sorokiniana
  Clone ID: LIB3602-058-Q6-K1-E3
gcgtcacaatcagccccgcagagcccaccacatgctgaccagcagcagggcttcacccggtgtcgccgtgcaggccactggggcgcccaatcggctcggtccgctgcacaggaggcttcaacggctggcggcgtcgcagcagccgcagcagcaggccgcagcgcagcagcaggcggagcagcagcagcagcagtcgtttgtgagcgatgaggaacggcgcacgctgagcgccagccaggtggagttcctggaacgcaagcggcgggcggcggcgggcctggggcccatcttcccagacagctgcacctgcgagcgctgtggcggcagcggagcagcgccgtgccaccagtgcgacggcacgggcgtgaatgcgtcggacaaggcggaggagctgttccgcaacgagcgcaacgtgatcatccagcgcaacggcctggcagacaaccgttggttcttccaagccgatgccccctgctggctgtgccgcggcggga

SEQ ID NO: 4781 - DNA, 492 bp, Chlorella sorokiniana
  Clone ID: LIB3602-058-Q6-K1-E4
tctagatcgcgagcggccgcccgcgatctagaactagtcaagaccaaggctggcaccaaggccggcaccaagaagggcacccagaagcaggccaccaccaagaaggctgcccccaagaagtcttcctctggcgccagccagtggtacggccccgaccgccccaagttcctgggcccctacagcacgaacttcgtgcccagctacctgaccggcgagttccccggtgactacggctgggatacctctggcctgtcggccgaccccgccaccttcgctcgctaccgcgagatcgaggtcatccatgcccgctgggccatgctcggcgccctgggctgcgtcgtgcccgagctgctggacggcaccaaccacattgcctggttcaaggccggcgccgagatcttcggcgacgacggcatccagtacctgggcatccccggcctgatcaacgccaagtccatcgtggcgaccctgatcgtgcaggtggtgctcatg

SEQ ID NO: 4782 - DNA, 488 bp, Chlorella sorokiniana
  Clone ID: LIB3602-058-Q6-K1-E5
ggggagaagagcacctgttcctctgaggccatgatgtcgtactactacgacagccacacgatgctgagcgacaaggagggggagaacctgaaacaggagctgcagtgtgagggcactaaggtggtggtgctgagcaaggaggagaagatgcttctggaggcgcgcatggcgttcgcgcagggccgccccatcatgagcaacgaggagtacgacgccctcaagcgcagcctggcgggcagtagcgtgtacacgctgccgcgggaggggcccgtctgcacgctcgtcaagcccggagagcgcggccagaagcagggcgaggctcatactgactacaccaagatgctgctgctgaccgtgccgcccgcgctcattgttggcggcacgctgattggcgccgacctgctggagggcgctcccctcatgcacctatccagcaccatgggcgtggtagtgtggagctaactcatcctgccctcggcgtacgtgct

SEQ ID NO: 4783 - DNA, 490 bp, Chlorella sorokiniana
  Clone ID: LIB3602-058-Q6-K1-E6
gcttgcagtgggcggcgttgccgccatggcggcagcagccagcgccgaccccaatgcgctcgtgcggcagggcatgaacaagtttagagacaacgatgtggagggctcaattgaggcgtttgatgccgcactggcagcccggccagccatccggccctacctttggcagcgcggcttgtcgctgtattatgtcaagcaataccaagagggtgcacagcagttccgagatgatgtggcagtgaaccccaacgacacggaagagagcatctggacgtttttgtgtgaggcgcagatggtgggcgcagaggaggcgcgccagcagttcctggaggtggggcgggatccacgccctgtgatgcgcgccgcctacgagtgcttcaaaacaggggcccagcccgacgcaatcctgcaggcggcgcggggcgaccagcaggggcacgacgccttctatgccctgctctacgtgggactgtggcacgaggcgcatggc

SEQ ID NO: 4784 - DNA, 475 bp, Chlorella sorokiniana
  Clone ID: LIB3602-058-Q6-K1-E7
cctaacccctgcaccccggcccgcggcagccgggcgtgtgtaaacgcgaagccgaaaaaaaaaaaaaaaaaaaaaaagggaaaaaaaaaaaaaaaaaaaaaaaaaaaaaaaaaaaaaaaaaaaaaaaaaaaaaaaaaaaaaaaaaaaaaaaaaaaaaaaaaaaaaaaaaaaaaaaaaaaaaaaggggggggccctttttaaaaatcaaaatttaatttcccgttcttgcaaagttataattttttttttggggccccaaaattaaatttattggcccggtttttaaaacgttggaattggaaaaacctttggtttaccaaatttaaatcctttgaaaaaaattccctttttccaaatttggaaaaaaaaaaaaaagccccaaccatttcccttttcaaaaaatttccaaaccttaattgaaaatggaaccccccctttttcggccaattaaccccgggggttttgggttttaccc

SEQ ID NO: 4785 - DNA, 326 bp, Chlorella sorokiniana
  Clone ID: LIB3602-058-Q6-K1-E8
ctatgcggggctgtgctggagctggcccgtgctgtcaccgcaagcgccggcgatagcagtgacggaatcctgtccagtctgctgctcgcagccagctttgcagtcgcagcctgcacgcagctaacgtttgaggcacagcttgagctgtccagccgcaatgcataccgcatcgtggcggcggtgcagctggtgctgcaggcatcgcccagcctgctctccggcttgattgctgcagcgcaggacgccagtcaggaactggctccacagcatgaagtcctgcagacactctctgcgcactgctttgctgatgtgagagcagtggctgg

SEQ ID NO: 4786 - DNA, 413 bp, Chlorella sorokiniana
  Clone ID: LIB3602-058-Q6-K1-E9
gcgtcggcaccatccgggccaagttccagaagaacctgccccctgcggccatcggcagcaagatccgcgtgatgctgtgacccctcccgcgtgtgagggtcggttgcttcccggagcagcagcggtgcggcacggcgcggcggtgacgagtcgtggcagtgcgaccccgctcggcacggccgcccgggtggcgccgccgtcgcctccatgtaacccttgattagccaaaaaaaaaaaaaaaaaaaaaaaaaaaaaaaaaaaaaaaaaaaaaggggggggggagcaccgcctggggcagcgtggggtcgctgacaagcctgccgcgggccgtggagcactggcgcgggcttgaggcccgcccgccactggccgagagcagcccggttggatgccggctttccgcaacttgtaac

SEQ ID NO: 4787 - DNA, 489 bp, Chlorella sorokiniana
  Clone ID: LIB3602-058-Q6-K1-F1
ccaagtttttgtgcccggcggccgattttgaggggcgggtgactgggccagcccagccgctctccccacccaccctgccccattgacacactcccagcctggcgatgcgtgactccggttttggttcccttcaacaaaaaacagacgattccctcctgcctgactgtaccccgcactccgccgcagttttggtcgcgccctgtagccaagcccgctattttgcctagcgccgcagcgaagcttgcttgaccctcgagaccagcagcccaaccctctccctcagcagttgtttttattggcacgcccgccggcccggccggcgcagccggggccctctggcagagcccagtttttccgctgcgccgccggccgcaggcaccgccccgggaaactgccctccgatctgagactgtccgccctgttgtatctgccctctcagcctgcctgcctctgaaaagttgggtgccacgccgtgccacgctcgccatg

SEQ ID NO: 4788 - DNA, 483 bp, Chlorella sorokiniana
  Clone ID: LIB3602-058-Q6-K1-F10
ggaggcgcttcagctggcgcggcaggagcttgctgccaagcaggagccgctgcacggcaccctgagcggcattgcgtcagagtacatcgctctgtttgaggcgggcggggcggttgagcaccagatgcgctccgccactttcattctccacgacttcatgtgtaccagcgggcgggtgcttacggcgctccagaaggcgcgtgcggtgcgctgctgcatgagcgacgcaggcagcagcggccagcgcaccaccgtctatccagacctggttgccatcactagggagattctgtaccaccacagcctgctggagccagaggagtgacctgcacctgctgagtacggtacctgcacagcctgctggagactacgtagcgaaatgcttcaagtttagtaccaccgcaaatgctttccctgtagcaggagcagtgacgtgttttcacacgccggctgctgcacttgttgatgtttcacccaacttgc

SEQ ID NO: 4789 - DNA, 349 bp, Chlorella sorokiniana
  Clone ID: LIB3602-058-Q6-K1-F11
agagcctggaggggcgcaagctgtggatgaaggccactgtgagcgacggccccggcggcactgtgtacgccaccggtcgctcactgttcattgcgcccaagcccagggtatgagcgcattggcacgtactttggacgacgttcaatgctacatgcctatgatgcagccgagctgccgcacgtgacaaataccaacgaataatcagcctgcttgctgccctgccgctcgtgctgctttccagaaaaatcatcacttcaatttcatttcatgccacacctgctgtgtaaagcctgtccagcagcgctagcactggcacaaaggcgcacgattgatgttacataaactggcc

SEQ ID NO: 4790 - DNA, 487 bp, Chlorella sorokiniana
  Clone ID: LIB3602-058-Q6-K1-F12
gaggagtttgacccctcgccgcagggccagggctgcacagtgacgatgggcgactttgtgcgggacatcatgctggaccagttctactttgagaccatcttcccgcgagtgcccaagccagtgcatgacgacattgtggagaagctgaaggagatggacctgcccgccgccgccaagggcaacgccgggcagggtggccccgaccggcgcggcgtgggcgagggcggcggccggcccgcatccgtcaaggcatctttgtcggtggcattcggtcagcgcgcccccaaccgcgcgggtgcacgcgagcagggacgcggcatgggtgccgagctgcaagtgggcaagagcagcgggcgcgaggagcggccgcgggaccgcagcagggacgagcagcgcgagcagcggcgggacgactacaagcggcgcagcaggagccgcagcagggagcggtatgaccgcgaccggcggcgcgacgacagggacgatc

SEQ ID NO: 4791 - DNA, 351 bp, Chlorella sorokiniana
  Clone ID: LIB3602-058-Q6-K1-F2
gctgccctattccttgcagcctggccaacagccctaaacagccggcgtgcagcaggcagcacccccgagcgctggcgggtggctggaatcggcactgaaaggctggggcctcggctggctggccatccgcacattcgaggtgccgcacctcaaagcagcttgtggcgtgctgctgagtcagcaggagttgcgtcctgcgtttagacgcctgagaacggattcccggcgggtgatttttgtgcccgttcgacctcccccttcatgactcccgatcgacctccccccctcccatattatctttcatcttataaattcttctcataagaacacattattctatttaacaacaaa

SEQ ID NO: 4792 - DNA, 422 bp, Chlorella sorokiniana
  Clone ID: LIB3602-058-Q6-K1-F3
tcggtctagatcgcgagcggccgctctcgttctagatcgcgagccgccgcccttttttttttttttttttctttttttagggttttttttttcacttttttttttctttctttttttttttttttttttttagccaaaaaactttaaacattctttttcaaaaaacccaaattctttaaaattggaaaaatcccaaaacccccccccaaaattggtggcccccccctttcaccctatcaacacattcaaatcttttctttaccataaaaaatattacaacgatcttataaactttttttaattataaaaaatcattgttttttcggcccccacttattctataaaaaaaaagtcttaaaccccccaaaaacacaattcgcatcccctttttattggtaaaaaaaaattgaaaaatttttttt

SEQ ID NO: 4793 - DNA, 492 bp, Chlorella sorokiniana
  Clone ID: LIB3602-058-Q6-K1-F4
gcggcggcacgcagcccggctgcatgcagcgtcgactgtttgctggcgaccaacgagcacctgctgcctggactgcagatgggctgcgtgtacggcctgaagctcctgccagactggcgactgctcaccgccgatcacagcggctgtgtgcgggtgtggaactgccgggacttggtgggtgctgcacgccccacgctcacgctgcagggcgcattcgcacccagccgagacagcccagcggcggccctggtcgatgagcagggcgggccgccgaggccggtgggcatgcacagcgtggacgcctgcctgacgcacctggcagtggccggcagggacagcgttgtgcggctgtacgcttttgagtgagcagctggcagctcttggtgcacacctcggcagggctcagctgttgcctgcggcagggtggctgctgagctcccactgcccagctgatgcggcacggctgtcttgcttatctcctcactctgcttg

SEQ ID NO: 4794 - DNA, 480 bp, Chlorella sorokiniana
  Clone ID: LIB3602-058-Q6-K1-F5
gaggacggcagggctgccgtctggtggccctgcggccagcatgaaagctgccgccgctgtctgcgcaggccagctggcctgtttgcagcctgcaacaaagcctgcaacaaacgaacccctactctgtgtctatcggccaagatgactactaaacttgaccctcttgcttcattcgaggcgcctcgcccaaggctgcgccgccgtacgtgtaccgtcccactcacgccccttgctgtgtacccttgcctccccagcgcttgcgctcgagccattgatttgactgcctccccagtccctccccattgttccgacttgccggcaggtctgctccatcgtgccttgacttctctcttgtaccccaagcagcggcattggtgccgcctcagttgccacaaatgatttttggacttgttgtccccatgcgacccggcttgattgaattccttgcaacgactgttgtgacgtaactgtccatggcac

SEQ ID NO: 4795 - DNA, 487 bp, Chlorella sorokiniana
  Clone ID: LIB3602-058-Q6-K1-F7
cccacgcgtccgcggacgcgtggggccgatttactgccttgacgcccgcaccccttcaccctgccgattgatttgacacctgctgtccactctgtgcatgcctctgtacccgccctccactgcacctgccctgtacactacccgccgccccggctgctcgttccccctgcttgtcttgccgcggctcccaccgagaggcccgccccgcgggccgcccacgccgcactctgcccaacgaaccctccctgccatgttgtaccccagttttcctggccctcgccctctgtgttgcctgcgccgccctgccctgctgtcctgcacccctgtaccatgcctcgcctggcagccacgccctctgtacccctcgaggcggccccggcccctctgccgctttgccctgtgccctcctctcctatgtccgcacccgcacgaattgcttcatcccatgcctagatgcactgccgcaccaccatgtgattaacagaag

SEQ ID NO: 4796 - DNA, 487 bp, Chlorella sorokiniana
  Clone ID: LIB3602-058-Q6-K1-F8
gttgcatcctccgacgcccaatctgcgccacgatgcaggtcgccaccaccttcagcagcagcctggcggcgcgcaccgcccagcccagccgcgccggccgccgcagcagcgtggtcgtgcgcgctgagggcgccgacctggccaaggttgagcgcgtggccaaggtgggcggcctgtacaagaacttcaccagcggccaggccctgtcctacctggacggcaccctccccggcgactttggctttgaccccctgggcctgtgcgaccccgagggcgccggcggcttcatcacccccgagtggctgtcctactccgaggtgatccactgccgctgggccatgctgggcgcggctggcttcctggcccccgagatcctggccaccgctggcctgatccccgccacccccgaggaggccgtgtggttccgcagcggcgtgatcccccctgccggccagtacggcaagtactggatggacccctacagcct

SEQ ID NO: 4797 - DNA, 484 bp, Chlorella sorokiniana
  Clone ID: LIB3602-058-Q6-K1-F9
ggcggcgatttccaagacccgcaaggccgtcgccgatggcgtcttctacgctgaactcaacgagctcctcatgcgggagctgggcggggagggctactctggtgttgaggtccgcgtcacccccatgcgcacggaggtcatcattcgtgccacgcgcacgcagaatgtgctgggcgtcaagggccgccgcattcgcgagttgaccagtgtggtgcagaagcgcttcaagttcccggagggctctgtggagctgtacgccgagaaggttgccaaccgtggcttgtgcgccgtggcacaggcggagtccatgcgctacaagctgctgggcggcttggctgtgcgccgtgcctgctatggcgtgctgcgcttcgtgatggagagcggcgccaagggctgcgaggtgattgtgtctggcaagctgcgtgcgcagcgcgccaagagcatgaagttcaaggatgggtacatggtgtcgagcggcaacccg

SEQ ID NO: 4798 - DNA, 352 bp, Chlorella sorokiniana
  Clone ID: LIB3602-058-Q6-K1-G1
gcgctgggcggagcagcagtactggagagcggggcggcgtgggagatggagagttgctgggtggaggaggaggaggcagatgcgtgatagggtgctggataagaagctggatgcagtcagacctgcatgccctgggccctgctggtgtctgctggtcctacggcccaacaggcggtgcgccagctgccacctctctttgaccattgtgattgtacgtgcatcatcacatgtgtgcaatggtatgtataggcatgcaatcatcagcagaaaaaaaaaaaaaaaataaaaaaaaaaaaaaaataaatattaagtaattttataagaagtatgagtggaaataatgaaaatggca

SEQ ID NO: 4799 - DNA, 349 bp, Chlorella sorokiniana
  unsure (1)..(349): unsure at all n locations; Clone ID: LIB3602-058-Q6-K1-G10
gagggctttggccaggcgcccgtggcagcgcagcagggcggccgcaagctgggcaccaagcaccggtaggggtcaaccgagctgcagccgtgcgcacagcgccgcaccacaaacccttcactttgatacattgactggtataccgtgtcctgacgtcctcttgaccactgccgctcgacttccctgctctgctgctcccttgccctgctccttctgcctgccgtgttggcatttgttcacatacgtgttcgtttgcaacaatcaaatcaaaaaaaaaaaaaaaaaaaataaaaaaatataaaaaaaaaaaaaaaaaattaaaaaaaaaaaaaaaaaaaaaaaaaanaag

SEQ ID NO: 4800 - DNA, 280 bp, Chlorella sorokiniana
  Clone ID: LIB3602-058-Q6-K1-G12
gcggtgagcatggccacaaagatcagcgaggactacttggccaacatcctcaacctctgcgaccaggtcatcgcgctggccgagtaccgggcacaggtgtacgacttcctcaagtctcgcatgatggctgtggcccccaacctgactgtgctggtgggctagctggtaggcgcccgactcatcgcccacgttggctccctgatcaacctggccaatgcgcccacctccaccatccagatcctgagcgcggagaatgcgctgttcctctcgctcaagacca

SEQ ID NO: 4801 - DNA, 491 bp, Chlorella sorokiniana
  Clone ID: LIB3602-058-Q6-K1-G2
cgccaagaaggcgggcgtggacttcttccctcactgcgtccacctggtcagctgggagaaggagaacatctcgtccgaggcgctggaggcggcccgcatcgcggccaacaagtacatggtgaagaacgcgggcaaggacgccttccacctgcgcgtccgtgtgcaccccttccacgtgctgcgcatcaacaagatgctttcgtgcgccggcgcagacaggctgcagacaggcatgcgcggtgcgttcggcaagccatttggtgtgtgcgcgcgcgtgggcatcggtcagatcctgctgtccatccgctgcaaggacacgcacgctgcggtggcggaggaggccctccgtcgtgccaagttcaagttccccgggcgccagaagatcgtggctagcaggaactggggcttcactccctacctgcgcgacgattacttggagtggaagcgtgagggccgccttgtgaacgacggtgtgaatgccaagctgcttg

SEQ ID NO: 4802 - DNA, 491 bp, Chlorella sorokiniana
  Clone ID: LIB3602-058-Q6-K1-G5
aaccgcactcccatcctgtgtcccatccccacactgcgtgtatcgcttgcagcagagctcgccattctatgcatttaagcggctgggctggacattggctcacattttccttcgcaacatcacctggcggcaggcaatcggcccccgggcccacgggatggctagggctagcagctgtgcctctgacacatgacgtatgaccgacaagcaagttcgccataactaatgacacgtttcgtgcgcaccttactaatgactcatggtacgcgggctgtctcttttcggccccttttcaactttcgttcaagttggcagcgcttgccggcgcgcgatgcgcccagccctgccccccttttgtagcgctgctgttctgaacagccacttagctgtcctcattaacagccgacgagctttcacatagctttgttcataaacagcccactagcttcatcgaaagccgcccaaccttttcagtatgtctttctttggct

SEQ ID NO: 4803 - DNA, 135 bp, Chlorella sorokiniana
  Clone ID: LIB3602-058-Q6-K1-G6
aaaaaaaaaaaaaaaaaaaaaaaaaaaaaaaaaaaaattaagtaaaaaaaaaaaaaaaaaaaaaaaaaaaaaaataatcggggggcgatttctaaaaaaaaaaaaaaaagggccgccattttaaaaaatcaaaat

SEQ ID NO: 4804 - DNA, 508 bp, Chlorella sorokiniana
  Clone ID: LIB3602-058-Q6-K1-G7
ataaaaaaaaaaaaaaaaaaataaatatattaaaaaaaaataaataaataaaaatttatatataaaataataaataaatattaaatactaaggagaaattttttaaaaataaaaaaaaatctctattattatttattatttattttattttttaaaattttattgggccccccctttttaaagttcccatttttccttcccttttttccctattttttttttttttttttttccccctttttttttttcctttccccttttttttccccccttgccttttaaaaccccttctttttcccccttttttccctttttcacccttcccctttttccccctttgttttttttctaaaattccccccccttttcccttttcccattttttccccccctttttttgttttttccccccccctttttccccctttttaccccccttttttgttttttttcccccccttttccccttttttttttcccttcctttacccccctttttttttttttt

SEQ ID NO: 4805 - DNA, 486 bp, Chlorella sorokiniana
  Clone ID: LIB3602-058-Q6-K1-G8
gcgctgaccttcgaccagctgcaaggcctgacgtatctgcaagtcaagggcacgggcattgccaacacctgccccactctggacagcggctcctccaatgtcaaggacctgaagcccggcacctacaagctgggcaagttctgcatggagcccaccagcttcaccgtgaaggaggagtctcagttcaagggaggcgacgcggagtttgtccccaccaagctgatgacccgcctgacctacacgctggatgagatgagcggccagttcaaggttgacggcagcggcaatgtggagctcaaggagacggatggcatcgactacgcccctgtcaccgtgcagctgccaggcggcgagcgtgtgcccttcctcttcagcgtgaaggagctggacgccaagggcaatgctgatggctttggtggggagtttgtggtgccctcctaccgtggtgccaccttcctggaccccaagggtcgtggcgctgcgact

SEQ ID NO: 4806 - DNA, 397 bp, Chlorella sorokiniana
  Clone ID: LIB3602-058-Q6-K1-G9
ggggaatcgccgtgcgctgcgaccacacagacgattcccaggtggaggcgctgtttgcacgagtgcagcaggagcaggggcggctggacttgctggtcaatgcggtgtggggcggcaacgagctgccctccctgcaatcggattggggctgcccctgctggcagcagcaggaggggccggcggccggctgggaggccatgttcaccactggcgtgcgccctgccctgatagcctcgcaccacgcggcgcggttgatggcggcgcaaggcagcggcctgattgtcaatgtgacgtatgctttcccacacgagcaaggcaatcggtacttgggccacctgctgtacgaccttgccaaagcttccttgtccaggctggcgtttggtctggctgaagagct

SEQ ID NO: 4807 - DNA, 105 bp, Chlorella sorokiniana
  Clone ID: LIB3602-058-Q6-K1-H1
aaaaaaaaaaaaaaaaaaaaaaaaaaaaaaaaaaaaaaaaaaaaaaaaaaaaaaaaaaaaaaaaaaaaaaaaaaaaaaaaggggaaaaaaaaaaaaaaaaaaggg

SEQ ID NO: 4808 - DNA, 491 bp, Chlorella sorokiniana
  Clone ID: LIB3602-058-Q6-K1-H10
gggacacatcgctagcctccagccttaagaagatcgacatcagcaagcagggcctgaactccatccagaatgagaccgtgaagctcaacctgatgggcaagtccaagaccatggagagcaaggactgggtggacccccagggccgcaagggcaagggctacggcgtgtaccgcttcgccaacaagtacggcgccaacgtggacggctacagcccgatctacacccccgacacctggtccgagtctggcgactcttacaagctgggcaccaagggccttattgcttgggccggcctgattgtggtgctgctgggcgtgggcatcaacctggtgatctccacctctgccctgggccagtaaatggcgacgccccccgcgtcggcagcagcagcagcagccagcagcattcccttgcagctaccccccgagaagacaaaccctcaccctaccctagctggcggcgtcaccatgcgccgctcccttgctttccgt

SEQ ID NO: 4809 - DNA, 481 bp, Chlorella sorokiniana
  unsure (1)..(481): unsure at all n locations; Clone ID: LIB3602-058-Q6-K1-H11
gcggccacggccaccacgacagcgtgacgcatgcggggctgaccatccacaaggccgccaagtggcacaagtacaccggccaggcgtttgcgggcctcatgtggttctgggtgttctaccgcttctacaacgactttgacacgtttgtgtacgggcatgcggcacacctcgaccacgagctgcatgaggaggagcacggcagccacgatgacaagcactgagccaggctggtgcacgctgctgccgtgaacacggcagcagtgctagccttggcgcatgccgagcacttagcccctctggccgctgccgtccccttgcctgctttgtccctgcaatgtttcccgctcccgctccctgctccccctgttccaatctgctgctgcactgctccgctccatgctgccttaatcaaccggngcctgagcagggcctgaggcccgctggctccgaagcagcatgagcagcttccctgtacactgga

SEQ ID NO: 4810 - DNA, 489 bp, Chlorella sorokiniana
  unsure (1)..(489): unsure at all n locations; Clone ID: LIB3602-058-Q6-K1-H12
cccacgcgtccgacggcctgctctgcggcccttcatacctttgtacctttctgtatcatcttgcagcaatggcagccggctgcatctttctaacatcgtcaccggcccactcgtttgtgccatgcccacctgcctccaacgtcacccttcatcaaccctcacccaacccatccacctgccacccatccactcaccttcccttcgccacaacctctgccacccactcaccacccatcacccgctcaacgccctccatgcaccatcctccccatccaccaaatctgccaccccaaacgcacgtncgccgctgcaccacctgccgncccctcacccgcacccatcttccacccgccacctttcctgccgctcaccgncgcacatnctacctcccacacctcactccatgtccacccttcacccgcgcttcacacagcggctgctgccatgcaaagctgctgccaaacccatccatcatgctcgcacacccac

SEQ ID NO: 4811 - DNA, 490 bp, Chlorella sorokiniana
  Clone ID: LIB3602-058-Q6-K1-H2
ggcagagctgagcgccgctgcctcagggctgggcacagccagcagcagcacaaccagcagcgcaactagtagcagccggaatggaaacggcagcggcttcggcgccgcgcctgcagccacagccgccaaggcggccagcagcagcgccgctgagggcggtagcgcgagcggcaaggccagggcaaagccgccgccttctggaatgcgcaaccagctgcccagcttccgcaacgaaatcgacgaatggtagccgcaccaaacagtagtagcactgagcaaccagcgcatcagagcgaatcatatgaagactacggatgagtgtgcactaatacccatttttttcatttccccagcgcccatttcattcaagtttccctcggcttctgcgaactgaactccctcgtcctcccatactgaaaatgcccgtactaccggcggcggccgctaccccgcaccttgccccgccttgacgcatgctagcgctatgccg

SEQ ID NO: 4812 - DNA, 490 bp, Chlorella sorokiniana
  Clone ID: LIB3602-058-Q6-K1-H3
ctgggcatgaaggtggagaccaccaccctggagcagctgggcgtggcgcgcaagctcaccgtggccaacacctccaccaccatgatcgccgaccaggccaacaaggacgagatcaaggcgcgcatcgcccagatcaagaaggagctggccgagaccgacagcgtgtacgacaccgagaagctgagcgagcgcatcgccaagctggcgggcggcgtggcggtcatcaaggtgggcgctgccaccgagactgagctggaggaccgcaagctgcgcatcgaggacgccaagaacgccacctttgcggcggtggaggagggcatcgtgcccggcggcggcgccgcgctgctgcacctgtccgaggcggtccccgccttcaaggagagcctggaggaccctgaggagcggatcggcgccgacattgtgatgaaggcgctgcgcgcgccctgccgcgccatcgcggagaacgcgggcgttgagggcgaggtgattg

SEQ ID NO: 4813 - DNA, 380 bp, Chlorella sorokiniana
  unsure (1)..(380): unsure at all n locations; Clone ID: LIB3602-058-Q6-K1-H4
aggaggaagctgctgcaccagctcaaggagctgaagcaggagctgagcggcctgcgcgtggccaangtcaccggcggcgcccccaacaagctgtccaagatcaaggtggtgcgcaagggcattgcccgcgtgctgaccgtggtcaaccagaagacccgggacgctctgaaggaggcgtacaagggcaagaagtacgtgcccctggacctgcgcgtcaagaagacccgcgccattcgccgccgnctcaccaaggcgcaggccaacgccaagactgagaaggctgccaagaaggcgcgcgccttcccgcagcggaagtacgcgctcaaggcgtgaaggccttggagcagcccgctgcagccgtgcaggcacacctctatgca

SEQ ID NO: 4814 - DNA, 491 bp, Chlorella sorokiniana
  Clone ID: LIB3602-058-Q6-K1-H5
gcgcccacgcgtccgggcccagattgtccagctggcggcagtccgtctgcacaacagacggcgtgaatcagcacccgctcggggcgcttgcttggcgcgcctatgcaaggcatcctatagtggcccatgtcccctttgtaccatgccataaataccgcatgacctcgccctcttttgctgccctctggctgccgtgcgatacgcactgacccaccttcccaattatgctttgagcgcgcggagcccctcgctaacggcctgtgccggcgccgccgtcgcgaaaattaagcacataactcagaacaccgaccccttgcttgcactcgcatgccctctagctgcttttccaacctcctcagcctgttccccagcctgcacttatcccgacatcagtgtgcaccccacgattgcggcagcgctgctgtgccccttggctgtgggcggcgcggcaactgctgcgctgtacccatctaagccctgcccatctgtga

SEQ ID NO: 4815 - DNA, 415 bp, Chlorella sorokiniana
  unsure (1)..(415): unsure at all n locations; Clone ID: LIB3602-058-Q6-K1-H6
accttcctggaccccaagggtcgtggcgctgcgactggctatgacactgctgtggccctgcccgccgctggcgacgatgaggagtacctgaaggagaacatcaagtcggccggcgcaatgaagggccaggcagtgttctccattgccaaggtggatgctgccaccggcgagattgctggcgtgtttgagtctgtgcagccttccgacactgacctgggagccaaggcccccaaggacgtcaagatcactggcctctggtatgctcagctttcgtaagcgctgccagcgcccgtcgtttggagaagagaattacagctttgtcgctcgacctgtttgtcagacgtagaactgctcatgtaacataagcgcgcaggcnnnaaataataaataaaaaaaataaataaatgttcaccct

SEQ ID NO: 4816 - DNA, 416 bp, Chlorella sorokiniana
  Clone ID: LIB3602-058-Q6-K1-H7
gtgctgtccgccaagctggcgcgcagcgagagcggcggcgtggtgcaccacctgaagctggtgctgagccacggcaccatgcccgacagcacctacgaggtggaagtggccaaccccggcggcagctacaagctgcagtccagcaagcaggtcgtgacttgagccccacagccaggctaggggcagccaagaggaaacgaaacgcagccagggcaggcccccgcctcctgccgcagctagcagcgccagcctgcagatgccagcagccccccacccacgcagccgtcagtttgtcagcccacccatcatacctacgtgttcagagtgccattgtttcgcttcaattgctctgtctgttgtacccatcccctcagctgctgctgctgcgcatgtgccagtgtaatcagagtgcttgt

SEQ ID NO: 4817 - DNA, 488 bp, Chlorella sorokiniana
  Clone ID: LIB3602-058-Q6-K1-H8
agcagatggaggacctgattgagttcttcctggacacagaggcgcctgagatggagtttgaggtggcgcgctgccggcccatgctgggcgacgacttctttgcctacctcgaccgccggataggcctggagcgctttgcaaacgtgccggatgaggagcggctggctgagctggagacgctgcgggactatctgaaggaggcggtggaggcggtggacaaggcggccagcagcctggcggcgcccggggagaggctcaagcggctgctggaggcgcaggacaagaagcagtgcctcctggacatggcggccaacaacgagattgaccgggcgctgatcgacctgctggaccaaaacatcgagggcgccacggaggccaagcaggagaaggtggtggagttcatgaccaaggtgaagcaggcggcgctgcggtacatggtcaacaagtgaggctcgctcactcggtggctttttcaatggaagcagccg

SEQ ID NO: 4818 - DNA, 66 bp, Chlorella sorokiniana
  Clone ID: LIB3602-058-Q6-K1-H9
aaaaaaaaaaaaaaaaaaaaaaaaaaataaaaaaaaaaaaaaaaaaaaaaaaaaaaaaaaaaaaaa

SEQ ID NO: 4819 - DNA, 161 bp, Chlorella sorokiniana
  unsure (1)..(161): unsure at all n locations; Clone ID: LIB3602-060-Q6-K1-A1
cacgcccagcgccagcggaaccgagcccgggggcgccatatgggcactacttaagcctgccctggccgggacggaggggccaccgccatacgaatcaaatgcttacgccggcccctactcgagtggcaggnttttttatagggccacctaaattaaattca

SEQ ID NO: 4820 - DNA, 513 bp, Chlorella sorokiniana
  Clone ID: LIB3602-060-Q6-K1-A10
agcgcttccgcacgcttaccagctcatactaccgcggcgcccagggcatcattcttgtgtacgatgtgactcgggcggagacatttgactcgcttgcagacatttggctgcgcgaggtggacatgtacaacactgttgatgaggttcagaagatggtggtggccaataagacagacctggcggagcagcgcgaggtttccacggatgtgggggtgcagtttgcgcgcgcgcacggctgcctgtttgtggagacgagcgccaagggcaacgtggcggtggagcaagcgtttgaggagctggtgctcaagatcctagatacgcctagcctgttggcgtccagcagcagcacgtttggcctcaaggccaagcagccagaggcagcctcctcctgctgcggctgagggcagccccttgcaggccaaacccaactgcgcagtgcaattgcacgccgcggcttggtgcagcatgcatgcagcaggacaaagccgcgctgcattgtccccaggggctcgc

SEQ ID NO: 4821 - DNA, 461 bp, Chlorella sorokiniana
  unsure (1)..(461): unsure at all n locations; Clone ID: LIB3602-060-Q6-K1-A11
ggagcctgcaaatcgtttgccagcccttgctgcattgaagagccatcagccattttcgcaccaagcccgccgagttgcctggcacttgcatttcattaccgcctgcccgacattacgcttgcccgagttgattgtacctgcatttcaatccagagacacaccgcgcctgccaatcctcgcactgccggtttagtaccctgcaagttctgcatgctcttgcctgcaatgccggaccttggcgtgaagcagcaccagttgtaagtgagtgttgtgaaaaaaaaaaaaaaaaaaaaaaaaaaaaaaaaaaaaaaaaaaaaaaaaaaaannaaaaaaaanaaaaaaaaaaaaaaaaaaaaaaataaaaaaaaaaaaaaaaaaaaaaanggggggggcccttttaaaggatccaagtttacttccccgtgcttgcaaggtaaaaacttttttttaggggccccaaa

SEQ ID NO: 4822 - DNA, 366 bp, Chlorella sorokiniana
  Clone ID: LIB3602-060-Q6-K1-A12
gcggttccgcatcaccctgacctcaagaacgtcagagcctgagaaggtgtgcgcggcctgggcgcgcgcggggagaacagctcaggtcaagggccccgtgcgcatgcccacccggtgctgaagatcaccacccgcaagtccccttgcggtaacggtaccaacacctgggaccgttcgagatgcgcctgcacaagcgcctgatcgacctgactcccccgccgaggtggtgaagcagatcacctccatagcatcaccggagtcgaggttgaggtcaccatcgccgacgtgtaagcagcatttcactgggaagctggtccacggtgcgcccctgaccgccgctggcgggcgggtcggcccttcggagcc

SEQ ID NO: 4823 - DNA, 367 bp, Chlorella sorokiniana
  Clone ID: LIB3602-060-Q6-K1-A3
gcgttcgcgtctgtgcagcgagctccacgccttgtgggggctggcggaggagcggtcggtcaggggtccacctggtgtgcggctcgcccagcgcggccaggctgtgcaggtgactgctgggcctcgcttgaaccgagatgcatggatgagcatggacgctgcagcaccgaggtcatggcgagaaatgtgtggcggcggtgggggacgccgagcgcggcaagcagggcgcgctcaacgcgttcctggcggagcggcaccacctgcgcccgccgcgggaggagaccgaccgcctgcgcgccgaggtggtggagctgcgggaggagaatgcgcggctgccggaacggctgcggcagtacaaggccgcact

SEQ ID NO: 4824 - DNA, 375 bp, Chlorella sorokiniana
  unsure (1)..(375): unsure at all n locations; Clone ID: LIB3602-060-Q6-K1-A4
cagcgctagcgctgggcgccgcggcggggccggcaagcaggattgaacagtggatgttggcacgagtgcacgagcgccagcagctgcacagagagcaagactggtggagtgagggatggatgctgccggccagccgctgcaaggagtgactgagagagttgcacagggtgtgcctgtgtgcgcccgcggcatacagacaagcatgaacattcaagggctgcgacccagcgctctgcgcagttctaggcggctcagtcccgttttgtatgttcagctcacagcaagttgacaaattttgcacagacactgcgaggtatgctgtaaagagcagctctgcnnannaaaaaannnnnnnnnnnnnnnnnnnnnnnnnag

SEQ ID NO: 4825 - DNA, 295 bp, Chlorella sorokiniana
  Clone ID: LIB3602-060-Q6-K1-A5
aaaaaaaaaaaaaaaaaaaaaaaaaaaaaaaaaaaaaaaaaaaaaaaaaaaaaaaaaaaaaaaaaaaaaaaaaaaaaaggggaaaaaaaaaaaaaaaagaaaaaaaaaaagaaaaaaaaagggggatgtttttggacggggtttaataaaaaaaaagagggggaaaaccataggagtccccatgtaaatcatgtagaattaaataaatggtgcgccagtggaaaggttagcaaagaggaaacttcggaacgtcctaacaaacagatgggcaaatggaatgggcaatggaacgggg

SEQ ID NO: 4826 - DNA, 355 bp, Chlorella sorokiniana
  unsure (1)..(355): unsure at all n locations; Clone ID: LIB3602-060-Q6-K1-A6
ggctgttttgcgtgacgccccctgtggcttttgctcacgtgagtttcgccgtatcgtgccaccccttgctttgcccctctgcctttcccactcctcccgcccgatctgctctgcctgcccttctcctccttggtggttcccttccccttcccgacttgcacttgtgtcgctgcccctcctgggcgttgcttgatgcagtgcatgaccttcgcagccggccttgggtaagccgtgttgttccccgcccgtgcaatgctttgcgctcgctcctcgctgttgcattggattcattcgatgtcgcagtgggcagcacaggattgtgctgaatggctgtaacccacgcaaagtcaanana

SEQ ID NO: 4827 - DNA, 419 bp, Chlorella sorokiniana
  Clone ID: LIB3602-060-Q6-K1-A7
cacgcccagcgccagcggcaccgagcccgggggcgccatctgggcctccttcagcctgccctggccgggcggcgccgccaccgccatccgcatcaactacggcaccggcccctactcgggtggcagcgcctctggcgtggatggcatggtcaagcacagcgtcaccccgcccaccgcctgcgtggcggccgcgggagccatgcctgccacctgctgagcgcatgtggtgccacatgtttcgctacctctccaaaccctcttgagtcccatctgagcgcatttttgattcgcaccagtgcaagtgcacattgcatccgcgccacacgagattccttcgccccctgccgcccacttgactccagtgctttcacacgacacccactcacgctcacatttgcccgaccccgggtgcatgccct

SEQ ID NO: 4828 - DNA, 488 bp, Chlorella sorokiniana
  unsure (1)..(488): unsure at all n locations; Clone ID: LIB3602-060-Q6-K1-A8
cggacgcgtggggcctgcagtaggagcacagcggcaccggccttgtttgtgcacacagcgcaaacatggctaccatgcgcactcgcaagttcatgaccaaccggctgctgggccgcaagcagtttgtgctggatgtgctgcaccccggcaaggcaaacgtgtccaaggccgacctgcgcgagaagctggccaagatgtacgacgtgaaggacctgaactgcgtgttcgtgttcggcatgcgcacccagtttggcggcggcaagagctccggctttggcctgatctacgacaacgttgaggtggccaagaagttcgagcccaagtaccggctcgtgcggaacggcctggcggaggcggtgcagaagtcgcgcaagcagatcaaggagcgcaagaaccgctccaagcctctgcgcggcgtcaagaagtctggcaagaagtaagcagcccgaggagcgcgccacgcgcgcgacctgtaacacatngncttc

SEQ ID NO: 4829 - DNA, 155 bp, Chlorella sorokiniana
  Clone ID: LIB3602-060-Q6-K1-A9
gaattcgtgacacgcgtcgtggggccgcgctccatgtgaacgccaacctgacgttgccctcgagaacggggtatgctggacgtgcaaaggacgtagagaaagcgctactggtgaaccgtgtgcgcgacggcggagagaaccgtggcgcgggtggg

SEQ ID NO: 4830 - DNA, 74 bp, Chlorella sorokiniana; identical to SEQ ID NO: 648
  Clone ID: LIB3602-060-Q6-K1-B1

SEQ ID NO: 4831 - DNA, 475 bp, Chlorella sorokiniana
  unsure (1)..(475): unsure at all n locations; Clone ID: LIB3602-060-Q6-K1-B10
atcaagatcaaggccacaaatacggagctgtggcgcaaggagaagaaggccaagagccaaaggcaacagccactcgacgagcgcgcggagaagaggtgtctgacgacgaagatgactactgaggcggctctttgcctatgcagacctctacagttgtgtagcgcaacgactgcaagtgactggtagccattgggaccgcctttgattgacccctccactttagattgccaaacttgcctacgctgtaactggaccgcgtgtacgacaaggagggccagaccgcctaagcgccccgctcccccctgcggatgcacgcttagcagcagcacacgcggcgggtgcgcccggcatgccggcacaccagccacggagcggcggggcgtccctggcagcggcgcagcgcctgcaagcccttctgttgtgttctgtgccgctgtaatacccctgctgcnnaaaaaaaatttttttttagggg

SEQ ID NO: 4832 - DNA, 71 bp, Chlorella sorokiniana
  Clone ID: LIB3602-060-Q6-K1-B11
aaaaaaaaaaaaaaaaaaaaaaaaaaaaaaaaaaaaaaaaaaaaaaaaaaaaaaaaaaaaaaaaaaaaaaa

SEQ ID NO: 4833 - DNA, 513 bp, Chlorella sorokiniana
  Clone ID: LIB3602-060-Q6-K1-B12
ctctgtatgccttcggcttcaacggcgacaactccattgccatggtgaacctgtgccgcgacgaggtgaccgtgaccctgaagcagcgcatcgagcacgtgtttggctcctccttctccaccaacggcctgggcggcgtgctgacctgcggcgtgaccggcattggcgcgggcctgtcccactcccccctgtgcgagagcggcaaggagcgctacgtcttcttctccttcccccacatctctatcaacgccagcggcgaggtgggccccatgtcccgccccggccgccccggccagtcgtgcgcgtgcggcgccctgatcaagtcgtggaacgagatccgctccgagggcctgacctgcaactgcaagatacccggcgtgcacgatgctctggaccctgagtactccatcctgaagcagcgcattgcccgccggctgcggcacgagggagccaccgacgagtccgtgaagggcctcaacctgaccgacatcaccaaggtggctgagcgcacca

SEQ ID NO: 4834 - DNA, 508 bp, Chlorella sorokiniana
  Clone ID: LIB3602-060-Q6-K1-B2
ctgtcctgggcgctgcgctgctgtttggcgccactcctgacatggctgaggcggctcgctccggcggccgtgtgggcggcagctccggcttcagcgctcgcagggcggctcccccgccggcggcctcctccacccgcatccagaacaacgttatcgtcgcgccccccgtggtcggcggctggggctttggcggctttggcctgcccttcttccccggctttggcgtgtaccccgtgtttgggtttggcctctccaccatcttctccctcatggtgttcatgttcctgctcaacgtggtgatcggcgtggtgcagggcttcaccaaccagaagaagaagagcgagttcagcgacgacgactggtaaacagccggccgctcgtaacggctgtggcgccccgttgccggcagcttggttaggttccaacccttccgactgcctgcgctggcgcgagccatcggccagcttggtgcctcgccctgtgggctcctctgaccacctttcagccc

SEQ ID NO: 4835 - DNA, 481 bp, Chlorella sorokiniana
  Clone ID: LIB3602-060-Q6-K1-B3
cctcggcggagttgtctctttccccggcatcaaggtcaagatcaagggggatctggagtgccgcgaggtactggagcccctgccgcccaagttcggcctcttccactccaaggcccgcagtgtggaaggcctggtcgcctgccagttcaaggacatcaaattcgatgcagacggcaaggctcactacttcgatcttggcattgtcatcgacacagcaggggtgcgcaggttcctgaaagccagcggcggccggctgccgtattgtggccaaaaacgtggctacctacatggctaccgatacaccgagggcgccgtgcggcccgactccttccaacgcattgtgaaaggatgcggaaccctcgatgttgatcacattaaccatctgaaatatgacaactccaaggacaacctgcaatgcgcaggctttgagcagcgcggcaggcatctcccgaccgaggccatccgcatcaggcgggacgcg

SEQ ID NO: 4836 - DNA, 517 bp, Chlorella sorokiniana
  unsure (1)..(517): unsure at all n locations; Clone ID: LIB3602-060-Q6-K1-B4
cgcagttgctccagttttagggctagcaagccgtcgcggttccagcccctttcgcaactccaccagctccccctgtctgcacacgccatggctcccaaggttttcagctggaacttccccggcgcttacgccgtgcagttcatgaccgtggtgtcgtgcaccgcctgcgtgtacacttgctaccacttcctggtcaagaacccggatgtgcactttgtcaaggagctgaagcaggacgagctggcggagagcgcgcggtggtcccagcaggccaaggccgtccagggcaacgtgttccgctggctggcgcagacgcgcgacaccgccgcgggcgagcagaaggacacccgcatcttccgcgtttgagcgcccgccaggctgctgcgctaaatcggcgcgcaataccagccgctcaccgccactcgccgccgctgcgcccccctgtgcttgctctcagggcctgaggccctctgccagtcagccacctgnggccggcacccccttgccgctatgatat

SEQ ID NO: 4837 - DNA, 78 bp, Chlorella sorokiniana
  Clone ID: LIB3602-060-Q6-K1-B6
ggtgcgctctgtatgccttcaactacaacaaaaacaactccattgccatggtgaacctgtgccgcgacgaggtgaccg

SEQ ID NO: 4838 - DNA, 426 bp, Chlorella sorokiniana
  Clone ID: LIB3602-060-Q6-K1-B8
ggggcaggaccaggagcagcaggagcagtgcgccaacggcacagctgttcagcacaaccaagaccagcctgacacagcccctcccacctctttagatgatgacagtagcggccccaaagcagcctcggagcctgccacctcagcacgctcgaacggcggctctgctgcaccgctgggtgtggctcctgctgctctggccgcagcaggggcggttgcgctggcgactgtggccgtggctgcgactgccctgcgcaagcggtcctgaccccctggcagtattgatgtcgaaaacaaacccaaacgaaaacggccggcggcggcacccgtgcccctccaaggcctggaatacaaacactcctactgcttccgttgaattgtccctgctttctgctcgggccccatgcatgtttcccagatggaaagata

SEQ ID NO: 4839 - DNA, 303 bp, Chlorella sorokiniana
  Clone ID: LIB3602-060-Q6-K1-C1
gcgctggcggatggcggcgtggcggcgggtctgccgcgcgagactgccctggcgttggccgccaagacagtgaagggggctgcacagatggtgttctctgatgacgccacctcaaaaagcggcatggtgcacccgggtgtgctcaaagaccgggtggccagccccgcgggcaccaccattgcaaggcttaccgaacttgagagcaacggggtgcgtggcgccttcatccgggcggtcacgcgggcagcggcacgcagcaaggagctggctggttgattctgatagtgcctgctgtgctcatgt

SEQ ID NO: 4840 - DNA, 464 bp, Chlorella sorokiniana
  Clone ID: LIB3602-060-Q6-K1-C10
ggcggcctcaaactcggacgtcgcagccaggtcccaccatggctgaccagaccgagagggcgttccagcggcagctgagcgtgcagcgcggctacaacaagacggcgaagaagattgtgggcaagggcggccagcggtggtacaagaacatcggcctgggcttccgcacccccaaggaggccattgagggcaactacattgaccacaagtgccccttcaccggcaatgtcagcatccgcggccgcatcctgtcgggcaaggtgaagagcaccaagatgaaccgcacgattgtggtgcgccgcgactacctgcactacatcaagaagtaccagcggtacgagaagcgccacaccaacatctcggcgcacatctcgccctgcttccgctgccacgagggcgacaccgtggtcatcggccagtgccggcccctgtccaagacggtgcgctttaacgtgctgcgcgtc

SEQ ID NO: 4841 - DNA, 478 bp, Chlorella sorokiniana
  unsure (1)..(478): unsure at all n locations; Clone ID: LIB3602-060-Q6-K1-C11
cggacgcgtgggccgctgctggtgggggacctggaggctggcaccggctacgcggaggtgtggccctggcgccccgactggtgggagccctcctggggctacgaggagggctttgaagaggagaagcagcggcaggtggcttaagatgcacctactggccaaaatcgtcagaatgtaccatgcccacgcacacctccaacgctccaacttgagggtgcagtgcgaatgaggtgcctcctgcgcaatgcctctcttgatgcaagccagcggccgtgcttgctggcgcatgcgatgcctgngataccatgcacgcgaaaacaattgtacctcccccagtgctgcctgctacccttctgtaagctctgctgttgcctgtagcgattttcaacaaacgagcctcaatggcaaacgattctgtacaaacacctgctgctggtctgtcgtcctaacacagtcatcaaacggttcttatgcatgt

SEQ ID NO: 4842 - DNA, 315 bp, Chlorella sorokiniana
  Clone ID: LIB3602-060-Q6-K1-C12
tgctgcaagaaggctgaggtggacctgagcaagcgcgccggcgagctgtctgccgaggagctggagagcatcatgaccatcgtggccaacccccgcgcctacaagatccccgactggttcctgaacaggcagaaggacgtcaaggacggccgctactcgcaggtgacctcctccgcgctggacaccaagctgcgcgatgacctggagcgcctgaagaagatccggaaccaccgcggtctgcgccactactggggcctcaccgtgcgcggccagcacaccaagaccactggccgccgcggcaagaccgtgggcgtg

SEQ ID NO: 4843 - DNA, 267 bp, Chlorella sorokiniana
  unsure (1)..(267): unsure at all n locations; Clone ID: LIB3602-060-Q6-K1-C2
gcgagcagcgtggcatgcacaaagcttcgattaaatccacggttagtccaaggcgtgttcttcgagcgcacacgttgaccggcaaagtcgtgggcttgtggatacgtatgaacacagcccagggcacggnaaagngcgaggtgcagggngcggccgggcggttgagcaaatgaaggactagatgtaacaactggctaccgattagtcattgatgctgaacttcagcaacgagcgggactggaggcctggatacacgcattcagcacg

SEQ ID NO: 4844 - DNA, 508 bp, Chlorella sorokiniana
  Clone ID: LIB3602-060-Q6-K1-C3
caacaagctggcgcacagctacatggccttcaacaccaactaccacgacaccggcctgtttggcgtgtacgctgtggccgaccccaagagcgaccacgaggacctggcctggtccatcatgcaggaggtcacccgcatgtgctactcggttgacgaggaggatgtggcgcgcgcccgcaaccagctgaaggcgtccatcctgttcagccaggacggcaccaccggcgtagccgaggacattggccgcaacctgctggtgtacggccgccggctgccgaaggcggagctgtttgcgcgcatcgacgcggtggacgccgacaccgtcaagggcgtggccaaccgcttcatcctggaccaggacattgccatcgccgccatgggcgacacccagatgctgccagactacaactggatgcggcgccgcacctactggctgaggtactgagtgcgcggcaacagccgccgccttctgcttgttgtaccctgtttgttgctggtccgcgtgggc

SEQ ID NO: 4845 - DNA, 293 bp, Chlorella sorokiniana
  unsure (1)..(293): unsure at all n locations; Clone ID: LIB3602-060-Q6-K1-C5
ggcggggacggggcaggagggtgcgggccgccaggggggcggcagcagcggcattgcagcaagcagcggcagcggggccacagcaagcagcagcagcaagcgcagcagcaggagcctggcggctttctgggagcacacaggagtggactttcgggagcgcagcattagcgcgcgggcgcggcagggcgggctgccacctgacagcttcctctccattcctgagccttgggactacctctgactgagcgtgcattcagtaggtgtgcttcacaacgtgtaacatcattgcngag

SEQ ID NO: 4846 - DNA, 260 bp, Chlorella sorokiniana
  Clone ID: LIB3602-060-Q6-K1-C6
tgcaacacgaacgtgattgtgaacctcaacaaccacaccaacgacttctctatcaccggccccgtgaccaaggagggcgccgacctctggccccgtgtggcaccagcagccaacaccattgtgtaaagcggcggccgtccggctgggcgtcgctgcagcgcggaccacacttcagtacccaccgcctgccgcgctcccgacgcagaatgctgtaatgcacatccagcgaaaaaaaaaatacgccaatgactattttaata

SEQ ID NO: 4847 - DNA, 429 bp, Chlorella sorokiniana
  unsure (1)..(429): unsure at all n locations; Clone ID: LIB3602-060-Q6-K1-C7
aagaagtcggccgagttcctgctgggcctgctgaccaacgcggagagcaacgccgagagcaagggcctggacgtggatgcgctgtacgtgagccacatccaggtcaacaaggcgcagaagggccgccgccggacttaccgcgcgcacggccgcatcaacgcctacatgtccagcccctgccacattgagctgatcctggcggagcgcgggcaggcggtgaaggccgaggcggaggacaagcgccgcaagctgaacaagaaagaacttgccaaagaagctgcgcagcggcaccaccagcaagagcagctaggcngncgcccacggagcggcagcctgcggcggcggttgggggcggcgcctgagcgctgcaacgccgccgccacgcggttgcatgaggaaccaacaacacatgtaacgccctagtccttc

SEQ ID NO: 4848 - DNA, 384 bp, Chlorella sorokiniana
  Clone ID: LIB3602-060-Q6-K1-C8
gttctagatcgcgggcggccgctcgcgatctagaaccccacgcgtccgcccacgcgtccgcccacgcgtccgcgcgtggccaccccaggttgacacagcagcgcggcagccatggcgtccaagcgtaagggtggcgtgggcggcaacaagttccgcatgaccctgggtctgcccgtggccgcggtgatgaactgcgccgacaacagcggcgccaagaacctgtacatcatctcggtgcacggctggggcgcgcgcctgaaccgcctgcccgccgccgcccccggcgacatggtcatggcgaccgtgaagaagggcaagcccgacctgcgcaagaaggtcatgcccgcgattgtggtgcggcagcgcaaggcgttccggcggaag

SEQ ID NO: 4849 - DNA, 107 bp, Chlorella sorokiniana
  Clone ID: LIB3602-060-Q6-K1-C9
cccgcaagatgccctgcccgtacaacaacgatggctgcaagtcccctcccgccacttacgccttcgtcgccatattaaaatggtacaaggcccccccttgctatatt

SEQ ID NO: 4850 - DNA, 462 bp, Chlorella sorokiniana
  Clone ID: LIB3602-060-Q6-K1-D1
aagagccaaagcccgcaagatgccctgcccggtctgcaaggatggctgcaagtgcccgcccggcggctgcgcctgcggcgccgagtgcacctgctgcaaggccgccccttgcgagaagtgcaaggacaagtgcgagtgtggcgccaactgcgattgcaagggcaactgtggctgctgcggcggcaagtgagcgctaaaccagcgctggtcagggcagccgctgctgcctgaacccccctaaactcctgagagcgagtgagagcgcgaagtgcctttttgaggtttctgcctggagttaccggagcactgcccaccctcccatgcctaaagatgtccattcagggcgcactccttgcaaaacacccgcccactgctgaaaaagaatgaccactgccgaaggccaagtcaaacccttgactgagcctgagcactgagtgcctccccccaacgcatgcccccttt

SEQ ID NO: 4851 - DNA, 210 bp, Chlorella sorokiniana
  Clone ID: LIB3602-060-Q6-K1-D10
gggctcattggttacgggcttggtgtggacctaacagcggccccattgtcatacgaagtacatgcaacacacaaatggaagcacgtgctgcaactgagcggcacgtggtcagtgcaaggcggcagcggccgtcctgcggtgccgccaaaacaatacgcctgctgcaactgctgtcgcacccagcgcgacagccagcgcaatgcgccgccg

SEQ ID NO: 4852 - DNA, 401 bp, Chlorella sorokiniana
  Clone ID: LIB3602-060-Q6-K1-D11
gaagaaggaggttgcctactcgtccgctgcgctggcaggcgtgctgggggcgctgtgcctgtggcgcggcttccggaacaacgatgacgatgccaaggagctgtgagcttcaacacaatttctgacaccttttgtgtttgatgcgttgcacaactgatgggaacaatgagcaggacgcccaggcatgtggagacgggggctaaagggcagttgggggatgccgagctgcagcaggaggcagctggcggacagcaaacagcctgactctgaatgatttttgtgcacagcagggacgaggcgcttgtgcatcgccctgccctggcacacgctcctgacgcccttttggctttgatccgttgcatagcgcaaattcgactagcgttgctgtactgtaatcgtat

SEQ ID NO: 4853 - DNA, 270 bp, Chlorella sorokiniana
  Clone ID: LIB3602-060-Q6-K1-D12
agtacttctgcagcttctgcggcaagttcgccatgaagcgccaggtggttggcatctggaagtgcaaggcctgcgagaagacccaggctggcggcgcgtacgtgctcaacactgcggcgtccgtgactgtgcggtccaccatccgccgcctgcgggagcagaccgagaagtaagcgagcggccattgaggagtgaagcgggcggcggcggcggcgctgcagcagcgcgctgcagcgtgccgggtggccgctgcttcatgatgtaacgcag

SEQ ID NO: 4854 - DNA, 459 bp, Chlorella sorokiniana
  Clone ID: LIB3602-060-Q6-K1-D2
caaggttgagcctcctgagggctgctccgcctcgccgctcagcgacgacaacctgttcgtgtggggcgccagcatgcttgggcccacggaaacgccatgggagggcggcgtgttccagctgcgcatcacgtttggagagcaatatccagacaagccgccgcgcgtgcgcttcaccagcgagatgttccaccccaatgtgtacagcgacggcacgctgtgcctggacatcatccaggaccactggagcccctgccacaacatctgctccatcctcacctccatccagtcgctgctcacagaccccaattgtgcgagcccagccaaccctgaagcggcgcagctgtacacaaccaacaccaaggagtataaccggcgggtgcggcggatagcgcagaagagcgtggacttctgagagcgctggagcagctgcagctcaataatagctggccagtgggtgtt

SEQ ID NO: 4855 - DNA, 331 bp, Chlorella sorokiniana
  Clone ID: LIB3602-060-Q6-K1-D4
ggcacggcctgctctgcggcccttcatacctttgtacctttctgtatcatcttgcagcaatggcagccggctgcaggtttctaacatcgtcaccggcccactcgtttgtgccatgcccacctgcctccaacgtcacccttcatcaaccctcacccaacccatccacctgccacccatccactcaccttccctccgccacaacctctgccacccactcaccacccatcacccgctcaacgccctccatgcaccatcctccccatccaccaaatctgccaccccaaacgcacgtccgccgctgcaccacctgccgccccctcacccgcaccca

SEQ ID NO: 4856 - DNA, 384 bp, Chlorella sorokiniana
  Clone ID: LIB3602-060-Q6-K1-D5
cccagggcagcagggcagcagctgctgctggtgccgctggcacaggcggcagcactctgcctgcctcgagcagtggcgtggaacgctacctgctggtggcaacttacgaagggcgagaggcgaaggcatcggtgccgatgcagagggccaaggaggcggcagtggatcacattgagcagatggcaggggagtatgggctgagctggacgatcatccgccccacggcctatttcaaggactttacagacatgccatggaagcacatgcagagccacgactggatgctggtgccgggcggcggcacctcgcgctacaaccccattgacggcgcggagctggctcgcttcatggccgactgcttgctggagggcaagtgcgcaaatg

SEQ ID NO: 4857 - DNA, 398 bp, Chlorella sorokiniana
  unsure (1)..(398): unsure at all n locations; Clone ID: LIB3602-060-Q6-K1-D6
atcttctccctcatggtgttcatgttcctgctcaacgtggtgatcggcgtggtgcagggcttcaccaaccagaagaggaagagcgagttcagcgacgacgactggtaaacagccggccgctcgtaacggctgtggcgccccgttgccggcagcttggttaggttccaacccttccgactgcctgcgctggcgcgagccatcggccagcttggtgcctcgccctgtgggctcctctgaccacctttcagcccaggggaggcacggtagtaggtagacctcccctgcacacactcccggcattttgtgtgtgggcagggagcgtgtcctaactatcacccgcgtctcggctaacaaagaccaaanncgtgccggcgtgccgcgtgccgccctccaatgca

SEQ ID NO: 4858 - DNA, 124 bp, Chlorella sorokiniana
  Clone ID: LIB3602-060-Q6-K1-D7
acgaggctgcttgggagcccctgtggcagcacacacggtgcaggcctctaccaggagcgcttgctctagtcaagcaagtcaagctgttgccctgtgaagagaaaaatggttgtaacagaccgcc

SEQ ID NO: 4859 - DNA, 176 bp, Chlorella sorokiniana
  Clone ID: LIB3602-060-Q6-K1-D8
gaagctcctggcctgtcaacagccctgtatacgtatgcggctgtaactttggtgaacagggccgattgatgcctcgccgacaatcttgactgcggcaagcggcaagcggcggtagccgggtgtgtgctctctgatcctttgaagttgtcaatatcctcgaggcttactaagtaatg

SEQ ID NO: 4860 - DNA, 466 bp, Chlorella sorokiniana
  Clone ID: LIB3602-060-Q6-K1-D9
gcgggcggacagagcgctgtaccccccagacctgttcagggccatgcgcagctaccactacctgctgcaagcttaggcgtgaccccatgcaagcagagtagcactgccagtgattattattccgctggcaggcggcaaacagcttggctctgattgagggaagagctgctggttcgcgccgactgcctgccgcctggtcaacaagacgtgcctacctgtgctgccttgcccaacacatctcctgctgattcccacatgcatgctgtgagagtactgttatcctgcgttgcatgaagcgcttcaacgcaccttgagtattgttgctcgtaatgcctgatgccaaaccctgaaacatgcatgctcccaacagcggcgcccttaccctgcactcatactgttgccgtccaaaccttggcatacaacctgttgttgattattttgggtctctcatacagctgccgatcgc

SEQ ID NO: 4861 - DNA, 504 bp, Chlorella sorokiniana
  Clone ID: LIB3602-060-Q6-K1-E1
caggggcaaagtgtggtgctggtggggcatccctcgtgacgtgagctgctgcggcagcggcgtgctggggagtgcaggctgtgctgtgcgagacagccagcatgcatgctgctgttgaaatcagaagaaatcctaaacgaccccctgctctccttccccgtgcttgcagaccatctagcttgccggccagtcctgcacagcgcacagcatctggaatgagttcaagctgcctggtgccctggcgcgtcccaggttgtcgccctccgaaactacaactgctgcggtgaagcaacccacattctttggcatgtcgacgcatgcctgccagatgctgccatttaccgtgttcctaacctacctctctccttgcatccaattttccaacgatctggcgcttgtgcattctcgagctgcccccacgcacccgcacgaccaatgtctttttttcccttccgcaaagagcatttgcagtgctgtttgacctgacccgcttatgagctgatg

SEQ ID NO: 4862 - DNA, 97 bp, Chlorella sorokiniana
  Clone ID: LIB3602-060-Q6-K1-E10
aaaaaaaaaaaaaaaaaaaaaaaaaaaaaaaaaaaaaaaaaaaaaaaaaaaaacaaacaaataataaaaagatccaaacgtggaaacacatacatac

SEQ ID NO: 4863 - DNA, 456 bp, Chlorella sorokiniana
  Clone ID: LIB3602-060-Q6-K1-E11
cggacgcgtgggtccggcccgacccgcgagacttctccaagctgcaagtcagccgcaccggcactctcgagggcggcgccaccatggacgtgaacgaagccgacccgctgggggtgctggagaacgtgtacgagtcgcagctgctgcaccaggcagagtccggcggccccatggccggcggtgatgcctcgggcggccctccagctggcagccgccccgcatcggcgcacgcagagggcgctgtggtggtgggcggggccggcaggcggcgccacggtacctcagagcccaccgagtgaggttataaatccagctgagtgagggcagcgatgcagctgagtgaggacggcgatgcagctgccgccagtgagactagagcgagagcgccaaaatgggcaggcatcggatgcccttgagcgagtgccagtcagccaagcgaagcgaagcgagcggagc

SEQ ID NO: 4864 - DNA, 75 bp, Chlorella sorokiniana
  Clone ID: LIB3602-060-Q6-K1-E12
gcatcggccatcttctgacccagcaaggcgctggccagccagcccaattgtactctgcgagtcagtccctcgaag

SEQ ID NO: 4865 - DNA, 101 bp, Chlorella sorokiniana
  Clone ID: LIB3602-060-Q6-K1-E2
aaaaaaaaaaaaaaaaaaaaaaaaaaaaaaaaaaaaaaaaaaaaaaaaaaaaaaaaaaaaaaaaaaaaaaaaaaaaaagggaaaaaaaaaaaaaaaaaagg

SEQ ID NO: 4866 - DNA, 430 bp, Chlorella sorokiniana
  Clone ID: LIB3602-060-Q6-K1-E3
accacgaggaggagagcgaggaggtgatcgacgagctgctagcactgtttgaacaactgcgtgacaacgagcagggcactaacgcggacaagagcatgtaccaggatatggacccggttaagtacctgattaagtacctaatcgtgtaacaacactacctagatgaatagcaccatcaagcgcaaccctagaaggaattctttaacggctactttaacgagtacctcgcatagcacagagcgcaccgaatagagctgtcactgcagctgtatgtgcaaggctaagccgaccatgcacaccgccatacgcagccgtgattgacgccaagactgacaccacaacgatgggcacacaatgctgacagcaagactgacagaatgagtgacagaatgtgttgcagagtatcctgctgtggggcctgttgttgggc

SEQ ID NO: 4867 - DNA, 398 bp, Chlorella sorokiniana
  Clone ID: LIB3602-060-Q6-K1-E4
tgcaggctttgagtactcggagacgctgcagccatgctacattcgcggctacaggtgaggcgctgttcaaattcagctgctgctgggggaggtgcagtttgcatgggttcagcaggccgcctgcaatacgcggagcccacctacagacttgttgctccccctggtcccctaaaccgcaggcgggtgttccaccagggcagcacagaccatcgcggcatgccagaggcgcctggtcggacagtcaccctcgagcctgctgagggcgctgtgacgtggggcgccgccttcaagctggcgggtgatgcgcagcagcggcaggcgacactcgagtacttggagtgggcggagaagcagtacgaccaccgagcgctggtggatgtgcacaccgctgacggggc

SEQ ID NO: 4868 - DNA, 305 bp, Chlorella sorokiniana
  Clone ID: LIB3602-060-Q6-K1-E5
cggacgcgtgggcggacgcgtgggaaaaaaaaaaaaaaaaaaaaaaaaaaaaaaaaaaaataaaaaaaaaaaaaaaggggaaaaattaaataaaaatataaaaaatctattataaaaaaaattttaattatttttaattgtcccgccttttttacagaatccatgttttttttccttttttttctaagtttttttttttttttttgcttgcttaatttttttaatttgcccatttttttaaacccttttatttgtaaattttttgactttccccattttatttttttttgaaatttttccttttt

SEQ ID NO: 4869 - DNA, 342 bp, Chlorella sorokiniana
  Clone ID: LIB3602-060-Q6-K1-E7
gcaactcaacaacttgttaccgagagcacgtcatgaaaggttcgtaatgaaaggcaggggcgtcggtgcccgttcatatcattcatctcgcagtgggggcggtccaaaaagcaggttggagcagaatgcaaaatttgaggttagatgagtgatttattgtacacttgttcgttgtggggtggtgctgagtcctctttagccgctcagtagctggacccaaccttgcggtagtgcaccgacgactgcgctgagtcgtccagcacgcgcccgttgctcaccgaggcgtacagcacgacgtggtctcccgcgtccatcctgtcctccaccttgcactccaggtac

SEQ ID NO: 4870 - DNA, 97 bp, Chlorella sorokiniana
  Clone ID: LIB3602-060-Q6-K1-E8
aaaaaaaaaaaaaaaaaaaaaaaaaaaaaaaaaaaaaaaaaaaaaaaaaaaaaaaaaaaaaaaaaaaaaaaaaaaaagggaaaaaaaaaaaaaaaaa

SEQ ID NO: 4871 - DNA, 376 bp, Chlorella sorokiniana
  Clone ID: LIB3602-060-Q6-K1-E9
gcgggcggcctcaaactcgacgtgcagccaggtcccaccatggctgaccagaccgagagggcgttccagcggcaggggagcgtgcagcgcggctacaacaagacggcgaagaagattgtgggcaagggcggccagcggtggtacaagaacatcggcctgggcttccgcacccccaaggaggccattgagggcaactacattgaccacaagtgccccttcaccggcaatgtcagcatccgcggccgcatcctgtcgggcaaggtgaagagcaccaagatgaaccgcacgattgtggtgcgccgcgactacctgcactacatcaagaagtaccagcggtacgagaagcgccacaccaacatctcggcgcacatctcgc

SEQ ID NO: 4872 - DNA, 433 bp, Chlorella sorokiniana
  Clone ID: LIB3602-060-Q6-K1-F1
gcgagggggtggcaggcgctgcacccgaccccgagctctacgcagcctatgtggcgctgatccggcgttgctgggcacagcagcccgagcagcggcctggattcgccgaaatcattcaggacctgagggccatgctgggatgacatttgagcttggcaaagcccccatacgcgacttgcacctcgcccaacatgccaacacattgcacatgtactaaaacggatgcaaagagacaactagccgcttcacggcacagaggcagctccccttcatttcagctgcgcgcattttcaggcagcgcagcagcctgacccgatttattggacagagttctctccgctctcttcccgattcttgtttggcccaagaagcgcttggcaacagcgatgcagcctacgtagtgcatatttatggttgcatttgtaacaacggc

SEQ ID NO: 4873 - DNA, 284 bp, Chlorella sorokiniana
  unsure (1)..(284): unsure at all n locations; Clone ID: LIB3602-060-Q6-K1-F10
tctaccccctaggaagctattgctcaacttatttgcattgtgccccgagctcgcgactgccctgaagggcggtcgtcccgctgggcggctgtaccctcccctctcacttgcttcgccccgaaaccccgggctgtggcaccgcgccacgctgtgctgcgctgtgctgtgcactgccgtgcacgctgcctgccggtgacgaacgaaacagcaaccgcaaacactcccccccacttgtgcgctcctgttccccctcttgttatgcccaatgtgtaactgcgttatnt

SEQ ID NO: 4874 - DNA, 478 bp, Chlorella sorokiniana
  unsure (1)..(478): unsure at all n locations; Clone ID: LIB3602-060-Q6-K1-F11
gatccccgtgttcaacttccacgccggctacctgtcggtcaacttcagctccaactactacctgctgagccagcggcacgccgaggtgccgcgcctcacgcccgcgcacctggaggccatcaaggtgtttgaggaggtggccttgtcgccggagctgcgcctggactgggtgctgcgcccgggagacgtgcagctgctgtccaaccacaccgcgctgcacagccgccagggctttgccgacgacccgcaggacccgcgccagcagcgccacctgctgcgcctgtggctgtcgccgcccgaggagcgcccgctgccgccggcgtatggcgagatcatgggcggcgggctggaggtggngcggcgcggcggcatcatccccgaccgccggccgtacgtgccactcaaccccaccgactaaggggcgtgcctgtcctgccacattggagcggtgtgtgaaagcaaggaacgagcaaaacga

SEQ ID NO: 4875 - DNA, 486 bp, Chlorella sorokiniana
  unsure (1)..(486): unsure at all n locations; Clone ID: LIB3602-060-Q6-K1-F12
ctagttggcgcggtggagtgggcaattcgttcgcgatggtgaacgtcccgaagaccaagaaggccttctgcaagggcaaggagtgccgcaagcacaccatgcacaaggtcactcagtacaagaccggcaaggcgtcgctctacgcgcagggcaagcggcgttacgaccgcaagcagtccggctatggtggccagaccaagcccgtgttccacaagaaggccaagaccaccaagaagattgtgctgcgtctggcctgcaccgtgtgcaaggcccagcacatgcacgccatcaagcgctgcaagcacttcgagatcggcggcgacaagaaggtcaaggngctatactagtaaaaaaaaggagagcggcaggcggagagcatgaccgagaaatggaggcagcggcgcccgctcaccctgggcggcctgctccccgcccggcgcctcgctttggccgcctctggccactcgtacgccttcttgtccatgc

SEQ ID NO: 4876 - DNA, 513 bp, Chlorella sorokiniana
  unsure (1)..(513): unsure at all n locations; Clone ID: LIB3602-060-Q6-K1-F2
gcagcagttagcagccatgcaggccaccttcgccggctctaagctgcagcttggcgcgcgcgtcagccgcaagagcgtgaacaccaccgtggtggcctccagcggcaagaagatcgacatcagcaagcagggcctgaactccatccagaatgagaccgtgaagctcaacctgatgggcaagtccaagaccatggagagcaaggactgggtggacccccagggccgcaagggcaagggctacggcgtgtaccgcttcgccaacaagtacggcgccaacgtggacggctacagcccgatctacacccccgacacctggtccgagtctggcgactcttacaagctgngcaccaagggccttattgcttgggccggcctgattgtggtgctgctgggcgtgggcatcaacctggtgatctccacctctgccctgngccagtaaatggcgacgccccccgcgtcggcagcagcagcagcagccagcagcattcccttgcagctaccccccgagaagac

SEQ ID NO: 4877 - DNA, 503 bp, Chlorella sorokiniana
  unsure (1)..(503): unsure at all n locations; Clone ID: LIB3602-060-Q6-K1-F3
nnnnaaaaaaaaaaaaaaaaaaaaaannataaaaaaaaaaaaaaaaaaaaaaaaaaaaaaaaaaaaaaaaaaaaaaaaagggaaaaataaaaaaaaaaaaataaaaaaaaaaaaaaaaaaaaaaaaaaaaaaaaaaaaaaaaaaaaggggcccccttttttaaagaaccaaattttctttccccttttttcaaaaataaaattttttttttggtgcccctaaattaaattcatttgcccttttttttacaaccttttattttaaaaaacctgtggtttcccaaatttaacgtttttaaaaaaaatccctttttacaaatttgggtaataaacaaagaacccaaccattattccttttcaaaaaatttcccccccctaattgaaaattgaaaccccctttttaccggcttttaaaccccggggttttttgtttttccccaaaagtaaatttttaattttccaagcccctaaacccccccttttttcctttttttcctttctttt

SEQ ID NO: 4878 - DNA, 550 bp, Chlorella sorokiniana
  unsure (1)..(550): unsure at all n locations; Clone ID: LIB3602-060-Q6-K1-F4
aaaaaaaaaaataaaaaaaaaaaaaaaaaaaaaaaaaaaaaaaaaaaaaaaaaaaaaaaaaaaaaaaaaaaaaaaaaaggggaaaattttaaaaaaatagaaataattttaattttatttaattggagtttttttttattaaagtgtattttttttttaattttttttgaatatatttttttttttttttaantttatttaaattttttgattaggaattttttttagatttactttatttaaaattttttcgcctctccttattttttttttttgcaaattagctttttttgttaataggtttttcaatttaaatgggctttcttttttctttttttaattgttttttttttctggactttttatagtgactttcgtttttttccccattttttttttttttaaatttttttatttttcttttttcacaaaaccttagcttttttttttcccctttttttttttcccaaacttttttttttttttattctccccatattcctaagtttaaaaacttttaaaggtttttttttttcaagtattttttttt

SEQ ID NO: 4879 - DNA, 499 bp, Chlorella sorokiniana
  Clone ID: LIB3602-060-Q6-K1-F5
gtgctgttggagtcagctgaggccctggctgtgcaggtcattgccgccaaggcggcgcctctgctggcgacgagcgcccagctggactgggctcccagcgagcaggcgcgcagcacggcctacagcccgcacattgaggagctggtcatgtacctcaaggagtgcgccagcctggtgacccgcatggctcccggcccctccgtggcccgcatgctgcgttccctgctgcgctacctgggggacgcattcatgctgcagctgctgtcagatgccatcccggagttcaacatctttggcctgcagcgcctgttcaacgacctgggcggcatcagccgcgccgcgggcagcatgggcgtgcctggcctggcagatgagctggcggagccgctgctgttctgcgaaatgatggtgtttggcagcctggaggatttgctgcgccctgagctgcgagcgagccccaagtacgcctgcctagacctgaaccgagtggcgcgcgtgc

SEQ ID NO: 4880 - DNA, 440 bp, Chlorella sorokiniana
  unsure (1)..(440): unsure at all n locations; Clone ID: LIB3602-060-Q6-K1-F6
ctggcggcccccgagcagaccaagggcctgaaggatgcggtgcagcgcaacaaggccatcaagatggcggacaaggcgcagtggaagctggggcgcgcggcgaagaagggcgaggccgacaggcacatccccgacctcaagcccaagcacctgttctctggaaagcggccgcgcggcaccacagaccggcggtagccgctgctccggtgcagctcctctgtttgctacctggttctttgcacgtctgctgcagcgcagcggagccggcagggggtacttcattggccgcccaagcggcatgattctttcacggtggcaacatgccattctgcccccatgctgcctgctctgctgctacgctgccgccccccgtgctgcctcggactgcttaccttangctgttgcgcttttgtacactagcttgtaacactaggccagaa

SEQ ID NO: 4881 - DNA, 376 bp, Chlorella sorokiniana
  unsure (1)..(376): unsure at all n locations; Clone ID: LIB3602-060-Q6-K1-F7
caagaaggagcgcatctcgcgcaagaagaccgaggccgccgagtaccacaagctgctggtgcagcgcctgaaggagcagcgcgagcgccgctccgagtccctggccaagaagcgggccatccgcatggcctctgttgcctccaaggaggcgtaagccgtccctatgccgcctgcatagtggcgcctgccgcctgcttgttgaggcgaggggcgcggcgcggcgcgaggcgcgggcagccctcccctgcctgcttgcagcggccgccggcgccgcgggccccgagcagcccttgacagtttagctcactcgcatggacgcacaccgcaagcacctggctgaacccagaagagccgctcgcttgtaatagccgcnnnt

SEQ ID NO: 4882 - DNA, 291 bp, Chlorella sorokiniana
  unsure (1)..(291): unsure at all n locations; Clone ID: LIB3602-060-Q6-K1-F9
gcggccataccttttgccctggtgatgccgccggtgtgtaaggacgggcaacananaaaaaaaaaaaaaaaaaaaaaagggaaaaaaaaaaaaaaaaaaaactggaattcactaacttgattattaaacgtaaaaaaacaaagtgcttgcgcccnctgtaatgtccaactctcaaggttccttacaatttttacccattaccctttaatctttattaatttattttaattaataaaaactccttttaatttacaactctcttatattcccctttttttaaaacattccatt

SEQ ID NO: 4883 - DNA, 229 bp, Chlorella sorokiniana
  Clone ID: LIB3602-060-Q6-K1-G1
gattgacgcagcagcaccacagcgtctcagcagcgcagcagggccactgcacaggatgcgccacaactgcacacagacttccccccggtttcatttcctggattcgctggcttgattttgaacgttgcaaagatacgtaacgcccctgttgttccaacccagccattcccaggcttgccacccggcgcctgcgcgctgttgcattctgcggggttgtaatgctacacag

SEQ ID NO: 4884 - DNA, 91 bp, Chlorella sorokiniana
  Clone ID: LIB3602-060-Q6-K1-G10
aagagggaaaaaaaaaaatgggggtgtaaaaaaaaaaaaaaaaaagggggggggggaaaaataatttttaaaaaagaaggaattgttataa

SEQ ID NO: 4885 - DNA, 503 bp, Chlorella sorokiniana
  Clone ID: LIB3602-060-Q6-K1-G11
ctgaggacgacaaggagaacgccgccctgtacgtgcggttcatgaagaaggcggttgagaagggcgaggagtacattgccaaggagctggcgcggctcgagaagatggccgccaagcccatgtccgccgccaagctggacgaggtgtcgcgcaaggtgtcggtgctgcagagcttcctggagccccccgctgcggcagctgaggaggccgcaaaggaggaggagaagaagggcggcgagcactccgagggcgaggagtacgagctggacgacgatgaggaagaggcgggtgcgggcagcgcctctgccggcggcgacgatgatgacgaggtgtatgccgatggcctggacgaggaggaggacgcccatgctggccacgaccacgatcacgaccacgatcatgatcacgaccatgagcacgaccatgatgcgccggagcaggcctcggatgacgacccgtatgacgactccgagctttgatgattagcagaggagctctggtcg

SEQ ID NO: 4886 - DNA, 359 bp, Chlorella sorokiniana
  Clone ID: LIB3602-060-Q6-K1-G12
cggacgcgtgggtgcggcgccagttcctgtgagccggccagccacaaaaaaggaaacgggggctcccggcacgtgatgcagcgccgttgctgtgagccggccagccacagcaatgagatggcccccggtgcgtgatgcagcgccgttgctgtgagccggccagccttcggaagcacacaaatgacgttgccaacaacagtgcacatccttggctcatggcccgccaagatgggtcacactagcagcacaccttgttgcagcacacctggttgctacccacttgccgaccgcagtttcccctcagattttcttgcctgctactgaccggtgatgcaagcagtaatgtgagccacagctaa

SEQ ID NO: 4887 - DNA, 105 bp, Chlorella sorokiniana
  Clone ID: LIB3602-060-Q6-K1-G2
atcttatcatcccctaccgagaagattggcggaatattctaatgacacttctccgcgtgtgtaagcacaaaaaaatgggaaaaattaaaaaaaggggtggggccc

SEQ ID NO: 4888 - DNA, 515 bp, Chlorella sorokiniana
  Clone ID: LIB3602-060-Q6-K1-G3
caggccgcctactactccctctgctgggtgctggacgtggtgtacgccaaccgccccatcgagcgcttctggttcctggagaccgtggcccgcatgccctacttcgtctacatctccatgctgcacctgtacgagagcctgggctggtggcgcgccggcgctgagctgcgcaaggtgcactttgcggaggagtggaacgagctgcaccacctgcagatcatggaggcgctgggcggcgacctgcgctggggcgaccgcttcctggcggagcatgcggccgtgttctactactgggtgctggtggccatctacctgatctccccctcggcctcctaccagttcatggagatggtggaggagcacgcggctgatacatatgctgagtttgcggagcagaaccgggaggcgctgcagagcatcccgccgcccctggtggccctcaactactacaagtcgggagacctgtacctgtttgacgagttccagaccagctggaaggcgagcggcgagctgcg

SEQ ID NO: 4889 - DNA, 468 bp, Chlorella sorokiniana
  Clone ID: LIB3602-060-Q6-K1-G4
agccaaaatgccgggcatcgccgtgggcctgaacaagggccaccccacgaccaagcgggagaagcaggcccgcccggcggcgcggaagggccggctctccaagcgcgtgaagctggtgcgcgacattgtgcgcgaggtggcgggccaggcgccctatgagaagcgcatcatggagctgctcaaggttggcaaggacaagcgcgccctgaaggtggccaagcggaagctgggcacccacaagcgcggcaaggccaagcgcgaggagatggccggcctgctgcgcaagatggctgccaaggcgcacaagtaaacgcctgtgcagccacagcagcagcccgcagcagcccccatcgtggcggggcggccgcagcgcagcacggcacagcacagcgcagcgcgcggcgccgcccgccttgcagcagcagcatcactgtgcctagcacctgtgatgtaacacagcacccggca

SEQ ID NO: 4890 - DNA, 510 bp, Chlorella sorokiniana
  Clone ID: LIB3602-060-Q6-K1-G5
cggacgcgtgggcggctgggacacctctggcctgtccgccgaccccgagaccttcaagaagtaccgcaccatcgaggtcatccacgcccgctgggccatgcttggcgccctgggctgcatcttccccgaggtgctggagaagtacagcggcgtgcagttcggcgaggccgtgtggttcaaggctggcgcccagatcttcgctgacggcggcctgaactacctgggcaactccggcctggtgcacgcccagtccatcgtggccaccctggtggtccaggtgctgctgatgggcgccgtggagatctaccgcgccaacggcgagggccccaacggcttcggcgagggccaggacaccctgtaccccggcggcgccttcgaccccctgggcctggctgacgaccccgacaccctggctgagctgaaggtcaaggagatcaagaacggccgcctggccatgctctccatgctgggcttcttcgtgcaggccatcgtgaccggcaagggccccct

SEQ ID NO: 4891 - DNA, 362 bp, Chlorella sorokiniana
  Clone ID: LIB3602-060-Q6-K1-G6
aaaaaaaaaaaaaaaaaaaaaccaaatactataaacacaaacaaacacaaaaaaagaaacaaaaacatccaaaaacatgggtgaaactcctttgctgtgagccggtcatccacatcaatgagaatgatctcccgcttctttatgcactcgccaattctgtgagccttccaaacttcttaacctcacaaatcatgttcctaaccacagttcacatccttggttcatggcccgacaagatcgcctttctaacttacacctttttcaatacaccttgttgctatccacttaccgacccttgtttcccctaagattttcttgcctgctacttgccggagatgcaactttaatgtgagtcacatctt

SEQ ID NO: 4892 - DNA, 245 bp, Chlorella sorokiniana
  unsure (1)..(245): unsure at all n locations; Clone ID: LIB3602-060-Q6-K1-G7
gcgaaaaaaaaaaaaaaaaaaaaaaaaattaaaaaaaaaaaaaaaaaaaaaataaaaaaaaaaaaaaaaaaaaaaaaaaaagaaaaaaaaaaaaaaaaaaaaaaagggaaaaaaaaaaaaaaaattaaatatattaaataaatttatatattattttatggtattttttataattttanttggggggggggttttttaaagtttttatttttatttgtggtttttaaaaaatttttttttttttt

SEQ ID NO: 4893 - DNA, 439 bp, Chlorella sorokiniana
  Clone ID: LIB3602-060-Q6-K1-G8
gcgcaggggctccgcccactattattttaagcacctcacgccgccgctggaagccaccgttgagtgcggcgtgggagaggagcaactgcgtgccatactggagcgtgtgccacaggctgccaacaatcaaaaagtttttgacttcacggatgtgctgggctggagcttactgacttgtgcccagcaggtggagatgctgagggcgctgggtgcaagcaacgagcccttcatctcgccgcggcagagccaacgccaccacaagcagaaggagagcgaggatgaggaggaggaggagggctggaccaccggccaggaggaggagctgcagaccgctgctgttgcggcggcggcggcccacggcttgccagacgccgatgctgtgcatgagtacaagctgcagacagcagctgctgcggcggcggcaacggcctcacccatc

SEQ ID NO: 4894 - DNA, 89 bp, Chlorella sorokiniana
  Clone ID: LIB3602-060-Q6-K1-G9
caaacaagtgttacctagttcaaccctgagaagattcaaacaccccttacgaatcacatatgctattttgtgtgtagacgcaagccgcc

SEQ ID NO: 4895 - DNA, 516 bp, Chlorella sorokiniana
  unsure (1)..(516): unsure at all n locations; Clone ID: LIB3602-060-Q6-K1-H1
ggctggaagcccgactttgtggagaagtcggtgcccgtcctgcccatctccggctggatgggtgacaacctgatcaagaagaccgagaacatgggctggtggaagggtgtggacgctgtcgccgccgacaactccaccgtgcacatcgacaccctgctggacgcgctgaacaactacgtgaaggtgcctgagcgcaagaccgacgcggccctgcgcctgcccatctccggcatctacaagatcaagggtgtgggtgatgtgctggcgggccgcgtggagcagggcatcgtcaagcccggcgatgaggtcatcttcatgcccacccacaccgncgncaacaagtgcgagggcaaggtgttcaccgtggagatgcaccacaagcgcgtggacaaggccggccccggcgacaacgtgggcatgaacatcaagggcctggacaagggcaacatgccccgcaccggcgatgtcatgatcctcaagtcggacgccaccctgaagcaggtgaaggacttcacc

SEQ ID NO: 4896 - DNA, 457 bp, Chlorella sorokiniana
  unsure (1)..(457): unsure at all n locations; Clone ID: LIB3602-060-Q6-K1-H10
cttcctcttcagcgtgaaggagctggacgccaagggcaatgctgatggctttggtggggagtttgtggtgccctcgtaccgtggtgccaccttcctggaccccaagggtcgtggcgctgcgactggctatgacactgctgtggccctgcccgccgctggcgacgatgaggagtacctgaaggagaacatcaagtcggccggcgcaatgaagggccaggcagtgttctccattgccaaggtggatgctgccaccggcgagattgctggcgtgtttgagtctgtgcagccttccgacactgacctgngagccaaggcccccaaggacgtcaagatcactggcctctggtatgctcagctntcgtaagcgctgccagcgcccgtcgtttggagaagagaattacagctttgtcgctcgacctgtttgtcagacgtaaaactgctcatgtaacataagcgc

SEQ ID NO: 4897 - DNA, 508 bp, Chlorella sorokiniana
  Clone ID: LIB3602-060-Q6-K1-H11
gtgccggcagagaatttgcagtacccaatcaccgtcctgaccctgctgagccgctgccgctgcggccaggcacttgcgcggcagctggtgcagtgcggcagcgcgctgcgtgtggcacgcctgctgtgcgctctgccctggggtgtgcctgacggccccgatcgagacatgctcaattatgcaacgggaattattggcgggctgcttgaggctgagcggcgggccactgcacagcggcaagaggaggagcaggaggaggaggagcagcagcaggggcagcaggggcagcagcaggcagcggcgctcacgcccctggagacccatctgctgtccgcacgagcgtttatggacagctgcgcacaagggctgatgctgagcgcagacaaccttgccaaggacctgatggtgtttctgtgcagcctgtttggcagcccagccatgctagccaggctgctggagcgtccagatgggtttcaaggcattcacggcgagctcttcaccacaatca

SEQ ID NO: 4898 - DNA, 483 bp, Chlorella sorokiniana
  Clone ID: LIB3602-060-Q6-K1-H12
ggtgggcaacatgaccaccgcctgcttccagctgtacaaccaaaccgcctcgggcctgggcgccgagcgcatcagctttgaggaccagacgggcgaggtgcagctgatggattcccgatattggcagcggcccgaagttatcgagagcatattttacatgtggcgtgcgacgcacgaccgcaagtggcgcgacatggggtggaagatgtggcgcgccatagacacacatgcgcgctgggatggcggctacagtggggcgctggacgtgtcgcagctgccggtgcagtcggacgacgtgtcgcagtcctggttcttcgccgagacgctcaagtacttttacctcttattctcgccggacgacgcgctctcgctgcgcgactgggtgctcaacacagaggcccacccgctgcgcgtgcgcctgcagcacagcgcggcggcggcagcaacggcagccgacgcctcaggccgcatccgacagcagct

SEQ ID NO: 4899 - DNA, 517 bp, Chlorella sorokiniana
  Clone ID: LIB3602-060-Q6-K1-H2
ccgccaagaaggccgctgcggcagctgaggccaagcagaagggcaaggcgcagcgcaaggagatcttcaagcgggccgaggcttatgtgaaggagtaccgcgcgcaggagctggaccgcatccggctgaagcgcgaggccaaggccaagagcggcttctatgtcgagcccgaggccaagctggtgttcgtgatccgcatccgcggtgtgaacgacatcgaccccaagaccaagaagatcctgcaggtgctgcgcctgcgccagatcaacatgggcgtcttcctcaaggtgaacaaggcgaccatgaacatgctgcagcgggtggagccctacgtggcgtacggctaccccaacctgaagaccgtcaaggagctgatctacaagcgcggctttggcaaggtcaacaagcagcgcatcccgctcaccgacaactcggtgatcgagcaggtgctgggcgacaaggacatcatctgcgtggaggacctggtgcacgagatcttcaccgtgggccccaactt

SEQ ID NO: 4900 - DNA, 95 bp, Chlorella sorokiniana
  Clone ID: LIB3602-060-Q6-K1-H3
aaaaaaaaaaaaaaaaaaaaaaaaaaaaaaaaaaaaaaaaaaaaaaaaaaaaaaaaaaaaaaaaaaaaaaaaaaaaggggggccgttttaggggt

SEQ ID NO: 4901 - DNA, 519 bp, Chlorella sorokiniana
  Clone ID: LIB3602-060-Q6-K1-H4
tcgaaaaacacataaataaaaaaaaaaaaaaataaaaaaaaaaaaaaaaaaaaaaaaaaaaaaaaaaaaataaaaaaaaaagagaaaaaaaaaaaaaataaagaaaaaaaacaaacacaaaaataaaaataaacaaaaggggggggtcctttttaaattactaaattttatttacccttctttacaacacattttttttttttttgtgcccctaaatttaatttatttgcccgttttttaaaaaggtcacaatttgaaaaaaccttggtttaccacacttaattgctatccacttacctcccttttttcccatttggattattttaaaaaagccccacccgatatccttttccaaatattgtcccactctaattggaaattgaacccccctttttaccggccttttaaccgcggcggttttgggttttcccccaagtttaacctttaattttcaagccccttagcccccgtttttttggtttttttcctttcttttttccccattttgaccttttttcc

SEQ ID NO: 4902 - DNA, 473 bp, Chlorella sorokiniana
  Clone ID: LIB3602-060-Q6-K1-H5
ctggctccgaagcagcatgagcagcttccctgtacactggaggcccctctcctactgcctcatgtaacctcacaagcgaaaaaaaaaaaaaaaaaaaaaaaaaaaaaaaaaaaaaaaaaaaaaaaaaaaaaaaaaaaaaaaaaaaaaaaaaaaaaaaaaaaaaaaaaaaaaaaaaaaaaaagggcgacaaaaaaaaaaaaaacaaaaattaaaaaagaaagggggcgcccttttaaaagtaccaaagttaacccccaagtcaaagcaagtaaccgttttttaaaaagggccccaaaaaaaaaaccctggggcccccaaaaaaaacgcttaaaaggaaaaaccccttgttgacccaaattaaaaagcttaaaagaaccccccctttcccccttccgaaaaaatacaaaaagggcctgcccaatggcacttcccaaaaaaggcccaataaaaaagggaaaatggaacgccccctt

SEQ ID NO: 4903 - DNA, 470 bp, Chlorella sorokiniana
  unsure (1)..(470): unsure at all n locations; Clone ID: LIB3602-060-Q6-K1-H7
cgcgctgtccttcgcggtgctgggcctctccgtctttgcgcggcaccgctaccctgcgctgcgcccgcacctgctggtgtgcgtgcgcgtcttctacgacctgctgtgcccccagctggtgtggcacctggccagccagaacagtcggggacgcagcgcggagcaaggcagctggcccagcttcttcctgctgtgggtgacgtggacgcggtggggcagcgagctgctgacgcaggtgggcttcctgctgcccttcaacctagaggccctgctcacaccctttggcgccctgctcgacatgctcaacaaccgccggctgtgcaggctactcatgggcggcgaaccgaccgatgcccagcagttntatcgggacacgtttgcacggctggcctcccgcctgactgtcccttttgagatgctgttcgccgcggcgcccgacagcagctgcagtgctgaggatggcaaggact

SEQ ID NO: 4904 - DNA, 515 bp, Chlorella sorokiniana
  unsure (1)..(515): unsure at all n locations; Clone ID: LIB3602-060-Q6-K1-H8
ctcttgcccagcccgtccagcagcagttagcagccatgcaggccaccttcgccggctctaagctgcagcttggcgcgcgcgtcagccgcaagagcgtgaacaccaccgtggtggcctccagcggcaagaagatcgacatcagcaagcagggcctgaactccatccagaatgagaccgtgaagctcaacctgatgggcaagtccaagaccatggagagcaaggactgggtggacccccagggccgcaagggcaagggctacggcgtgtaccgcttcgccaacaagtacggcgccaacgtggacggctacagcccgatctacacccccgacacctggtccgagtctggcgactcttacaagctgggcaccaagggccttattgcttgggccggcctgattgtggtgctgctgggcgtgggcatcaacctggtgatctccacctctgccctgngccagtaaatggcgacgccccccgcgtcggcagcagcagcagcagccagcagcattcccttgcag

SEQ ID NO: 4905 - DNA, 512 bp, Chlorella sorokiniana
  Clone ID: LIB3602-060-Q6-K1-H9
aaaaaaaaaaaaaaaaaaaaaaaaaaaaaaaaaaaaaaaaaaaaaaaaaaaaaaaaaaaaaaaaaaaaaaaaaaaaaagggaaaaaaaaaaaaaaaaaaaaaaaaaaaaaaaaaaaaaaaaaaaaaaaagggggcggcctttttaaaggatcaaattttacttccccttcattgcaaggttttattttttttttggggcccctaaatttaatttcattggccgggttttaaaaacttggtaattggaaaaaccttggctttcccaatttaattccttttgaaaaaaatccctttttcccaagttgggttaatacaaaaaagcccccaccctatcccctttccaaaaattttcccactttaattggcaattggaaccccctttttaccggccttttaaccgcgggggttttgttgtttaccccaagggtaaccttttattttgcaagccccttagcccccgtttttttcgtttttttcctttcttttttggccactttcgcggtttttcccct

SEQ ID NO: 4906 - DNA, 476 bp, Chlorella sorokiniana
  unsure (1)..(476): unsure at all n locations; Clone ID: LIB3602-061-Q6-K1-A1
gcggcaagggtaagatgcgcaaccggcggtacgtgcagcgcaagggccccctggtggtctacggcaacgacgccggcatcagcaaggccttccgcaacctgcccggcgtggaggttgcctccgtggagcgcctgaacctgctgcagctggcgcccggcggccacctgggccgcttctgcatctggaccaagtctgctgtggagaagctggacaagatcttcggcaccaccgagaccgcgtccgagcagaagaagggctacaagctgccgcgccacatcatggccaacggcgacctggcccgcctcatcaactctgatgagatccagtcggtggtcaagccgcagaagaccggcaccgcccgcgccgcgctgaagaagaacccgctgcgcaacctgngcgcgctgctcaagctcaacccctacgccaaggtggcgcgccgcgccgagctgctggccgcgcagaagggcgccaagtcg

SEQ ID NO: 4907 - DNA, 288 bp, Chlorella sorokiniana
  Clone ID: LIB3602-061-Q6-K1-A10
cgcccagcccatgggcacgacacacatgcatgtatctctctggtaatcccgcccgcgtgtttgccgccggccgcccccgttccccccggcccggccgctgtactctaccccgcccccacgtgcaccctttttcctggagctgccgcctctgcgctcttccggcctgcaccactctgctgctctgtgccatgcccatgtcaacccctgcctgcgtctgtacatcccctttttcctccttttttgtgagcgtgtagctgctttcatgctgtcatgtagcaacttgcaatc

SEQ ID NO: 4908 - DNA, 488 bp, Chlorella sorokiniana
  Clone ID: LIB3602-061-Q6-K1-A11
cgcccccatcgtggcttcggcccagcagcagaaggccgcccccaaggcgaccgtggcggccctgccccgtgtggccaaggccctgggtgccggtgtggcctccctggccctggcgctgagcgccaacgccgccactgtgaagctgggcgctgacaacggcgcgctggtgttcgacccctccaacatcaccatctccaagggcgagtctgtgacctttgtgaacaacgccggcttcccccacaacatcgtgttcgatgaggacgatgtgccctctggcgtgaacgccgaggcgatcagccgcgaggactacctgaacgcccccggcgaggagttcaccgtcaagctggacaccgctggcgagtacggcttctactgcgagccccaccagggcgccggcatggtcggccgcatcaccgtgaactgagcgcagcatgctcagcgccgcggcgtgcactgacccatttttgaagcacttgctgtctctcttc

SEQ ID NO: 4909 - DNA, 283 bp, Chlorella sorokiniana
  Clone ID: LIB3602-061-Q6-K1-A12
tcgagacggcgagcggcggcgcagccgcagccgcagccgcagcaaggggcgcagcaggcggaggcacagccgcagccgcagcccgcgccggtcaaggcgcagcagccgcagcaggagcaggagcagggagcggcggcgctgaaagcggcaccccttgcaaccctttgcactgccgcctttgcactagtctgcgatggtgtcgcgcagcctgtattcctgccttgccatcagttgcacacttgccagctcactccgtcactcatgaagcagcatgtatacacac

SEQ ID NO: 4910 - DNA, 315 bp, Chlorella sorokiniana
  Clone ID: LIB3602-061-Q6-K1-A2
cgcggaggtgccctttcccagcggcagccccccgtttacagccccacgcccaggcgaggttggccggccagcaaatgatgcctctgctcgtgtgcccgacggccacagggcgccatgctgcaggcatggcagttcagcggcagttgcacctcccgccacacggctgccgagtgcagtgtagcccacacttttgccaacttgtgtaccctgccacgacaagatatgccttctcttttcctgctccatgctgcctcggttgtacatttcttcgctctgttgtacacttgcactgccctgtaaagtcatgtgtgtgtc

SEQ ID NO: 4911 - DNA, 494 bp, Chlorella sorokiniana
  unsure (1)..(494): unsure at all n locations; Clone ID: LIB3602-061-Q6-K1-A3
cggacgcgtgggcgcgcctcgcttgcttgatcgtacgtgtgccccttccgtccgggcctgtttaccctgttccctgcccctgcctccttttgagccgtccctctgcgcgtcccgtctgccacgcggcctgctcgctggcaccgccagccgcggccagcctttttgcgtgcccgccaccctccagagatttagtgtcctagtactccggtttgctttgattttttctgcctctgctctgcgcacagacaagcaggcgttttggcccccggtccccccaaccacgtctccccacaaccaacccctcttacccgcaattcctttgtttcagcgccccctggaatgtgggggcacaccgcaccacaccagccgtatcccccccccccccccccccatgcacagngcccgcctgaccgnaacctgccgccgtgctatcaacctgctccctgccactttatttggccctgcccatgggttgtaaatgaactgcaatcaaa

SEQ ID NO: 4912 - DNA, 495 bp, Chlorella sorokiniana
  Clone ID: LIB3602-061-Q6-K1-A4
cggagcaggggctggtggtggcgccctacatgctcagcggcatgaccgacagccggcactacctgccgctgtcgggcgggcgcgtataccgcttccagccgcagcgcttcactcgcgcctcgctggccactgtgcacggcgtggacgagcgcattgcagtggacgactaccttcgcggcatcggcttttatgtgcgcttttacgagcgggccagtgcagacctgggttcagaggaagcggcagcggagggggcagcaacagcgcagcaggcgacagcagcacaagaggcagcagcgggggatagcgagggcgaggcaggcgcacaggcatgagccatagttgctcacacatgcggcgtgctgtgcagaaatagttgcctgtacacatacactactcgtttgcttcccgaagcaacctactcccttgcaagcaacctattcccttgcaaggtgccatgccggcacacgaggtgccggcttcaccacaagcagtact

SEQ ID NO: 4913 - DNA, 440 bp, Chlorella sorokiniana
  Clone ID: LIB3602-061-Q6-K1-A5
cgacaccttcgctgagctgaaggttaaggagctgaagaacggccgcctggccatggtgtccatgctcggcttcggcgtgcagggcctgatcacccgcaagggccccattgagaacctggctgaccacctggcggcccccgacgccaccaacttctgggtggactacgcccccaagtccgccggcatcggctactaagctgtttccgtcgcttgactggcgccgcccgctcgcccgcccgctgagtttacggccactcgcggcaacaggcagcagcggcgtctgtactttctgactcctccggcgattgctggtggcgcaccttgcttgctttgatgcttgcttcgggggcctaggcaccctcccatgcaacacatgaacccccaccacccctgccaacccaagtcttagcctgtgtttgcgcgcggtgaaggcaatgaga

SEQ ID NO: 4914 - DNA, 365 bp, Chlorella sorokiniana
  unsure (1)..(365): unsure at all n locations; Clone ID: LIB3602-061-Q6-K1-A8
ctggaacaagcccgcccacgactacatccagctgtactattccgccatggagtagggcccccaactcagcaagaacccgctcaatcctgttgcaacccgactgattttgatgtgccaacgtgcccgcgtccctgttctgcacacgcgcctcccgcgcctgccgccccgattcttgttgttcgcacatttgtgtccattccgtcctttcgttgctgtgcgccggcctcgtgccccagccttctcgcggagcacggtgcggcggctgtactgtactgctggtctttctcccgctgcgcctgccgctgttgatgagagcatttcattcagtcaccacttgtgtaacacttgctttgcaaannanaaaa

SEQ ID NO: 4915 - DNA, 434 bp, Chlorella sorokiniana
  Clone ID: LIB3602-061-Q6-K1-A9
gaagcttacatcaacaaatcacagccaaacattcaacgtggcaacagcaacggcggctgtcgccgggtgcagcgctcgtcaagtccatctcgcccggccggtgagcactgcccacctgcctcatagccatggctgccctgccacaccactggcactatgtcgccatcagtcaaccaaatcacatgctgaaacgaaataacagggaagtcggaaggcaggtcaacagatagcactgtcggtgcagggagccccgccggctgcggcgtgcaccgcaccaaaagcaagtgatggtgtggccattaggtagctactggcacagtaaactaggtgcctactccgctcgaacctcgtccacagtggctttcagtttgagcttacctgcctgcagctgcagctgcccgctggccgcattcacgctggccaccttgaaacgc

SEQ ID NO: 4916 - DNA, 495 bp, Chlorella sorokiniana
  Clone ID: LIB3602-061-Q6-K1-B1
gcggccgcgctcagtgccgccgccctcggacgcaacgatgggccagccgcagttgggggccgcccagtgaggcgccccagttatcatcaacccgcccagtgagggccaccccctagccaaccttgcaccttgcatgccagcagcgcacttgcacccgccaccacgctgtgcttgagacgagcattttgatgggccccgcggcatcaccagcagctgttttttgtgtacttgctctttcccctccctccactcaaccccgccaccccacatctcatcgccacgacacaaacagccccctcccccaatgtttgaatccacccccagaactgttttgtttccccgccgcgccagccgcgccggcgcccctctgcaactggcgccggccggctctgtgccaccttgttaccgtcccacctcgatcgtttccaaacctatcggcgtgcaggctgtgctcacccgctgttcatgcgcctgccacccagtttgattcctatc

SEQ ID NO: 4917 - DNA, 316 bp, Chlorella sorokiniana
  Clone ID: LIB3602-061-Q6-K1-B10
aaaaaaaaaacataaaaacaaaaaaaaaaataaaaaaaaaaaaaaaaaaaaaaaaaaaaaaaaaaaaaaaaaaaaaaaagggggaaaaaaaaaaacaaggaaaggggggcggcctttttttgggttccacgtttcttggggccggggtggggcgccttggattttttttggtgtcccccgtttccttttcggggcccgtcttttttttccggcgatctgggtgagccctcctcgtgtccctacttattggcggtgggggacccctcttttgcctcctggttgttggggagaccccccctcttttctcctttttcct

SEQ ID NO: 4918 - DNA, 59 bp, Chlorella sorokiniana
  Clone ID: LIB3602-061-Q6-K1-B11
aaaaaaaaaaaaaaaaaaaaaaaaaaaaaaaaaaaaaaaaaaaaaaaaaaaaaaaaaaa

SEQ ID NO: 4919 - DNA, 84 bp, Chlorella sorokiniana; identical to SEQ ID NO: 289
  Clone ID: LIB3602-061-Q6-K1-B12

SEQ ID NO: 4920 - DNA, 338 bp, Chlorella sorokiniana
  Clone ID: LIB3602-061-Q6-K1-B2
gctccaaaattctggtcgacccacacgcgcgcggcacgaactcagagccgtcgccctttgacgcactcctgctgctcccgtagttgggggccgcccattgtggctccggggggattattaacccagcccagtgaggcccacccactagacctgcatcctcctaagctgccagatcgttacttgcactcgccaccaccctgaacttgactccatcttttcgatcgacctcgcggcatcaccagcagctgttctttgtgtacttcctctttccactatctccactcaaccccatctcatcacatgtcatcttcacgacacaaacaatccctttcatcaat

SEQ ID NO: 4921 - DNA, 456 bp, Chlorella sorokiniana
  Clone ID: LIB3602-061-Q6-K1-B3
aaaaaaaaaaaaataaaccacaacactccaaaacaaaaaaaataaaaaaaacataaaaaaaaaaaaacaaacatacaaaggggggaaaaaaaaaacagggggggtggcttttcttggccttcctttctttgcccgccgttccccccccttaattctcttttttttcctcccattacctgtcttctgcccgtcgcttttcatcccccttacttcgatctgcggttgcctgtctcagtttattacttgttcgcgcttatccccctttttccaccttgtgttctaattgcaaggccccctcttatggcctttttaaacagttggtactcttgaatacgcatagacactcccctcttttcggcggtccaatccctccggtttttttggtttctttcactgtttcctctccccttttccccactttcacccccaacccttacttcgttttcttttcttttt

SEQ ID NO: 4922 - DNA, 458 bp, Chlorella sorokiniana
  Clone ID: LIB3602-061-Q6-K1-B4
ggcatgaacacgttcctcaagaacctggagatcacgttccggcgggaccccaccaactaccgcccccgcatcaacaagaaggagtcgaccaaggaccgggagcagaagctagcgggcaccttctattacctggaggactgagcggtcgtcgcacctgggcgcatgggtgcacgccatctccccccagctggctggctctggacgctcggcagcacccttggcaacacccagcagaggccacttgtgcccctcgccgctgggcgccatgcagctacacacccttcacacccgcaccaactgtcattgattgccaggcgggcagcaggctcagcagcggccccgctccgcctgctcacgggccgccagcagctcctctgagggcgctttgtgcagcctcccggcgctcttatgttgcttacaaatctcaacgttgccaggactgtaacgcacctgctggc

SEQ ID NO: 4923 - DNA, 419 bp, Chlorella sorokiniana
  Clone ID: LIB3602-061-Q6-K1-B5
cttattgacttgccacgaggcaggacgcaatacacaagcaagactcacgattgcatgccagcctgaccagttgtagttgtaggcaacaatgatgctcggctccctcttagaaagagccggcagcccatgctaggtagcggtgcagccgtggcccatgatacccctgccacgccccgctctgatttgtacagtaggaaatgcatgccctgtagaaccaccagtgcgactgtacatccctctctgctctgcgctcacccctcacatgcctctgcgaatgcccaggacatttctctgacttcttgaacctgtaccctgttgagggacgccgctcgcccagttgcatgcacacccctttggttgccatctgatcccatttcgtgcccgttctgttgcaaatgtcaaacgtttaacaggaaggt

SEQ ID NO: 4924 - DNA, 491 bp, Chlorella sorokiniana
  Clone ID: LIB3602-061-Q6-K1-B6
gcctggggtctgacgactgtacctaccttgctgtttgcccgggtcgccttgccacacctgcccaccccgcctctgccccggccgtgccgtattctttccgtattgaaggctgttgctccccgctcccagccagcaatcctgctcccccaccccggccatgcaccccgcccgccaggttgctgcacccctcccgctgcttctgtgctaggcacggcgcgggccagacggccaggcccgcaaggcacccccctctcaattgcacccagtccgttgctgcatcgcttcctcgcttcctgtgctttttcctggtcccccgtgagcgcggcggcggccgggctgccgttccgccccccccccccccgctcctgcccttgtagtcctctccttccaccctttctctctttcggaattcttcgcctttgtcgggctgagcaggcctcggcgccccgcccgccgccgcgggccgaagcacacgccgccgctcccatccc

SEQ ID NO: 4925 - DNA, 487 bp, Chlorella sorokiniana
  Clone ID: LIB3602-061-Q6-K1-B7
gcttgaaaccccatgcagcaggaggcggggcagcgcaggcagctgatgcagcagcagcaggggcggttgatgaggcaaggtggtgggaatggtcggacgaagcagcccagcagcacagcgcgcagcagcagcagcagcaggcagcagcaggcgaggcatccagcggctgcatcaaagtgttcgacttgttgtcaggccagcaggtggcagtggtgcagccgccgctgccctggagcgggcgcggcaagccggctctgcgtgatgcggtggcagcggcggcggcgagagcagcgctgcagcactgcagcacgctgttttactgcgaggcctctcgccgaatatacactggcactgccaatggcaaggtgcaggcttgggcgctctgatgctgttgtgccgaacattgcctggctgggccagcctcggggtgccaagctgctctggtgccgtgctcttgtctccacagccattgtacactaccaaagct

SEQ ID NO: 4926 - DNA, 481 bp, Chlorella sorokiniana
  Clone ID: LIB3602-061-Q6-K1-B8
ccctcatggccaagctctcggtggttgttgcgctcctgctgctcgctgtcggtgcccgcgccggcagcgactccgacaagtgcgccttcgagttcagcgatccgtgcgagcagacctggaacgtcgaaagcggccagatcgttggacctgatggcctagacctggaagtcgcctccgcctgggcggccgacctcgccgccgcggtctccgagcgcgtgcacaaggacaaggagtgcaagatcgcctcctggaccgtgctcaaggcctgccgcatggccgacaatgccgtccacatgttcttccagcacaacatcgagtgcccggacaacaacggcttcaaggtcaagtacgagaccaagggcacgatcacctctgaggagtctgacaagctggaggacccgaacacacgctttgtctgcgtcttcgacagcaccttcgtctaggcgaacagccccccccatcttgccccggggcaacaacc

SEQ ID NO: 4927 - DNA, 490 bp, Chlorella sorokiniana
  Clone ID: LIB3602-061-Q6-K1-B9
cgggtggacgctggaccacgacacacccgccggcaagctcatgaccgtgttcagtgcacccgactacccccagttcatgcccgacgacacggagcggtacaacaacctggcggcagtggcggtgctgacggggcccggctgggccacgccagacatgcagcagtatgcagcggcgcacccacggcccgaggcgcagccctactacgatctgtgggtgcccgactcagatgaggagtgggagccggcagctagcgatgccagcggcatgaccgacgtgcagcggcccaccgcctcggtggccagcgacgccgccacgtttcaggacgacacgcaagcggcggcggcggcggcgggcggcgagatagacagcctgcaggctggtagtgcggcggcagcagcagctgctgcagcagcagcggcagcagcggcggaggaagatgtgtcggcagacacgggtgttgcgctggagggtgcgggtgccagcgcgccg

SEQ ID NO: 4928 - DNA, 492 bp, Chlorella sorokiniana
  Clone ID: LIB3602-061-Q6-K1-C10
gcggagtcgaaggcaacatgggtcgcgttattcgtgcccagcgtaagggcgcgggctccgtgttcaagagccacaacacccaccgcaagggcgccgccaagctccgcaagcttgacgctgctgagcgcaatggctacatcaagggcgtgatcaccgaggtgctgcacgaccccggccgtggcgcccctctggcgcgggtgcacttccgccacacggtgcgctacgccaccgacaagcagctgttcatcgcgcccgagggcgtgtacagcggccagtacatctactgcggcaagaaggctaccctgaacatcggcaacgtgaagccggtgggtgacatgcccgagggtaccatcatctgcaacgtggaggagaaggcgggcgaccgcggcagcctggcgcgctgctctggcgactacgccatcatcgtggcccacaaccccgacgccggcatcacccgcatcaagctgcccagcggctccaagaaggtgatca

SEQ ID NO: 4929 - DNA, 225 bp, Chlorella sorokiniana
  unsure (1)..(225): unsure at all n locations; Clone ID: LIB3602-061-Q6-K1-C12
ctcgcacgctcccactgctcccttgcttccgtatcctcagcctctcgtgttgatttccacttttctcctgctgctgacccctgctgcaccaccttcatgcaacccgtacttctcctgcttttctccacacattttggcttgcacgcatgttacgcatgaggcagggctgaatcaggggtcgagtgcccattcataatgcacaatgttgttggtaagcacagctng

SEQ ID NO: 4930 - DNA, 346 bp, Chlorella sorokiniana
  Clone ID: LIB3602-061-Q6-K1-C2
gcggctttgcggtagacgactaccacatgctggacgcgctgactgatgctgtggagcgcaccgactcgtcccgggaggtggacggccagctgtactacgacgtggactttgcctgccctgacgtccactacctgtctgtcatcaccgtttcatctggcaaggtgttcgccatgttagtcaagtagccagcgcggatctactcctagagcaagaacgaccttccagcaacagcatggatcttcaagactgagtgagcacttactacagccagcttgagcccgactgctccctcaccgaccgtgcttcgcaaagaggcacacctcggacagctgatgagcactcactt

SEQ ID NO: 4931 - DNA, 492 bp, Chlorella sorokiniana
  Clone ID: LIB3602-061-Q6-K1-C3
ggttagcatcatgcgattgagtgggtggagtgtcgtgtcatcatggctgtccagcgtgcttttcagcgccttggaatcgcgcgcgcttgtgctgctgactcttgctgccttgcccttcaccgtccccgggtgcgcggttgcaggcagcgcgagcagctggccactcctctggaccccgtggagcatcgagcgctgctggagcagtgcgcggcagcgatgcgccccacctggaccctggatatgggcgcctttgcacggggcgccaaccgcgcaacgcacgatgcgcagcaggcgccgcccgccgccttgggcgcccggacagcagcggcgccagccgtggtgccacacggcctggctttctgagcaaaccatcagcagcatgcagagtgcaggcaggctagccgctcaacatacattttgtaggcaggccagagcatagttcctggcgccagatacatgcgctgcttgcagctgcaaacttccaggtttctg

SEQ ID NO: 4932 - DNA, 250 bp, Chlorella sorokiniana
  Clone ID: LIB3602-061-Q6-K1-C4
ggcgggttagaataatacgattgattgcttgtagtgtacctatcatcatggctgtccagcgagcttatcagctccttacaaaggcgcactcttaagatgccgactattgctcccttgcccttcaccgtccccgagtgcgacgttgcatagcatcacaagcagctggccactcctcatcaccccgttgaccatcctctgcttctggagcagtgctcagaaacaatgcgccccacctagaccctgcatatgg

SEQ ID NO: 4933 - DNA, 489 bp, Chlorella sorokiniana
  Clone ID: LIB3602-061-Q6-K1-C5
aggaaccgccggccagccttggctcagcgctgccgccatctggcgccgtgccgccgtgggagaaggacggtgcacgacagatggtgggcgatgggctggatgagctgcgggcacgggtcaaggcacatgcggagctgtacttgtccgacgaggtggactggtcttggaggctggcagaggtgcagcaacatctggaggaggaagagtccaattggctgcgcaactttgaagaggcagagaagagcggcgacataggagagatggatgaggccgccgagttgtggaaggaagcagcggagctgctggagctgctgaggcaagatccagacgagtttgtgaggcagcatgggtacgactacgacatctatgatgtctgatgcccggccatgtcgtccatagctagttgcccctggccgaggcaggataccatctaagctaggccagcactggtcgcacaacaccctgtcgcttgttgacctgccaatgcac

SEQ ID NO: 4934 - DNA, 491 bp, Chlorella sorokiniana
  Clone ID: LIB3602-061-Q6-K1-C7
cgagatccgctccgagggcctgacctgcaactgcaagatccccggcgtgcacgatgctctggaccctgagtactccatcctgaagcagcgcattgcccgccggctgcggcacgagggagccaccgacgagtccgtgaagggcctcaacctgaccgacatcaccaaggtggctgagcgcaccatcagcgacgacctggagttcctgatctcccaggccgtggaccccaagaaggccgactacgcagtgatcactggcgtgcagatccacaactgggccaacaactttgaggatgactcccccaacctggagtttgtggctcccactgccgcctacgtggtggtcaacggcgtgaagacccacattgacctgaccgccgtgccgcctctgacgccgcgccagacgcgcctgctcaacggcacccccgagctgagcgccaaccagggcggcgctggcgtgctgatggaggagtcgcccgacttcagctacgact

SEQ ID NO: 4935 - DNA, 492 bp, Chlorella sorokiniana
  Clone ID: LIB3602-061-Q6-K1-C8
cacacccctttagacgttgccctggaagcgggtcaccagggagctgtggagtcgctcctgcctccagaggacaagacacccactccccctcagagcagcgccggcgtggggccgcagacgccggcagcatctcatgcagtcacgccttcggtcaacagcctggacaatttgtcctcaacacccagtgcgcccccgctgctggaccaggcaggcccctccagcagcagcatggctgggccgtccagcagcagcggaaatggcattagcgatgtgtgcgtcgtctgtctggacaacccccgccaaacagtgctgattccgtgcgggcacagggcgctgtgccagacgtgcgctggggctcagcgctcgcgccactgcccgatctgccgcactcagatcctgtcgtgcgtgcgcgtgtttgacgcttgaacaccaaacgaactggtgctgaacttcaaactttgcaacatttcctttacaaagacaggacgtgcc

SEQ ID NO: 4936 - DNA, 486 bp, Chlorella sorokiniana
  Clone ID: LIB3602-061-Q6-K1-C9
cgcagtgccccatcgtggagaggctgaccaacagcctgatgatgcacggccgcaacaacggcaagaagctgatggcggccagcattgtcaagcacgcgtttgacattgtcaacctgctgaccgaccagaacccggtccaggtgctcgtggacgccatcatcaacggcggcccgcgtgaggatgccacccgcattggcagcgccggtgtggtgcgccgccaggctgtggatgtgtcgccgctgcgccgcgtgaaccaggccatctggctgatcaccaccggcgcgcgcgagagcgcgttccgcaacatcaagaccattgcggagtgcctggcggacgagctgatcaacgcggccaagggcagctccaacagctacgccatcaagaagaaggacgagatcgagcgcgtggccaaggccaaccggtaaacggctgttgcgcacccaccaaaacagcagcccgccacagccggcacccctgggcaggatg

SEQ ID NO: 4937 - DNA, 401 bp, Chlorella sorokiniana
  Clone ID: LIB3602-061-Q6-K1-D1
ggagcgctggaagtttacactggtgagctgaaacgagcaatagtgcacggaaaatagggatgcatagtatcgggcaaaaggcctcgctggtgtataatttgcaaaacaggccacaaagcacgcagttttgggggggggcctgttttaaacactggcccgccttaatccgtttttgaccttttgccggatctgtttgggcgtgagcaacaggcggtccattaaggacccctcccgcatgggcccatgctgcgggggcaggagtgggaggggcaatgggggttccagtcagtcggcaggcgcaagggaacacatgagccaccccaacggccagggcccatgttcaaagatactttttttgggcacataaataaagctgcataagctcggttgcccacctgccc

SEQ ID NO: 4938 - DNA, 422 bp, Chlorella sorokiniana
  Clone ID: LIB3602-061-Q6-K1-D10
caggacgtttacacggacaagtctgagctggacaacgtggtggagctgttcctgcgcttcagcctcgcctccctgccaggcgtgtctgcgggcgtgccgtctgccactgcccgcctgcgccactcttaccagatcatcggcgccaacaccattgaaataacgtttgaggacacggaggtgaagctggcgggcggcctgcagggctggctggacaacctgcccaccttcgccgtgcccaagctgcccgagttcctgcagacgcccaagggcgtgcgctctgcgcgctttgatgttgtgttcctggacgaaagcatgcgcatcacgcgcggagaccgggacgagctgcgtgtgtttctgaagggcgctgtgtgagaactcttctccaatggagccctcccgcaagctggcaaccccagccactg

SEQ ID NO: 4939 - DNA, 477 bp, Chlorella sorokiniana
  unsure (1)..(477): unsure at all n locations; Clone ID: LIB3602-061-Q6-K1-D11
cggcggcccaacctctccgggttcccagagacactccaggcgcagcggccgcaccggcgccagccaccatgcagatgttcgtcaagaccctcacgggcaagaccatcaccctcgaggtggagtcgagcgacaccatcgaaaacgtgaaggccaagatccaggacaaggagggcatcccgcccgaccagcagcgcctgatcttcgcgggcaagcagctggaggacggccgcactctggccgactacaacatccagaaggagtcgacgctgcacctggtgctgcgcctgcgcggcggcatgcagatcttcgtcaagacgttgaccggcaagaccatcactctggaggttgagtcgagcgataccattgagaacgtcaaggccaagatccaggacaaggagggcatnccgcccgaccagcagcgcctgatctttgctggcaagcagctggaggacggccgcaccctggccgactacaaca

SEQ ID NO: 4940 - DNA, 325 bp, Chlorella sorokiniana
  Clone ID: LIB3602-061-Q6-K1-D3
cccccccactttaattttttttttttttttttttttttttttttttatatttttttttttttttttgaatattttagggatctttttttcatgatttaaagcattttgcataaaaaaagcggcctgtattttaatccaaaaaaaataacaatgggggcgggaaaaaaaacacgccgcggaaaaaacaaaggcgttaaataaaaaaaaaaaaaaagggggtgcaagggaaaaaaaaaacatctgcggtcaaaaataaaaaaaaaaaacccatgttcttcaaccccggccaaataaaatggggggtaaaaaaaaaaaaggggggggc

SEQ ID NO: 4941 - DNA, 464 bp, Chlorella sorokiniana
  Clone ID: LIB3602-061-Q6-K1-D5
gccgaagaaccgccccgtgctgcgctgggcaccagtggtggaggctcgcaagacggtgggggagcgccgcggtaccaggcgcctacagcgcgacatccgtgtggctgccagtggcggcgagaactgccctgagagcgacgaatgagcacccgagggtagcccgcttccagctgcaagccatcccgcagttgcacccaagttttgcccccgaccggcactgcatatatagctccccttgcctctgtaccatgctgcccaagcttgcaacgagcctgccttgccaccttactgtttgcgaagatgccccccgtgtgcctgtgccccgtgctgcacttgaacccgccttgccaaattcatgacccgcgccgcatccaactcctctctcttgccgcctgcctcccttgtctcccaagcatttgctaactgttgcacactgactgtagagcatgtaaagtgaacatggc

SEQ ID NO: 4942 - DNA, 210 bp, Chlorella sorokiniana
  Clone ID: LIB3602-061-Q6-K1-D6
gccgctcaagctgcagcggccgttcaaattctttagatcattgcacagcacaccttacacctccttcacaactgcacagcatgctcatgcaagccttctttgaagcattgaacagcacaccatcgatctttcgtgtaaggtaatcccagcaagcctgcaagtgctgcgctgccacccgcctcgcccctgcatgttcacgctctcagagtt

SEQ ID NO: 4943 - DNA, 491 bp, Chlorella sorokiniana
  unsure (1)..(491): unsure at all n locations; Clone ID: LIB3602-061-Q6-K1-D7
ggaagaagcaggagtgcgaagaaaacaaggcatacacgtggagcaatgcgagcagcctgggcgcgtccgggcggcctgcggcgactgcgagacctgcgccaagggcgaccaagagtgcatgtctcgcaaccgcatgcggccggctacctgtccttggacggaatgaatggacatgtgaccctgattcagccatgcccactcacttcttatcccagtccacaagcgtctgttcccgtgacagccctaacagccctcccttcggcatgccatgttcggcggcatgccatctgcggcggtcagcacactgcggctacggcagccgctgccgttttactctgagcctctagcctaccgtctgcattttgtgctgctgaatatttgcgttgccgcagcagaatcatgtcacagtcacgccnnnnaaaaaaaaaaaaaacagaatggaaagcaattaaaaagaaacagggaaacaaaaagaaaaaatgaaacgcgcc

SEQ ID NO: 4944 - DNA, 493 bp, Chlorella sorokiniana
  Clone ID: LIB3602-061-Q6-K1-D8
ccagccccggcccgcacaagacccgcgagtgcctgccgctcatcctgctgctgcgcaaccgcctgaagtacgcgctgaccggcaaggaggtgaccagcatcctcatgcagcggctggtgcaggtggacggcaaggtgcgcactgaccgcacctaccccgtgggcttcatggacgtcgtggacatccccaagactgacgagcacttccgcgtggtgtacgacgccaagggccgctttgtggtgcaccgcatcaccaaggaggaggcatcctacaagctctgcaaggtgaggcgcctggcattcggcaagggcggcatcccccacatcggcacccacgacggccgcaccgtgcgctaccccgaccccgagatcaaggtgaacgacacggtgatgctggacctggagactggcaagatcaaggacttcatcaagttcgatgtgggcaacctggccattgccaccggcggccacaacaacggccgtgtgggcaccat

SEQ ID NO: 4945 - DNA, 490 bp, Chlorella sorokiniana
  Clone ID: LIB3602-061-Q6-K1-D9
aacgctaagcctaagtcaaaaaaaaaaaaataaataaaaataataataataataaaaaaaaaaaataaaaataaaacgggaaaaaaattaaaaaaaaaaaaaaacataaaacttatatttttttaattttaaaataaaaaaaaaatattatatattattttttttatatatttttggggcccccctttttaaagtttccatttttttttcccttttttttcaagtttttttttttttttttggcccccttatttttttttcctcccccttttttttccccctttttttttgaaaaccctttgctttcccccatttttttcttttgtcaccctttccctttttcccctttttctttttttccaaaagcccccccccctttcctttttcccaatttttcccctcttttttttgttttttcccccccctttttttccctttttttccccctccttttttttttttttttcccagtttttctttttttttttcc

SEQ ID NO: 4946 - DNA, 493 bp, Chlorella sorokiniana
  Clone ID: LIB3602-061-Q6-K1-E1
caggccccaaagcgcccgccacgcggtggctgcgtgccgggcttgccccctccctgcagcttcttctcctcagcccgtgctcagggctgtcggcagctagcgcgtcgggctcccagcctctccaggctgagcggcggcaggcagccgctgctgtcaccgccccccgccacgctcacggccgatgggccagggacccagtaaagatcccaacatgcggatgcaagagctttcgcgtatgtggaaccaggaccgccgggtgatgcacgcttggaggtggcgcatgcgcgacgaattggctgccggcgtccctcccacgccgggcaccgccacggctgcgtgcactgccgcttcggagcacttgcacctggtaaccctggagatgggggccgtcacccgtcacatattatgcccgtcagagccgatgcctgacccgacccctcccctgcacgtgacggctccgtggctgttcgcgccggcagtgccgccggtgcag

SEQ ID NO: 4947 - DNA, 407 bp, Chlorella sorokiniana
  Clone ID: LIB3602-061-Q6-K1-E10
gttgatgtggtgagcatgctggctagcacagacctggagggaggggatgtgcccttctgcccggatggcagcgaggagtgccccatcccttgggagaacatggtcagcggagagcagccggctgagcagcccgcagctggcacccctgccaccaaggcggccagctgaggctgccggccaggccggcacccctgtgcttgactcgttttcccacctgcctggtgtgcgccattttgcaaacccagctgtgtgtggcacggcaggcggtcctgttccttgccctgcctcgccccgctccctgattgtttcgaccctgctttcagtcctccggtccgcaattttatcacataacccccattctttcctaccgctctcagagcactgctgctcacatgtaacttgcaacg

SEQ ID NO: 4948 - DNA, 432 bp, Chlorella sorokiniana
  Clone ID: LIB3602-061-Q6-K1-E11
cccccccccttttttttttttttttttttttttttttttttttttttttttttttttttttttttttgaacacaggggtgttacaaaatttaagccattaaggctactgggatgatttgcaggaacagtacaaaaaaggaaagggcggcaaaacgagatacccccaaccctgctaaaactactttggcctgttggtggggtgctgaccaaaaacttcccaaggggccgtgcgcaaagacccctctaatgtgcgaaaggagggggttgcccggtcaatgagagccccggcgccttaagaaccctggcaccgccgttggttgagaatccttgccccaaaacctaaagaaaagtccaaagagccggacacctgggcagacccatgggcggacacttgggccgacccctgggaagggggtgaaccaaaacttttgc

SEQ ID NO: 4949 - DNA, 343 bp, Chlorella sorokiniana
  Clone ID: LIB3602-061-Q6-K1-E12
acgaaatctgcgagctggacgatggaacggtgcacagcgatgataatgagaaggccgcgcccacggagctgcacgcggagtgagcggcgcgcccaagcggcgctgcatgcgcagcggcgtgagcgctgctggtgcaatgtgcctgcccagcacggcggctgccgccgctgagcacggtgaacaacctatctgagcgccgctggcggaagcggatgcacagccagcgccgctccgccgcccgtgcggtgcccactgctttgatgcgcataaacgcctgacagctatttggccacttgcctgctatgcctgatgaacatgagctgccgaaatgcatccttctgac

SEQ ID NO: 4950 - DNA, 494 bp, Chlorella sorokiniana
  Clone ID: LIB3602-061-Q6-K1-E2
gcgtggctggaggatggcaagagcgccagcggcagccccaaggtgtagggcagctgcccaggtggcactggatggggcgtcccggcagatgtgccttccgttgcttcagcttcccccagccttggccgctgcccccgcccctctggccctttaacagcctggccacgccaggagacgcacacttggactgcaccctgacagctagtgcaatattgctacaccctgccatgccgttgccggcctaggagcccagagcagccccccgtgccccactaccatgcctgcctttgagagcccgccccatgcacatgcgactcctcctgctgctcaccttgcatgcaaacaatccttaatgcaccctgtcaggtaatgtacacattcacactctttctgcagcctctctgttgtttcgcttttccggcctgttctctctcactctttcccaagcctgttacccaaccctgcccatctattcgctgatccgatgacccgca

SEQ ID NO: 4951 - DNA, 424 bp, Chlorella sorokiniana
  Clone ID: LIB3602-061-Q6-K1-E3
acataccatttgttgcacattaagtcctggtaccagatcggcataaggacgcaaaaaggcactgtacagtcgggccttgaaaatgggtctggataccttggacgtgtgggtgagtgggtgtgccaacatgatggatgggtttggcagcagctttgcatggcagcagccgctgtgtgaagcgcgggtgaagggtggacatggagtgaggtgtgggaggtaggatgtgcggcggtgagcggcaggaaaggtggcgggtggaaaatgggtgcgggtgagggggcggcaggtggtgcaacggcggacgtgcgtttggggtggcaaatttggtggatggggaggatggtgcatggagggcgttcagcgggttatgggtggtgagtgggtggcacaagttttggcggagggaaagtgactggatcggtgg

SEQ ID NO: 4952 - DNA, 434 bp, Chlorella sorokiniana
  Clone ID: LIB3602-061-Q6-K1-E4
tcccgtctcacgctctccccctccgacacgctcgtctgcggcaccaagtacaatgtgccgctggtcaacgcgctggccttctacgtgggcatccgggcggtggaggcgtcccctcccaacccgggcacctcccccgccatgaacacgccgcacatggaggtgttccagcacctgctgcgggacctggacacagagggccgctacctgttcatcaacgcgctggccaaccacctgcgcttccccaacgcacacacccattacttctcctgcgccatcctcttcctcttcaccgaggcgggctctgagctgatccaggagcagatcacacgggtgctcctggagcggctgattgtgaacaggccgcacccctggggcctgctcatcaccttcatcgagctcatcaagaacccgcgctactcattctggtcgcacgc

SEQ ID NO: 4953 - DNA, 481 bp, Chlorella sorokiniana
  Clone ID: LIB3602-061-Q6-K1-E5
gcgccgcaccacccaggaggagaatgtcagcctcggcccggccacccgcgagggcgagctggtgtggggcgtcgcccgcatcttcgcctccttcaacgacaccttcgtccacgtgactgatctgtccggcaaggagacgctggtgcgcgtgactggtggcatgaaggtgaaggccgaccgcgacgagtcgtccccctacgccgccatgcttgccgcccaggacgtggccacccgctgcaaggagctgggcgtgaacgcgctgcacatcaagctgcgcgccaccggcggcaaccgcaccaagacccccggccccggcgcccagtccgcgctgcgcgccctggcccgctccggcatcaagatcggccgcattgaggatgtgacccccatccccaccgactccacccgccggaagggtggccgccgcggtcgccgcctgtgaggcgggcgcgctatgcgcgcttcggccacagcccggatgctt

SEQ ID NO: 4954 - DNA, 492 bp, Chlorella sorokiniana
  unsure (1)..(492): unsure at all n locations; Clone ID: LIB3602-061-Q6-K1-E7
ggcgttcagccactccatgatgtgctcgctgcgggaggagggtgacgagcgccagggcctgtccggggtgctgccacccagcgagctggccgctctgctggcagccgaccaccgcccgctgtttgcgctgcaagtgctggccagcgtggtggcgcgggcgcagcaggcgtggccgcagcaggggcagcaggcatggctgcatgggcagcagcagcagcaggcgcagcggcagacacagcagttgcagcagcaggcacagcagttgcagcagcaggggcagcagcagggccagcagcaggggcaggacgcaagcatgccaagcggactggtcgccactgggccatggccggcagtgggcatgcagctggccatggatggcaatctgaccgcgctcgaggatgcactgggcacatgtgagcgcatcttgcgcacgcccatcccgctgggctacacgcgccacacctnccgcttcctcatgatctggctcaccct

SEQ ID NO: 4955 - DNA, 462 bp, Chlorella sorokiniana
  Clone ID: LIB3602-061-Q6-K1-E8
aaaaaaaaaaaaataaaaaaaaaaaaaaaataaaaaaaaaaaaaaaaaaaaaaaaaaaaaaaaaaaaaaaaaaaaaagggggaaaaaaaaaagggggggcggtttgttttttccactccttctttccctccccttccgtgccattgctttttttttttttgccctcacttgatttcatttggttgggttttgtttccttagtttttgggcatggccctccccttacccaccttatttgccttgcttagcttccctttttcttttgctctgtttttatataagggaacaggcccggccgctcttcccttccctatattccccctaatttgaatgtggtatgcgccctttctttgtccttttattccgccgtgtgggcggggttttctccacgctccctttcctttttgctttcccttttcgcccccccctttggttttcttcctttccttttttttctcggcc

SEQ ID NO: 4956 - DNA, 266 bp, Chlorella sorokiniana
  Clone ID: LIB3602-061-Q6-K1-E9
cccgcctgcaccacatgtgcgccatggtgtggggcgagcagggatcggcgctgtcgcgcttggcagtcgcatggacgctgctgtccttcctgatgcagctggccttgctgctggagatgcatgcgcccctggcgcccacggtgcagctgggcggcacgtgaccgcttcttccattaacctttaccatcccatcctgcaatttaagctcaccatacctgtttgcatttcaagctagaattaaatctttatctgtaactgtttccaag

SEQ ID NO: 4957 - DNA, 494 bp, Chlorella sorokiniana
  Clone ID: LIB3602-061-Q6-K1-F1
cggtggagtgggcaattcgttcgcgatggtgaacgtcccgaagaccaagaaggccttctgcaagggcaaggagtgccgcaagcacaccatgcacaaggtcactcagtacaagaccggcaaggcgtcgctctacgcgcagggcaagcggcgttacgaccgcaagcagtccggctatggtggccagaccaagcccgtgttccacaagaaggccaagaccaccaagaagattgtgctgcgtctggcctgcaccgtgtgcaaggcccagcacatgcacgccatcaagcgctgcaagcacttcgagatcggcggcgacaagaaggtcaaggggctatactagtaaaaaaaaggagagcggcaggcggagagcatgaccgagaaatggaggcagcggcgcccgctcaccctgggcggcctgctccccgcccggcgcctcgctttggccgcctctggccactcgtacgcctccttgtccatgcccttgtgcttcctgagct

SEQ ID NO: 4958 - DNA, 203 bp, Chlorella sorokiniana
  Clone ID: LIB3602-061-Q6-K1-F10
gaactgaggcgtgccagctggactgagcgagcgctgagcccttgctggccgcacctgaggcaggcagccattgctgactgccggggggcaccgggccgccacccgctgcccggcagcatgggcgaggcggcgtgagaaagagaggacttgtgcactgccacacagttttttggacacctgtgctgtaacatatacttgaggag

SEQ ID NO: 4959 - DNA, 120 bp, Chlorella sorokiniana
  Clone ID: LIB3602-061-Q6-K1-F11
aaaaaaaaaaaaaaaaaaaaaaaaaaaaaaaaaaaaaaaaaaaaaaaaaaaaaaaaaaaaaaaaaaaaaaaaaaaaaaagaaaaaaaaaaaaaaaaaaaaaaaaaaaaaaaaaaaaaggg

SEQ ID NO: 4960 - DNA, 272 bp, Chlorella sorokiniana
  Clone ID: LIB3602-061-Q6-K1-F12
cccgcacccatcttccacccgccacctttcctgccgctcaccgccgcacatcctacctcccacacctcactccatgtccacccttcacccgcgcttcacacagcggctgctgccatgcaaagctgctgccaaacccatccatcatgctcgcacacccactcacccacacgtccaacgtatccagacccattttcaaggcccgactgtacagtgcctttttgcgtccttatgccgatctggtaccaggacttaatgtgtaacaaatggtatgt

SEQ ID NO: 4961 - DNA, 493 bp, Chlorella sorokiniana
  Clone ID: LIB3602-061-Q6-K1-F2
aattgtgttccgctcagcgcagctggtggcagcagccgatgacccatttgggcgcgtgaaggccttcaacccctcctgggacgcactgggagccctgccgctcatcatcctcggctttgcctgccacaccaacgtcatcagcgtgttcaccgagcttgagcagcagcccgtcattttccgcacgtcaatcaacgctgcaacacccgccacggtgccggcagcatgcgaagcagctgaggtggcaccagcccaccagctgggggcagctgccacgctgcggccggccggcggcagcaacggcagctggcggcggcggcagcccaagaccgccaaattaatcggcatggtgggggttgtggccctctcagtcagcctcaccgctgtgctctactcagcgacaggttttatgggctacctcgcctttccgcacccacagcccgacattctgctcagcttcgatcccgaggacaaactgatgcaggtggctcgtgcc

SEQ ID NO: 4962 - DNA, 492 bp, Chlorella sorokiniana
  Clone ID: LIB3602-061-Q6-K1-F3
cgccaagtgcgccttcgtcgccgtcgacatcttcaccggcaagaagatggaggacctgtccccctcctcgcacaacggggatgtgccccacgtgagccgcaccgactacacgctgctggacgtgggagatgatggcttcgtgtccctcatgactgagggcggcgacaccaaggacgacctgcagctgccctccggtaccgatgaggccgagaagctggcggtgcacatcaaggccgacttcgacgcgggcaacgagctggtggtgtccgtcatgaaggccatgggtgaggagcagatctgcgccgtgaaggttaccggccaggcctaagtgcccggctggcagccccttagcggcgtaggcgctgcagtcttccggacgggggccttgtcctcagcaacagctgctgtgggcgggctgcgctttgcgcacccacagccccacattctgctcagcttccatcccgatgacaaactgatgcaggtggctcgtgc

SEQ ID NO: 4963 - DNA, 437 bp, Chlorella sorokiniana
  Clone ID: LIB3602-061-Q6-K1-F4
ctgccccatccaagccgatttttagttttgtcccgtccccaccgagcatgttttggccgagcggtttcccatctctcctgttcgcttcgagcgttgtgcgaccgccgagcgtcccgccttcgagcgccactgccccaaccttttttgcctttttgccttgggcacacttgcccatcgagagcctgttcattcgcgagcgcttgcccattctagcgttcctgcatcgagcctttctcccttgagcagtccctgcgagcgttactccgcccaagtccctctccctcctcagcaagcatgttttggccgagtgtttgccccccatccaagcctgtttctcctttgagtgttttcccaccgagcgtccctccagcgagtgttgccagtctcaaattcatgcctactaaactacgctggcggacccaaaaaccaaaaaaaca

SEQ ID NO: 4964 - DNA, 417 bp, Chlorella sorokiniana
  unsure (1)..(417): unsure at all n locations; Clone ID: LIB3602-061-Q6-K1-F5
cagcagccaggctgaccacacacagcagcggccctgcatcagctgatgcaggcgccggggcccccgtcatcctctcatgacgacccaacccaacgctgtgcgggcgctccttcacgggattgtccgcacgctttcccaaacccaagacgtttttcccctgcaccctgcatcgtgttgacgcactccctgcatgctcgcgtcgtccccctgttcattgtgaactgagagtttgattgtccctactctcgtttgtcgtccattctttcgtgccgtgccccttgccttgcatgcatgcctggccacacacagnctgcccccacgcacccgcatccacacactgtcaggcacgccccaacccacgagccaccttttgcacagccccccgggtttttttacagcattacacacgtgctacac

SEQ ID NO: 4965 - DNA, 382 bp, Chlorella sorokiniana
  Clone ID: LIB3602-061-Q6-K1-F6
cgtacggctaccccaacctgaagaccgtcaaggagctgatctacaagcgcggctttggcaaggtcaacaagcagcgcatgccgctcaccgacaactcggtgatcgagcaggtgctgggcgacaaggacatcatctgcgtggaggacctggtgcacgagatcttcaccgtgggccccaacttcaagcaggccaacaacttcctgtggcccttcaagctgtcctcccccaagggcggcatcgacaagaagcgcctgcactacatcgagggcggccaggccggcaaccgccaggagtacatcaacaacctggtgcgcgccatgaactgagcgctgagccggcgagcacagcgcagcgcgcgcagcacgcacagcgcggcgcgtgc

SEQ ID NO: 4966 - DNA, 460 bp, Chlorella sorokiniana
  Clone ID: LIB3602-061-Q6-K1-F7
atccaggcgaacatggaggacccggctgagcgggaccgcaagtgggagcagcacctgcggggcgtgcaggcagcggcggccagcgccaaggccaacatggcgcaccccaccaagaactggggcttctggcggcacgagaagcacctggccaagtacgagcagaacgcagaccccgcggttgcgaagctgcctggccggcgggcgcccaacctctcgtcggaatgaggctgtaccctttgaggcgctgctctctggcctgaataggaagtgctagcctggcaacgcgctttctggcaggcccggccccttgttccatcctgcttgcctgctgtttccactcctgctccctggccgccgctgagcggcggcgttctcctgctcccacctgccgctcccagttcctttttgttgtaccatcacactgccctttgacacaagcttgcagggcacctggcactgt

SEQ ID NO: 4967 - DNA, 270 bp, Chlorella sorokiniana
  Clone ID: LIB3602-061-Q6-K1-F8
gcttcttcatccaggccatcgtgaccggcgagggccccatcaagaacctgaacgaccacctggctgacgcctcggctaacaacttctacgccctgtacgccaagaacctggcgtaagcacttgtcgtacgaacgtacgaggcccgcgcgcgattgtgcgccccttgagaagatcacacgaccctgtcgcaccgcactgccgcctgtacgcacccaccatgtgtatgtgctagagcctatgaagttttgtgtaagcccttgatactcctaa

SEQ ID NO: 4968 - DNA, 177 bp, Chlorella sorokiniana
  Clone ID: LIB3602-061-Q6-K1-F9
gcggcttatacatccatgccatccagaccggcgagggccccatcaagaacctgaactaccacctggctgacacctcgcgtaacaacttctacgccctgtacgccactaacctggtgtaagcacttgtcgtactaacgtacgaagcccgcgcgctattgttcaccccttcataagatc

SEQ ID NO: 4969 - DNA, 494 bp, Chlorella sorokiniana
  Clone ID: LIB3602-061-Q6-K1-G1
gcggcatacatggccgctggagccctccgcctcggccaactcgctcggcacctctcccccatcaccgccagcgccaggaggacagcggttcgcgccatggcaacagcggcaaacggcacccacggcattggccggctggcgccgaacgagacggccctgctggtctgtgatgtccaggagcgcttccgccccgtcatctcgggcttccccgctgttgtggacaccagctgccgcatgctgcgcgcggcccaggcgctgcagctgccggtgattgtgacggagcaataccccaaggccctgggcaacaccgtggaggagctgcgggagttcatccctgccggggcacctgttgtggccaagaccaagttctcaatgtgcacggacgaggtgaacgcggccctggacaagctgggtgggggcgtgaagagggtgctcatcgtgggcatcgagacgcacgtgtgcgtgctgcagacgacgctggacctgctggagcg

SEQ ID NO: 4970 - DNA, 456 bp, Chlorella sorokiniana
  Clone ID: LIB3602-061-Q6-K1-G10
atggtgcagcgcctcacctaccgccggcgtcacagctacgccaccaagtccaacaagcagcggatcctgcggacccctggcggcaagctggtgtaccagctggccaagaagaagacctcccaccccacctgccccatctccggccagcggctcaatgggctgcccgcggtgcgccccaacagcctgcaccgcgtgaacaagagcaagaagacggtgcaccgcgcgtacggcggccacctggcggcgggcgtggtcaaggagcgcatcgtgcgcgccttcctggtggaggagcagaagatcgtgaagaaggtgctgaagctgcaggctgccaaggaggctgcgcaggccaaggccgcggcggcaggcagcaagggcaagaagaagtccaagaagtgagcggcgcacgcgagcggacagttgcgccccatgctcccgctgtaatgcaccctcgatgaa

SEQ ID NO: 4971 - DNA, 468 bp, Chlorella sorokiniana
  Clone ID: LIB3602-061-Q6-K1-G11
cgccaaatatcgggtgatggcggcatgtggagatgacgtgcgcctctactcttctccgctcatcaagttctccaaggcatgcacacagctggtgtcgggccgcatctggttcctgacgggtgagcagcgctcagtgctgctgctgctgctgctgccacttcggcaatgtcaatgcatgaagctggtgtcaggccacatgtggttcctcacggtgcgcgtgggctacccctgcttcggcactccccggcgcgtcaacggcaagattgtggggtaccccgcctggggccgctatcgcgtgcacaacctctactgcgccatctatcaggggccggcgcaggccggcgtggcgcagccgtacgatgtggatgagttctaccgcttctgaaaagcaatgaagcgccagccacggcctgcactaagtgggttgatgcattgctggccagtgtgcgggcgtgggcccctgatgct

SEQ ID NO: 4972 - DNA, 465 bp, Chlorella sorokiniana
  unsure (1)..(465): unsure at all n locations; Clone ID: LIB3602-061-Q6-K1-G12
gccttacacactgtctccgcgcggccggccttcggcagccggcggccgtgccagccacgccacacacaccgcacccgttccagcccttcagccagcacccgctcacttgtatccgtttgcatgaatcccttgcccccttcccggccgccctctggccctgagaagagcccgtcatgcctgctccctgccaccgcagttttgttgtttccgagcactggcacccgccccgctcctcgcacacctccaaatacatctgatgcgctcatggctgaagctgatgctgctccggttctttttattcgatcgattctgccatgccccctgcctgtgtaatgaatccacatgtgacacaaacgtacgatgtgaatgagttctaccgcttctgaaaagcaatgaagcgccagccacgggctgcactaaatgggatgatgcattgatatacantgggccggccgttttaaagta

SEQ ID NO: 4973 - DNA, 373 bp, Chlorella sorokiniana
  Clone ID: LIB3602-061-Q6-K1-G2
gggcggccagcagcggcagctggaggctgctcctggcccgttgtacaacaaggagggcctgccagaggtggccctggtggtgcgcaaggcggggctgccgctggccggagactggcagatacgcttcagcagggcggcgggcggcggcgccgccaccagctgagacttgcaggcagctgtgagcacagccgttcggcccgcagctgcggcggcagcagcaacaggatgttgaggcgctgcagtttctttttatctcgtctttcctgctcgctgctaatcaattgattgtgtttgttcgtgcaagtgtgcaaacacaccgccgaaaaaaaaaaaaaaaaaaaaaaaaaaaaaagaagaaaaaaaaaaaaaataa

SEQ ID NO: 4974 - DNA, 303 bp, Chlorella sorokiniana
  Clone ID: LIB3602-061-Q6-K1-G3
gccatcttgaatgcctgtttgccttgtaatgcctcaccctcttttcactgtttgtcacgcgtgctcccccttcaactgcatgccacaacccaatcagcctgctcaactgtttcctgcagccggcccagcaggcctgccaagacggcctgaggccgctcctgctgcggtcgtgctgcagccccgtcgtgcatccaactgcatctcctgcttcctagcctcttcccacagccctccagctctcttttcccaattgccacgggctgagcctgcggcgttttgttcccctgtaactacttttccagc

SEQ ID NO: 4975 - DNA, 273 bp, Chlorella sorokiniana
  Clone ID: LIB3602-061-Q6-K1-G5
gcgacggcatcaagaagccgaagcgccagcgctactccagccgcaagggcatggaccccaagttcctgcgcaaccagcggtgcgccaagaagcaccaggccgccaagaagtgagctcgagcagcaggctgcagccagaggcgcagcggttcttgccagcgcccctctgcctctgatgttcactcccgtgtaatgcttcgttaacaaaaaaaaaaaaaaaaaaaaaaaaaaaaaaaaaaaaaaaaaaaaaaaaaaaaagaagaacgatctaaaa

SEQ ID NO: 4976 - DNA, 478 bp, Chlorella sorokiniana
  Clone ID: LIB3602-061-Q6-K1-G6
tttttatgtgcccctgtacaaccctgtccatacacacaaaccaaccagcctggaaagcaatttgtccactaggggccccctgctttcttgccgccccgctgcaagcccatgcccttgccctgtccccttccctgtgcaacttgccccacgtctcctcccaccctccaccgcccacatctagcgcctctgctgcctctgcccacccgccagacggcgctcgcccgccatccccacccccaccccatcgtgtgtcgtgcagccgcggactcgccgcggcaatccatgcataccatctcatctcattgcgctaccgcatctccttttccctctggcatgttcccggacacaccacagctaatcaagtgtgggagtgcttttggcagccgtcccaactggctgtcctgtcccacttttgtgttctgcgcaccgactgtgtccttgtctgccacaaccagtgcctcgaaccacccctgtaatc

SEQ ID NO: 4977 - DNA, 490 bp, Chlorella sorokiniana
  Clone ID: LIB3602-061-Q6-K1-G7
cgtttgtgcccgtgtggcgcgaggtcagcgcaacccttgcggagctggatgtgctggcgagctttgctgaggtggcggcttctgcgcccatgccctacactcgccccaccgttctgccctccgaagacggagagattgtgctgcgcagcagccgacacccgtgcctggaggtgcaggagggggtggacttcatccccaatgactgcgtgatgaagaagggcagctcctggttcaacatcatcactggccccaacatgggaggaaagtcgaccttcatccgacaagtggggctggcggtgctgatggcgcagatcggcagctttgtgccggctgaacaagcccgcatttccatccgcgacgcgctcttctgccgcgtgggagccggcgactgccagctgcgaggcctctcaaccttcatggccgaaatgctggagacggcggaaattctgaagggagcgacatcctcctcgcttgtgattgtggacgagct

SEQ ID NO: 4978 - DNA, 330 bp, Chlorella sorokiniana
  Clone ID: LIB3602-061-Q6-K1-G8
aaataaaaaaaataataatataatataaacttataacatacaaaaacatataaacaaaaaaaacctttctttaaaaacgcggattataaaaaacataccataaaattattaccatcctttttcccttttttataattttcaattttcctccttctttacccccccccccccttttttaaatccacgtttttctcccccttttttctcaccttttttttttttttttatgccccctaatatacttttctcttccccctttttaaccccttttgaaataaaaaccttttcctttcccccctttttaccgttttcctccccccctttttttcc

SEQ ID NO: 4979 - DNA, 502 bp, Chlorella sorokiniana
  Clone ID: LIB3602-061-Q6-K1-G9
aaaaaaaaaaaaaaaaaaaaaaaaataaaaaaaaaaaaaaaaaaaaaaaaaaaaaaaaaaaaaaaaaaaaaaaaaaaagaggaattatataaaaaaaaaataaaaataaatattatttttttttttatttattttttaaatattatatttttaaattaaaggggcccccctttttttaggtccccatttttttttccctttttttcccccttttttttttttttttttgcccccttttttttttttctttccccttttttttccccctttttttttggaaaccccttgttttcccccttttttttccttttgcaccctttcctttttttcccttttggttttttacaaaagggcccccccctttccccttttcccaaattttcccccccttttttgcattttgcccccccctttttcccgccttttttcccccgggtttttttttttttcccccctttttcccttttctttttccccccccttttccccccttttttttttt

SEQ ID NO: 4980 - DNA, 488 bp, Chlorella sorokiniana
  Clone ID: LIB3602-061-Q6-K1-H10
aaaaaaaaaaaaaaaaaacaaaaaaaaaaaaaataaaaaaaaaaaaaaaaaaaaaaaaaaaaaaaaaaaaaaaacaaagaggacaaataaaaaaaagcaaaaagaacaggggcggcctttttatgggcgccaggcttctgtacgcttccatcgctcgtcttcctttttttatagggccacctaatttcattccccggcccgacttttatcaacgggccgcttggaaaaaccctggtgtcaccaaaataaatggctttgcacaacttccccttttcgcaggatgccgtattttcgaaaaggccgtcacggatcgcctttcccaacggttgccccttctgaatggtaaatgggcccccccctgtagcggccctttcccctcgccgggtgtttttgtcccccgcagagtgacgcttacacttgcgagtgcctttgcgcccgctagttccgattgttccccttctttttttgccacttttgccgtttttccc

SEQ ID NO: 4981 - DNA, 495 bp, Chlorella sorokiniana
  Clone ID: LIB3602-061-Q6-K1-H11
caggtgcagcaggcgcaggcgcagcagatgcatcatgcgcagcaggcccagcaggcgcatgccatgcccagcatgcccttccagggcttccaggcggcgcctcagcaggtggcgcagcagccccaggcgcaggcggtgccgcccccacagccccagcagcaggcagccaaccaggggacgtctgtgcccgagccggttgccatgctgtacctccagcgcatcgccaagaagctaggctacaacattgacaacatcgctctgcagcaccaggcgcagcagcagggcgggcagccgctgtaaagtcccgctgcaggctgcagcgtcggccgctgcagcccaaccatccgacccatctctccgtgcaagttgcaccttgccgcactccctacgttatctccaagctcttttctccgctccaccctgcaaagcctctcccccttgctcgtagctgttgttccacctttgtccattcgccaccctcttcccctgctgatg

SEQ ID NO: 4982 - DNA, 501 bp, Chlorella sorokiniana
  unsure (1)..(501): unsure at all n locations; Clone ID: LIB3602-061-Q6-K1-H12
gacaccacgcgtgcgggagacgtgacggagggcgatcgcctggacgtgctgcgcgaggtggacgaggtgttcatcaacgccatcaaggagtgggggctgtatgacaagatctggcaggcctttgccgtcttcctgcccgtacgctccgtgggcgtgcagggcgaccagcggacgcactcgcacgtggtcgcgctgcgtgcggtgaccagcagcgatggcatgacggcagactggtaccccttccagcccgacttcctgcgctacgtgtccaccaagatctgcaacacagtgcgcagcgtgaaccgggtggtgtatgacgtgacctccaagccccctggaacgattgagtgggagtgaggcggctgcatgctgcgcggcaggcagggacacggngcactgcagcagcagcggcagcagcggcagcagtcctggccattgctgtcactcaaaacccagcccacccgccgagcagtgcggcatctctgcgctcttctgctcacc

SEQ ID NO: 4983 - DNA, 435 bp, Chlorella sorokiniana
  Clone ID: LIB3602-061-Q6-K1-H2
gaagttttcgttcatggccaacagccgcgcacgcagtgtggacgatacggaaggcatggtcaagttcattgctgatggggagaccgacaaaatcctgggcgtgcacattatggggcccaatgcaggcgagctgatcggcgagtgtgtgctggccatggagtatggcgcctccgccgaggacatcgctcggacttgccatggacacccaaccctgtcagaggcagtgaaagaggcagccatggctgcggcttggggcaagccaattcattcttgaacagaacaacgcgaccgcatcacgctggcgccaacgctgacgcgtgccagaggccggcagtgaggcgcgccccgctgccccgctgcctctgattgccatgcaaaaggcggctgatttgatgttggtcgacatgtctccacaatgtgttttggtcgccacct

SEQ ID NO: 4984 - DNA, 493 bp, Chlorella sorokiniana
  unsure (1)..(493): unsure at all n locations; Clone ID: LIB3602-061-Q6-K1-H3
ggaccccgccaccgaggcccatgtgctcgagatcattgagcgcctgttctccgaccgcacctgcttcaccatcgcccatcgcctggacaacgtcatccgctccgaccaggtgatcgtgatggatgcgggcctggtggccgagatcggccccccctccgtgctgctggccaaccccaactccgccttctccaagctggtggacaagacgggcgccgcctccgccgccgcgctgcgcaagatggccgccgacttcctggcagagcgccaggccggtgtgcaggtgggcttccacaagcgcccctcgctggacgaggtgcgccgctccctggacggcggcgctcgccccatggcctcctacctcacccctgcccccggccactaagcggctgcaccccggcgcagcggctggtgagacgcctctcttgctcgagacggcccgccagcccccgccgccggccgncgnccggccctaggcgcgccagctgtcgcgccc

SEQ ID NO: 4985 - DNA, 490 bp, Chlorella sorokiniana
  Clone ID: LIB3602-061-Q6-K1-H4
gtggcgaatgtgttcctgggcaacctgctggtgctgcccacaaccatcgtctggctggagtttatggatggagtcaacctgttccccgccccgggtgccaagccacccagcacctgctgagcagcggcagcacctgctcttgaacggagttggcccgttcaccacggctgccggcgccgctactgccacagacaaggggtgctgctgcgtgcagcgcagcagcatggtctttaagcctacatgtctctttgcctctttgttcgccgaacctgcccgccttcattgtgtcaccaccgttttcacatcacaccactgccgttttcaccccagtcctcgctctgtccatccctctgtgcgtctgccctatcctgcccagcactgcgcttttcacctggtttgccttccctatggcttgctctaacgtatgattagccaacgaatccctggcctgcttggttggcattgatggcaagccgaactcgcagtatgc

SEQ ID NO: 4986 - DNA, 414 bp, Chlorella sorokiniana
  Clone ID: LIB3602-061-Q6-K1-H5
gcgggagccagcaagatggcccctaaggagcagaagtcgaaggaggcgaaggcgcttgccgccgccaactccagcaagggcaagaagaagaaatggtccaagggcaagctgaaggagaaggtgaacaacctggtcctcttcgacaaggccacctatgagaagctgctcactgaggtgcccaagtacaagatgatcactccctcggtgctgtccgaccgcctgcggatcaacggcagcctggcgcgcgccgccatcaaggagctgctgggcaaggggctgattaaggaggtggccaagagccgcgcgcagcagatttacacccgcgcgacggcagccgccagctaagcagccacccagcagtttggcagcatgctagtgcactcgttgtgcttgccaatctggtaacaggtccct

SEQ ID NO: 4987 - DNA, 437 bp, Chlorella sorokiniana
  unsure (1)..(437): unsure at all n locations; Clone ID: LIB3602-061-Q6-K1-H6
gcgggccggagccgcccgccctttttgggcggcgcggcggccctgccttcgtggcagggcggcggggcagcgggcgcaagcccgccgctgcgtctcggcgcttgctgctacccatttttgtagggatgttagtgcacacgccactgagactcgccctatcgccccgctgcccacccccccggccagcggaggaacccatttttaattactcggtgtaaccggatgctcaggccaaaaaaaacaaannaaaataaaaagaaaaaaaaaaacaaaaaacaaaaaaaagaaagaggaaaaaaggagaacacaaaaaaaaaaacaaaccaacaacgaacagacggcaaggaaacaaacacacaaaaaagggggggcctttttaaaggaccaatgtttacttccccgtcttgggaaaggaatagtttttttttggggccccc

SEQ ID NO: 4988 - DNA, 490 bp, Chlorella sorokiniana
  Clone ID: LIB3602-061-Q6-K1-H7
ggcaatgagaagaacagacccttgtaccctgcctcgctgctgcgtttttgctgcaagacatgagcctaaaaaaaaaaaaaaaaaaaaaaaaaaaaaaaaaaaaaaaaaaaaaaaaaaaaaaaaaaaaaaaaaaaaaaaaaaaaaaaaaaaaaaaaaaaaaaaaaaaaaaaaaaaaaaaaaaaaaaaaaaaaaggggggggacgtttaaaaaaatcaaagttaacgaacgcgggggggaaaagaaaaagtttttttataggggaactaaaataaaattaaggggccggggtttaaaaacgtgagaatgggaaaaaccagggggtaacaaaataaaatggcttggaaaaaaatccccttttagcaagtggggaaaataccaaaaaggcccgaacgaatggcctttcaaaaaaatggccaaccttaaaaggaaaagggaaccccccttgaaagggcaaataaagcggggggggggggggggtaacccaaaggg

SEQ ID NO: 4989 - DNA, 123 bp, Chlorella sorokiniana
  Clone ID: LIB3602-061-Q6-K1-H8
caaaacaccctgctgcacacgtccctgccactcgcccggcgattgatcccgggagggttgaaccctccaacccgctgcgcggttttttcccttcaatttttgcagttgtaacatgtggcagcg

SEQ ID NO: 4990 - DNA, 482 bp, Chlorella sorokiniana
  Clone ID: LIB3602-061-Q6-K1-H9
ccgccttctactggagccacgcgggccagcactttgagatccgggacgagggcgagtggtgggcggcggtgcccgaggccgactggccggcgcacgaggcgcagcgcggcgtcatcctggccgactttgacctggatggctcgtacggcgaccggcggcaggaaatcgtgttcatcggcgcctccatggagcgggcggcgattgaagagcagctcgactcggccctgctaacagatgcagagatggactcgtaccgcgccaactacgccaagcagcccgaccccgagcacccagagtacgaggagcggcggcagcagtggcagcagcagcaggcggcggcgtaaggcattggctgttgcagcggtggcaggtggcagcggcgctgtggcgccggcagaccgtgacggccggcccggcctgcggctgtgccaggtagtgcagagtgttgcggcacggctgctgccattggtgttgtcactctt

SEQ ID NO: 4991 - DNA, 357 bp, Chlorella sorokiniana
  Clone ID: LIB3602-057-Q6-K1-A1
gcgggcctcgtcgcccaatactatacatacgattgtgctcacccgatgtgcgtgcaacccaactgccgtttcatttgcccacgcagctgaaaattgtggcggcaccctcggatggctgacgccgcctgccgccaatcgcgccttggcgctccagaaccaaccccggaatccgcccctgaacccttgcaccctgctcttattttgtttgcacaccgctctgttgctcccccccccccctcccccttcccgtaatagtgttgtttatctggttcaaatgtacccgccacgtgtatttcatgccgtcccgctgttctgttttggcggcgcgtaagcgtaacgtgtaagcgatcccactgc

SEQ ID NO: 4992 - DNA, 483 bp, Chlorella sorokiniana
  Clone ID: LIB3602-057-Q6-K1-A10
gcgagataaaaaaaaatataaaaaaaaaaaaaaatataataaaaaaacaataaaaaaaaaaaaaaaaataaaatacacaaacaatataaagaaaaaaatataaaaaaggggacattttacttcttctaacttccccttcccttcctcctctttgcctcttttttttcttctctttcctcattttattcccctgccctcttttttttttcttcttcacctttctttcccttttctttacccaatttattcccctttctcccctttcccctttccctttctccctttttttcccaccttccctccccactttcccttccctttcttttttctttcttatctatatatacctcctcccctttctatcttttccctctcctctctactgtttttttattctccccctctttctgatccccttccctctccctttctcccttaacctctcccccccctttcccctctcctttcttttttttttcccct

SEQ ID NO: 4993 - DNA, 725 bp, Chlorella sorokiniana
  unsure (1)..(725): unsure at all n locations; Clone ID: LIB3602-057-Q6-K1-A11
aacgccgtcatcatctgcgtggccaccggcaccggcattgcgcccttccgcaccttctaccgccgcatgttcatggagaacgtgcccaactacaagttcacaggcctgttctggatgttcatgggtgtggccaactccgacaacaagctgtacgacgaggagatgcagaccatcgccaaggcgtaccccgagcagttccgcctcgactacgcgctgtcccgcgagcagaagaaccgcaacggcggcaagatgtacatccaggacaaggttgaggagtacgccgacgaggtgttcgacctgctgaacaacggcgcccacatctacttctgcggcctgaagggcatgatgcccggcatcttggagatgctcgagcgcgtggccaagagcaagggtctctcttacgaggagtggttcgagaacctgaagcacaagaaccaggtgcacgttgaggtgtactgagcggcttaaaccaaaccctggaaccgccagggctgaaaccctggatagccagggcggccgcccccgtggcacctatcaactcacttgctgacngccgtccgggcggcgcgccgcagcgcaacatgcacaacacagcgtgtgcggcaggcacccggcggcagtatgccccatcatttgcttggttgcgtttaatgcacccctatnttcttcttcaggcccccttcgccccccgcacgcctgagcgctcccattcggaacagcactga

SEQ ID NO: 4994 - DNA, 661 bp, Chlorella sorokiniana
  Clone ID: LIB3602-057-Q6-K1-A12
gcgtgagagcttacaaccggcagcagaggagcttgggggctactttgccgacagctttggcaacgccacacgcattgactatggggcaggacacgagaccacgtttgcagcgctgctctactgcctggccaagctgggggtggtggggcagggggatgcacaggcgctggtcacccgcgtcttccgccgctacctgcagctcatgcgcaagatacagaccacgtactggttggagccggcgggcagccacggggtgtggggcctggacgactaccaattcctgcccttcatctggggctcagcacagctggtggaccaccccttcatcaagccctcctccatcctgtcccacgaggtgctggagtcgtacgccagcgaatacctctacctcggctgcgtgcagtttgtgaagcaggtgaagaaggggccgctgcaggagacgtcgcccatgctggtcgacatctcgggcatacccatgtggagcaaggtgaacagcggcatggtgaagatgtaccaggccgaggtgctggccaagttccccatcatgcagcacttcctgttcggctcgctcatccagtgggcccccgagcggctggcagcgccccacccctctagcgcgggaccggcgcctgcagcagcgcacgcaccaacggaacgcccg

SEQ ID NO: 4995 - DNA, 110 bp, Chlorella sorokiniana
  Clone ID: LIB3602-057-Q6-K1-A2
gcgtgcctcgaataaaaacacgcactagacgcataggggacaacataattggctggcttccttctcggaggacaacataccacggccaaccgttgcgacttggctgttgt

SEQ ID NO: 4996 - DNA, 650 bp, Chlorella sorokiniana
  unsure (1)..(650): unsure at all n locations; Clone ID: LIB3602-057-Q6-K1-A3
gcggtgctgctcaagggcaacgtgggcgagacctacaacattggcacgcagaaggagcgcagcgtggtggacgtggcgcgtgacgggtgcaagctgttcaagcgcgaccccgacagcaccatcaagcacgtcaaggaccggccttcaacgaccgccgctacttcatctgcgacaagaagctgctgcagctgggctggcaggagaagacaagctgggaggaggggctgcgcaagacggtggactggtacctcaaccacgccacccgcgactactggagccacggcgacatggagctcgcgctggaggcgcaccccacgctgcagtgcgcttacatgggcagcaccgcattcgcgctgaaggcgtgagcagcagacagcctcccctctcttctggagggcgtgggcggtgccaccccttaggctccatgccgccgccctgacagctaggcgacagtaggaatgcaggcgcggccgcaccaagcgcggncgccgtttgacgtgccagccttacaacccagttcacccaactccgcagccagaaggccagacagttggactccacccacagccaggtgcacgggaaaagcccggtcccctcagtgtttgcaggcttggttagtcccccacacgttttagtttgacttcccgaca

SEQ ID NO: 4997 - DNA, 473 bp, Chlorella sorokiniana
  Clone ID: LIB3602-057-Q6-K1-A4
agctaaaaaaaaaaaaaatacaccaaaatatataaacctaaaaaaaaaaataaacaaattaactacacataaattacaacccgccgcatcattatataacagacgttccgtacccctttttgccctccttttttttttttagcctttccttcccccaattcttttactctagttcttctattactcccttggccaaatctccttgttcccccttttaaaccacttccccttcaaaccccttttctatcctatactaattccatttatgcattcttcctttttctttccctacctttcaacccctttgctcctgactgtcactcttccccaaccatttcctctcctcattccattttgctctttcctttcacattcacctttaaccccctcacctcgtttgcattctttcttttttcccctttactttccctaccccataaacccactatttttctttttttccctttttttta

SEQ ID NO: 4998 - DNA, 377 bp, Chlorella sorokiniana
  Clone ID: LIB3602-057-Q6-K1-A7
gcggtcctggaactacaaacacgcactagtcggctagggagacactggacttgtctacccaccttctatgcattcatcatatcgcggcctattattgcgcaccggctgttgtcatacgccatacctgggacactcccctaaatccttgcatctatccacccacatagccacccctcatgcaagccaataacaaccacgactgaccaactgcccacccccctgtgcctccgccccgctgccctgcctgctgcgctgcgcactgcttgcccggtgcacgcacgtgcgccctctgtgcaaggcagcaccttttgttgcatattgctgcagtcagcacctggctgtgtatcaaaagcatgactgtaacataccacgctaca

SEQ ID NO: 4999 - DNA, 212 bp, Chlorella sorokiniana
  Clone ID: LIB3602-057-Q6-K1-A8
aaccacttactccacactacacatcacatcatactctccctctccaaaatccatcccaactccatgaacccgcctccttctctaaccttcaatgtcaactccaactacactatgccaactggaattctttaaattcttttacaatactattctcccttcacctatccaattaccttctttgccacaaacatatttatgctaccacataaacc

SEQ ID NO: 5000 - DNA, 567 bp, Chlorella sorokiniana
  unsure (1)..(567): unsure at all n locations; Clone ID: LIB3602-057-Q6-K1-B1
gcggggaaaaaaaaaaaaaaaaaaaaaaaaaaaaaaaaaaaaaaaaaaaaaaaaaaaaaaaaaaaaaaaaaaaaaaaaaaaaaaagngggaaaaaaaaaaaaaaaaaaaaaatggcccccctttaaaaaaaatccaattttactactcttcatatcctaacataattagcttttattttttaaccaccctaaattaattccaataccctccatttaacaaattctaatttggaaaaaccctaccataacccaacttaatccccttaaaaaaaaacccccttacacaacctgctttaatacaaaaaagccccctacaaattaactttccaaaaatttctacaccctaaataacaaaccgaacccccctttaaccccccaataaaaccccccaatttaagttttaactcccaacttaaccattacatttaccaaccccttaaggcccaatcctataaatttattcctttcattttaaaaaatgataaaaaattttcccccccaaatttaactattatagccccctttaaggcttcaaattaaaattttaacgaaaccccctcccccaaa

SEQ ID NO: 5001 - DNA, 489 bp, Chlorella sorokiniana
  unsure (1)..(489): unsure at all n locations; Clone ID: LIB3602-057-Q6-K1-B10
gggcggggagtgatggagccgggcccactacgcggcggcggcggcatgcacgtgggccctggcgatcccatcttcggccctgggcgcatgggcggcggcgtgggcgggccgcctgggcatgcacccggcatgggcggctgcctcccggtgcacgctgggacccgattgctccgcccggcatgcgcggcttccacccagacgactaccagcagccgccggggcgggtgcacccagacatggcgcagccggggcccggccgcggcatcgattttgaccaaatgtttggctgactgctgccggccagcggctgtgtggagcgtataagcgatgcccaaccagccacgcatgtctgtctacccctgtgctgttgctgcatgtgccatagctgtatagcgtatgcctctcctggctcctgctgcattggctcaagcgcggcagcgcatgtaagtcccgctgcccaaggnaaaaaaaaaaggaaagaaaaataaa

SEQ ID NO: 5002 - DNA, 298 bp, Chlorella sorokiniana
  Clone ID: LIB3602-057-Q6-K1-B11
gcggggcgctccatgcagctcacatccccctggcaggctggctgagcacttaggctagacagcagctgcccgttggcctccctggacccggttttgctcccttcttgcttccacaacccgcttgcagcaacgttgctcggcactgctcccagcagttggtggtgctcaacgatggggtcacccggacacccgacctccgctgttgttgtttcattccagcattgcatgcccacgttgtgttgtttccagagccagtcagcctgtggaccaggcccagcctctgtaacccaagcaagct

SEQ ID NO: 5003 - DNA, 237 bp, Chlorella sorokiniana
  unsure (1)..(237): unsure at all n locations; Clone ID: LIB3602-057-Q6-K1-B12
gcgcgcctgttaacacaacagtgcttgcggggcctgctctcacaccttctcagggggcgcccgagtggcctttcatttttgtncgcagacgtgctcagatggacatgtactgtaagcaatgcacagcaaaaaaaaaaaaaaaaaaaaaaaaaaaaaaaaaaaaaaaaaaaaaaaaaaaaggggcggggggtataaaggatccaatttaacttacccgttcttgcaacgaaaaatatt

SEQ ID NO: 5004 - DNA, 486 bp, Chlorella sorokiniana
  unsure (1)..(486): unsure at all n locations; Clone ID: LIB3602-057-Q6-K1-B2
gcggggcacgcacaccaacatcaacactgccctccactcatcgcggcagctgcggcagtgcgaccagagcatgctgctgcagatgttgctgtgctggcggccagcgcacctgcagggagcgtgacctgcaggcaaacccgccccgatcttctgcaggcggctgcatcacagatccttcccaagcccgtggctgcctccaacaagtccagcgcgcccgagccactgggcacgccgccagcatctgatgatcccatggagatgctgctgcaggactacgagcagagcagcacctgatcagcagggaggaggagcaaggtcgcagggtgggcggcaagcggtgtgcggcgccgcggtgctcacatgatgcgtccggtggcgacgtacctggcacgagagacagctaacatctgcagcgaatgcttacttgccttgttgtgtaccaaaagtgttgcgcagcgctgtaaaatgcactgcggaaaanaaaaa

SEQ ID NO: 5005 - DNA, 592 bp, Chlorella sorokiniana
  unsure (1)..(592): unsure at all n locations; Clone ID: LIB3602-057-Q6-K1-B4
ggcgcggcctgctctgcggcccttcatacctttgtacctttctgtatcatcttgcagcaatggcagccggctgcatctttctaacgtggtcaccggcccactcgtttgtgccatgcccacctgcctccaacgtcacccttatcaaccctcacccaacccatccacctgccacccatccactcaccttccctccgccacaacctctgccacccactcaccacccatcacccgctcaacgccctccatgcaccatcctccccatccaccaaatctgccaccccaaacgcacgtccgccgctgcaccacctgccgccccctcacccgcacccatcttccacccgccacctttcctgccgctcaccgccgcacatcctacctcccacacctcactccatgtccacccttcacccgcgcttcacacagcggctgctgccatgcaaagctgctgccaaacccatccatcatgctcgcacacccactcacccacacgtncaacgtatccagacccattttcaaggcccgactgtacagtgcctttttgcgtccttatgccgatctggtaccaggacttaatgtgtaacaaatggtatgt

SEQ ID NO: 5006 - DNA, 610 bp, Chlorella sorokiniana
  Clone ID: LIB3602-057-Q6-K1-B6
ggcggggttggggtagagcactagaagcagctcaagatgccgcccaagttcgaccccaacgacatcatcgaggtgtatgtgcgtgcgaccggtggtgaggtgggcgctgcctcttccctggcacccaagattggccccctgggtctgtctcccaagaagattggtgaggacattgccaaggagacggccaaggagtggaagggcctgcgcgtgacctgcaagctgacggtgcagaaccgccaggccaaggtcaccgtcatcccctccgcggcagccctggtcatcaaggcgctcaaggagccggcgcgcgaccgcaagaaggagaagaacatcaagcacaacggcaacctgacgctggaggatgtgtatgaggtggcgcgcgtgatgcgcgaccgcagctgcgccgccaccttctcgggcaccgtcaaggagatgctgggcacctgcgtgtccgttggctgcactgtggagcacgaggacccccgcgacatccagaccaagattgacgagggcgaaatcgtgtgccccgaggcgtgagcacgcccccggcacacagcagcagcggcctagcagcagcagtgtagctgtcatgtaacacactgctgctgag

SEQ ID NO: 5007 - DNA, 371 bp, Chlorella sorokiniana
  Clone ID: LIB3602-057-Q6-K1-B8
ctgagcaatgtatttacatgtgccatgcctgcatgcaccctatcgccctaggcaggggatggcagctgagggcaaaataaaaggcatttctttaaaaggggtgtgtcgtgtggcgttcaaccctccatggcattattgctcggaatggaacccctcccagggaaccccccggcgtgtgttgggcaaaataacttctaactggcccaatcaaaggcggcagcgagttcaacaaaggctgaatacacttgcatcttactggcggttgctgcggacagccctaccccagcctaaaaggcttaaaaggccaagagctttggcaagtccaactggtttaggcggccaccatttccttgccctcctggcctgcctca

SEQ ID NO: 5008 - DNA, 341 bp, Chlorella sorokiniana
  Clone ID: LIB3602-057-Q6-K1-C10
ggggggcaagtgagcctggccgcttaccggcgggcaccagtcgagcagcggcgatgctcggtgctagccggcctagtgggccaaggctgcctgtaaggcatagtgcaaggcagcatgcaccgccagcatcaatatttgggtgcggcccgactgccaattcccgctgtcccatgccgcccggcaataatccctccactgctcttccacgctgcattgcacctgcgcaatgtgcccttgtgataaccacactttcggcgccggtgcgccggtgtattcctgagcggcatttacacttgaacaaacgagattcgtctgaccctgctgtaaaagactgactggtc

SEQ ID NO: 5009 - DNA, 311 bp, Chlorella sorokiniana
  unsure (1)..(311): unsure at all n locations; Clone ID: LIB3602-057-Q6-K1-C11
ggcggggtgcgtaaaagccggcgcttcaacgctgactctgcccagacgatgcaaggcgcctgagaaaggaaggaggccttccactggagaaaaacaccgcaatgctcgctctgcanttttgcccacggtcctaccctgctcttgccaatgcaacccaacgcacccgaaagtcaacccaatccaatcccaagcttttcatccctcattttgttgccttcattcatggctgacctcccctgtttgaccttttctctgacccagcctggccatgtacccttctccagggctgattcatgtaaacgactgatggg

SEQ ID NO: 5010 - DNA, 593 bp, Chlorella sorokiniana
  unsure (1)..(593): unsure at all n locations; Clone ID: LIB3602-057-Q6-K1-C12
ggcgcggcctgctctgcggcccttcatacctttgtacctttctgtatcatcttgcagcaatggcagccggctgcatctttctagcgtcgtcaccggcccactcgtttgtgccatgcccacctgcctccaacgtcaccctcatcaaccctcacccaacccatccacctgccacccatccactcaccttccctccgccacaacctctgccacccactcaccacccatcacccgctcaacgccctccatgcaccatcctccccatccaccaaatctgccaccccaaacgcacgtccgccgctgcaccacctgccgccccctcacccgcacccatcttccacccgccacctttcctgccgctcaccgccgcacatcctacctcccacacctcactccatgtccacccttcacccgcgcttcacacagcggctgctgccatgcaaagctgctgccaaacccatccatcatgctcgcacacccactcacccacacgtncaacgtatccagacccattttcaaggcccgactgtacagtgcctttttgcgtccttatgccgatctggtaccaggacttaatgtgtaacaaatggtatgtt

SEQ ID NO: 5011 - DNA, 339 bp, Chlorella sorokiniana
  unsure (1)..(339): unsure at all n locations; Clone ID: LIB3602-057-Q6-K1-C2
gcgggagccccgcccgcccgagcagccgccctgcacctgctgccgggcctgcagccgctgcactatcagttggaggcgctgctggccgggcgggggcgcggcagcagcggccggcatgggcagaattcgaggatgctgggctgaagggctgcgtgaatgagaggaccccagaatgtgtgtggtccccttttctgattcattcaaactgccaatcaatgccattcgtttccgactgtccaactacttaccattcagcatgtgattgtaaatctgctgctctgcnnannaaaaaaaaaaaaaaaaaaaaaaaaaaaataaaaaaaaaaaaaaaaaaaanag

SEQ ID NO: 5012 - DNA, 507 bp, Chlorella sorokiniana
  unsure (1)..(507): unsure at all n locations; Clone ID: LIB3602-057-Q6-K1-C3
ggcgcgccggctggtgctgaaagaatcggacgagccgtgggcgcgcttcccgctggctcgccccaagcatggcatgcccgcgcgcgtcgaggtggcggaggcggcgcacgaggagtgactacagtangttcagccaagccgggctgccacatggctgggccacacctccggattgcacacctgccccccattggagggactgggccgccgccgctctttccccttgtccctctggcgctcgtctcgcaagctgcccatcggcgggcaagcagcccggtagctttgattagcatttctgtgagcctccacgccttcagcatctcccgcagtgtttgctttcctcgtcagcgcatttgattggccggccccagactgccgctcatgcccctcggagacgagcagccccctgccggggtgctcaaccggcatagctcagagggcgcgcttcatttgattctcaatagttcctccgtccaccagcaccctgatctgatgtaaattagccgc

SEQ ID NO: 5013 - DNA, 553 bp, Chlorella sorokiniana
  Clone ID: LIB3602-057-Q6-K1-C4
gcggggcgtcttcctcaaggtgaacaaggcgaccatgaacatgctgcagcgggtggagccctacgtggcgtacggctaccccaaggtgaagaccgtcaaggagctgatctacaagcgcggctttggcaaggtcaacaagcagcgcatcccgctcaccgacaactcggtgatcgagcaggtgctgggcgacaaggacatcatctgcgtggaggacctggtgcacgagatcttcaccgtgggccccaacttcaagcaggccaacaacttcctgtggcccttcaagctgtcctcccccaagggcggcatcgacaagaagcgcctgcactacatcgagggcggccaggccggcaaccgccaggagtacatcaacaacctggtgcgcgccatgaactgagcgctgagccggcgagcacagcgcagcgcgcgcagcacgcacagcgcggcgcgtgcagcagcctggacggagcggccccctgatgcctgctagccacggcactgttggccgggccagtcgtgaggccccgagcgcacccgaatgtccaagggagtgcac

SEQ ID NO: 5014 - DNA, 103 bp, Chlorella sorokiniana
  Clone ID: LIB3602-057-Q6-K1-C6
gctaggaaaaaaaaaaaaaaaaaaataaaaaaaaaaaacaaaaaaaaaaaaaaaaaaaaaaataaaaaaaaaaaaaaaaaaaaaacaggtacgccctcccata

SEQ ID NO: 5015 - DNA, 137 bp, Chlorella sorokiniana
  Clone ID: LIB3602-057-Q6-K1-C7
aaaaaaaaaaaaataaaaaaaaaaaaataaaaaaaaaaaaaaaaataaaaaaaaaaaaaaataaaaaaaaaaaaaaactacggggggaaaatattaaaaaaagaaaaaaaacccaaaaaaaaaaaaaaaaaataaaa

SEQ ID NO: 5016 - DNA, 393 bp, Chlorella sorokiniana
  unsure (1)..(393): unsure at all n locations; Clone ID: LIB3602-057-Q6-K1-C8
ggcgggaggccgcctccaacattgtgttcagcaacgggctgctggacccctggagcggtggtggtgtgctgcacaacatctctnaggcgaacgacgtggtggctgtcatcattccggagggtgcacaccatttggatctatgttcagcaacccgctggatccgccctctgtgcgcgaggcacgtgcactggaagagcgctacattgaaaagtgggtggcccaggcgcgggagcgcagccgagccagggcagctttgcacagcagcggcggcggcggcacaggcctgggcggcggagcggcggcggtgcacggcgcactcgttgccgaggagtgagactagccttctcttgaaacatttttcaccatcaagcaggtgtaacacctacaactgtc

SEQ ID NO: 5017 - DNA, 249 bp, Chlorella sorokiniana
  Clone ID: LIB3602-057-Q6-K1-D1
gcaggcagatttcacattcgcaagatgggtgcaacaaactgttcttttttcaaagcaaggtttcagcaggtttttggctacaggaaaggttcaacaaatgcaatgcaatttttacaacggtttttgcaacgcttcatttaggcggttttaggtttgggccccacctttccccgtcgacgctttttgtcgccgacgtttctttttctccgccctctccggacccaacgctttgtacactcaagggtgccc

SEQ ID NO: 5018 - DNA, 397 bp, Chlorella sorokiniana
  Clone ID: LIB3602-057-Q6-K1-D10
gcggggagtgcctacggctggctctgccttaaactgctgtagcatcaggatgaaggtcgtcgccgcttacctgctggctgccctgggcggcaacgccgcgcccgctgaggccgacatcaagaagatcctgtcttctgtcggcattgaggctgaggccgagcgcgtgcagaagctgctggccgagctggagggcaaggacatcaacgaggtgattgccgccggtaccgccaagctggcgtccgtgccctctggtggcgccgcggccgcgtccgctgcgcccgccgccggtggcgccgctgccgccgccgaggagaagaaggaggagaaggttgaggaggaggaggacgaggacatgggcttctccctgttcgactgagcgcacacggcggctccgggc

SEQ ID NO: 5019 - DNA, 507 bp, Chlorella sorokiniana
  unsure (1)..(507): unsure at all n locations; Clone ID: LIB3602-057-Q6-K1-D11
ggcggggctctccatgggcaccatggtggctggctgggacgaggcgggccctgggctgtactatgttgacagcgacggccagcncgccaagggcaagctggtcagcgtaggctctggcagcctgtacgcctacggcgtctggacgagggctaccgctgggacctgagtgtggaggatgccattgagctgggcctgcgctctatctaccacgccaccttccgcgacgcggcctcgggcggcacggtgtcggtgtaccacgtgacccaggacggctggaccaaggtgcggggcgaggacgtgggagagctgcacttccgctactacccccagccagaccagcacccatgcaacctggccgaccccctggccgtctgagcgctgtggcacacacctgcgtagccccttgcactgcgattgccaccccacgccttgggtttgcaaggcagcatggcatgggctgcactctgccctgcactgtgagctgcggttgtaacataacaacacatg

SEQ ID NO: 5020 - DNA, 687 bp, Chlorella sorokiniana
  unsure (1)..(687): unsure at all n locations; Clone ID: LIB3602-057-Q6-K1-D12
ggcgggttctcgcaaattgcgcattctgcgcaatctttaccctgatcgctgggcagcacccaggtttgacttgcccccctgcgctgacctctcccctgcccaagcacaccaccatggctcgccgctgcggccccaccgctgttctgctgcttgccctggccctgggcgcggcctggggcgttgctgcagatgatgacgaccgctgcgccgctggctggcagccggtggaggcgggcgctctcctggacttggccgcagatgtggccacccgggtgtcggagctagccaatgctaccggcgttctgacctgtggcacgcaggcttctgatgtcgtcgactgcccacgggactggcagggccagacccgccaccgcctgtatctcaacgtctcctgcgaggagtctgctcgtgaggtgattgtgaacctggaggtggacgccctgngcgcagctgacggcaccgtgcggngcattgacgtagatatcgagcgcgtcactgttgatggccagcggattggcgacgacctggaggacctgtttggcgatgatgacccgcgggaggacaccatggagacgctggaggaccgcattgaggacctgttcggcgacaatgatgacaatggggacgacattggcgacaataatggcgatgaacaatggcgacgacaacgacgacgacaactgaatc

SEQ ID NO: 5021 - DNA, 585 bp, Chlorella sorokiniana
  unsure (1)..(585): unsure at all n locations; Clone ID: LIB3602-057-Q6-K1-D3
gcgggtgacggcgacggcagcttcatcatgaactgccaggagctggcgaccgcggccgttgagaagctgaacaccaagtgcttgggcctcaacaaccagtacctgggcatggtcatgcagtgggaggaccgcttctacaaggccaaccgcgcgcacacgtacctgggctcgccggagggcgagtaccaggtgtcgggcgatgtgaaggacatcttccccgactttgtcacgatggccgctgcattcaacgtgcccgccaagcgcgtgcggcacccctcggagctgcgggctgcgatccgggagatgctggacacggagggcccctacctgctggacgtcatggtgccccacatccagcacgtgctgcccatgatccccggcggcggctccttcaaggacattatcactaagggcgacggcaccgatgtctactctgtttgagcggccagctagccagcgcacgccagcgcggcggagcgggctttttttgccccatggcagccagccaaacgaacccctgcatcctcacacatcccttgccgcactggcgcagcaggctcattngcctggtgctccgagcccctt

SEQ ID NO: 5022 - DNA, 571 bp, Chlorella sorokiniana
  unsure (1)..(571): unsure at all n locations; Clone ID: LIB3602-057-Q6-K1-D4
gcgagcctgcaagcccgcagcggcctcggaggcaccccccttgctgtttgcggcccttcccgcgccccgcgcttggcgatcaagggagttgcgtgcaaccatggacgtcgatcggccgcgcggaggagcccgcaagcaaagggccgcggctttcgcgagcccatggagctggaggaccgcctgcagggcggccagtttgagtcactgccagcagacaaggccggccccggccccgccaagtctgtggagggctgggtggtgctggtgacgggcgtgcatgaggaggcgcangaggaggatgtgcatgactcgttcgcggagtttggcgacgtgaagaacatctacatgaacctggaccggcgcaccggctttgtcaagggctacgcgctggtggagtacggcagcaagcaggaggcgcangcggcgattgatgagatggacggcaaggagctgctcacgcangttgtgcgcgtgacgtgggcgttcagcagcggcccgatccggccggcgcggcgatgaaccagcctgcaagcagcctgctagcctgcaggcactgcaccgtttttcagac

SEQ ID NO: 5023 - DNA, 568 bp, Chlorella sorokiniana
  unsure (1)..(568): unsure at all n locations; Clone ID: LIB3602-057-Q6-K1-D5
ggcggtatccctcactccccaaccaaacccttaggcctgcgcgccctggtgttttcgggcgaccaagatggagtggtgcccacgcgctccactcggtcctgggtggaaagcctggacctgccgcaagcgggggacttcgcccctgggtcgacgccgcctccaacgaggtgcgtggcagcagcgctctgcgcccatttctgccacattttcccccaacccatcaccacttgtgtgtgtgtcaccaggtggcagatgtgtgcagcagctgtcccaacagactgtgcagcggagggtgcggctcgcattgcagcagggcgtgcatgactcaccggcctgcatatgccacacagctgctgctccgtgtggctnttgcttgctgttatccacatttgtctagtctagtctagtcttacagcttagctccagacccagaggcccaacttcatgatagaatgaaatgttctcaacagctgactgccctccggcccttcccttncacagaccgcgggctacgtcactccgtaccagggcctgacgctggtcagcgtgcatggcgcggggcaccacg

SEQ ID NO: 5024 - DNA, 560 bp, Chlorella sorokiniana
  Clone ID: LIB3602-057-Q6-K1-D6
ggcgcgggcttcctgatgaagaaggagctggactacctggtgggtgctgtgagcaaccccaagaagccgtttgcggccatcgtgggcggctccaaggtgtccaccaagatcggcgtgatcgaggcgctgctgcagcaggcgacaagctggtgctcggcggcggcatgatcttcaccttctacaaggcccaggggctgagcgtgggcgcctcgctggtggaggaggacaagctggccctggccaaggagctgatggagaaggccaaggccaagggcgtggagtttgtgctgcccaccgacgtggtggtggccgacaagtttgccgccgacgccgactgcaaggtcgtgcccgtctccgccatccccgacggctggatgggcctggacgtgggccccgagagcagcgagatgatcaagaaggcgctgtccgactgcaagaccatcctgtggaacgggccgatgggcgtgtttgagtttgagaagtttgcggcgggcaccaactccatctcccacctgctggccgacctcacggtcaaccagggcgccaccaccatcatcggc

SEQ ID NO: 5025 - DNA, 387 bp, Chlorella sorokiniana
  unsure (1)..(387): unsure at all n locations; Clone ID: LIB3602-057-Q6-K1-D7
ggcgggaaactgagcctgccactcancaacgacttgaaggcggcattcgcccaggcgctgcagcgcaccatccctgttgccaaatgtcaagagttggccaacagcctgctggcctgtggcattctgggctggagccctgcaggcccgtcctggcagcagcggcagcggccatgcagcggcttttggcgaacgagccaggcagggccgctcaagcggtcaacaacttcctgtggggcctggccgagctgcaggaacagctggccatcaggctgcaggacgagctgcccgccctgctggcgaccgctgctgattgggcagacagtcgctgggcccagctgtcagctctggatggaatctgcctgttctacaacctggcgggcctggggc

SEQ ID NO: 5026 - DNA, 255 bp, Chlorella sorokiniana
  Clone ID: LIB3602-057-Q6-K1-D8
gcgggcttccctgaatttggtgccctcacttcttgcttgcgtcggatacatacccagtccgcccaaattttcacggtgcgcccgcatgttgaccacacgccctccggactttcgttgcctgcccgctgccctggccggacattttccccttgttaagcccagcagcggaaaaaaaaaaaaaaaaaaaaaaaaaaaaaaaaaaaaaaaaaaaaaaaaaaaaaaagaaaaaaaaaaaaaaaaaaaaaagcatgcaac

SEQ ID NO: 5027 - DNA, 181 bp, Chlorella sorokiniana
  Clone ID: LIB3602-057-Q6-K1-E10
gcgagaaaaaaaaaaaaaaaaaaaaaaaaaaaaaaaaaaaaaaaaaaaaaaaaaaaaaaaaaaaaaaaaaaaaaaaaaaaaaaaaaagaaaaaaaaaaaaaaaaaaaaaaaaaaaaggggccccccctttttagaatccaattttcttcccctttcttcccacattttatttttttttttt

SEQ ID NO: 5028 - DNA, 412 bp, Chlorella sorokiniana
  Clone ID: LIB3602-057-Q6-K1-E11
ggcggggcgggtgcacgggatcaccttcaagaagcggtcgcccagcgccatcaaggagatccagaagtttgcggacaagcaggtggccaccaaggtggtgcgcgtggacgtcaacctgaacaaggcggtgtgcagccagggcatcaacaacgtgctcaaccggctgcgcattgtggtgcacctgaagcgcaacgaggaccacaaggactatgacgagatgttctacctgatgaccctggttgaggacctgaacaccaacaagggcatggttgtgctggaggcttaagcgcctgcctcacgccgtagcaccaaattgacgtcacctcccaccgcagcagccacactatcccgacttctctgcacgctttgctgcaccatgtaacgcgcgctctaacaaacaaactaacaaaaa

SEQ ID NO: 5029 - DNA, 403 bp, Chlorella sorokiniana
  unsure (1)..(403): unsure at all n locations; Clone ID: LIB3602-057-Q6-K1-E12
ggcgggcgcattggcagcgccggtgtggtgcgccgccaggctgtggatgtgtcgccgctgcgccgcgtgaaccaggccatctnggggatcaccaccggcgcgcgcgagagcgcgttccgcaacatcaagaccattgcgagtgcctggcggacgagctgatcaacgcggccaagggcagctccaacagctacgccatcaagaagaaggacgagatcgagcgcgtggccaaggccaaccggtaaacggctgttgcgcacccaccaaaacagcagcccgccacagccggcacccctgggcaggatgccagaccgccagtgcagcagcacggtgtggttcagctgctgttatcgtggcaggctttccaattaggcgcgggtgttaggattgtgtaacacagcgcacc

SEQ ID NO: 5030 - DNA, 639 bp, Chlorella sorokiniana
  Clone ID: LIB3602-057-Q6-K1-E2
gcgagattgtgtcactgggcgccgtgctgggcatcgtcacctcctccatgacgggcctgctgggtcatagccggctgtttgtgtgcctcggccgacagcgcctgctgcccgcccgcctggcggacgtcagcccacgcacaggcacgccggtgcaggccacgctgctgactggctgtatggcagcaaccctggcactgttgctggacatcggcgtgctcgcagaacttgtttcgataggcaccctttatgtgttcatctgtgtgtgctccggcacgctgtacaatcgctaccaccagccgggcagtggctcaagcgccaggccggtgctggcggccctgctggccatgatcctgctggcagcaggcttcagcctgtcgtttacctttgacgccggctggcccgctgtcctggtgttcctgctgctcttcttcctggcggccggctgcctttacctgctgcccgtgcggcatgtgccagagaagttcaaggtgccgctcttccctgcaacaccgtgcctcggcatcctgttcacggttcacttgattggcagcttgggctggctggcctatgtgcgctttggggtgtggatggcgctgggcctggcgctgtatgcgctgtacggcgtgcacggcgcggagc

SEQ ID NO: 5031 - DNA, 612 bp, Chlorella sorokiniana
  Clone ID: LIB3602-057-Q6-K1-E3
gcgggcacgtgcgtgcgcgactacatccatgtcatggacctgggcgagggccacgtggcggctgtcaagaaggtgctggactcggccgagctgcgctgcgtgccgtacaacctgggcacaggcactggcactacggtgctggagatggtgcacgcgtttgaggaggcgtccggcctcaaggtcaacaccaacctcacggggcggcggccgggcgatgccaaggcggtgtgggctgccaccgagtttgcggagaaggagctgggctggcgggccaagctgacggtgaaggagatgtgccgtgaccagtgggcatgggccagccagaacccggcgggctacctgacgggcgccagcgaggaggagctgaagattgccaaagagaagggcctgctctgagcttttttcggtgccttcctggatgccaataccttccctggagggccccgagccgagtcgtgcagctcggcacgcatgttgggcgcatccctgtggccagcagagggcttgcaacgtccctccctgctgtgccgttgacgcacttcctcccctgcactgactgtatctgcagctctattccctgcttgtgttttggtccataatccccttattttg

SEQ ID NO: 5032 - DNA, 641 bp, Chlorella sorokiniana
  unsure (1)..(641): unsure at all n locations; Clone ID: LIB3602-057-Q6-K1-E4
ggcgggtggtacaaccacgagaaggaccagaaaatggaggacattgggcgcgatggcaagtcgtcggtggtggtgggccaggcggggattggcgggccctttgacctgattgaccacaccggcaagcggttcacagacaagacctgctgggccagtttgcgctgctctactttggcttcacctggtgcggcccggccgccgctgcgccggcttggcaccaggatctgggcgtcgtttcgggggccttgggtgctgtagttgatgacttcgccgtgctgcagtggcggcttggttcgagagcaggcaggcttgcccagcccaactgctcaaccgacccagtgctcattgctgtgcaggtgcccagacgtgtgcccagaggagcttgaaaagattgcagcagcaaccgacctcacagagaagctgacggnggtgcaggtggtgcctgtgttcctgtcggtggacccgcagcgagacggcgtggagcaggttcgtgactacgtcaaggagttccatccccgcatgatcggcctgaccggatcgtacgagcaggtgggggcggcggccaaggcctaccgcgtctacttctccaagacgcangacagcgaggacgactacctggtggaccactccatcatcacata

SEQ ID NO: 5033 - DNA, 429 bp, Chlorella sorokiniana
  Clone ID: LIB3602-057-Q6-K1-E5
ggcgggggcacgcatgcactgcgacagagcttcttgcgtctgcctgctgcggccaagtgaggctgccacagcggcggcagcccggggcagcacggcacttctttgaagctgcctaagcttggcatggcgccaagcactaagctcccgcagccagacctgcctaccccagcgcctgagcaagccaccaagctgccgccacacatcgcctttaaacctgggcccccagtcagccacagcccctccctctgtgcgcacttcctgattcatcggcagcccaaccagccccacggttgcggcctgccaccccccaaaccaaatgcactcccctcctgatgctccgcatgctgcctcttgtttgttcgtatatttgattcgttgccacctgccatacctggacactttttcagactcagcccttacgccgtaacc

SEQ ID NO: 5034 - DNA, 672 bp, Chlorella sorokiniana
  unsure (1)..(672): unsure at all n locations; Clone ID: LIB3602-057-Q6-K1-E6
ggcgcgcggcgagcacgcgctgcggcgctaccccacgggcgaggagcgctgcatcgcctgcaagctgtgcgaggcgatctgccccggccaggccatcaccattgagaccgaggagcgcgaggatggcagccgcaagacgacgcgctacgacatcgacatgaccaagtgcatctactgcggcttctgccaggaggcctgccccgtggatgccatcgtggagacgcccaactttgagtactccacaggcacgcgcgaggagctgctgtacgacaagcagaagctgctggccaacggcgaccgctgggaggtggaggtggagaagaacctgcggaacgaggccatgtaccgctgagctgctgcccagagccagcgcttggaagtagtgccgggctggcgccccgctatactagcacagtagccatgtacttgcgtctgccgcgctgcacccacccacccgccgcaacaccgggctgcctgaggcgccaccggcgggcggngcggggtttgcagcttgatactggaatattgcggggccggcagcctggctggcggccccttgggagagcctggggacctggctcattgcagtgcagttgttgtcactccacacacaccagcccgtgagcagctgaagcctttcattntttggtgccgggctttggcttacccccc

SEQ ID NO: 5035 - DNA, 368 bp, Chlorella sorokiniana
  Clone ID: LIB3602-057-Q6-K1-E7
gcgaggttgtttctgtgggaacaaaacattgcatcgcacgttgctggggagcaggacgactaagtgatagaaatccacatcgatgcaggcggcgacacgccgagcggcggcggcgcctgaggcaacaggaggcaacttccgttcagcggctggcacctcctgagctcttttataggctgagctcccatttagctctgcacctctacatactctatgctggaaaggctcggtatgcgctcatgccctgttcagtccttctgatctgtcgcagcctgatgtctgccactgtatatcacgtgtacctacctgtgcaacggttacacatgccgcaggacataaaatggaaaatgagaacccccccttaaaca

SEQ ID NO: 5036 - DNA, 556 bp, Chlorella sorokiniana
  unsure (1)..(556): unsure at all n locations; Clone ID: LIB3602-057-Q6-K1-E8
gcgggggggcccacgctgctgagcggcgtgcagccgcacatggagtgctaccaggaggagatcttcagccccgtgctggtctncctggaggtggacacgcttgacgaagccatcgcgctcatcaatgccaacgncacgcaacggcacagccatcttcacaggcagcggggcggcggcgcgccgcttccagagcgaagtggatgtgggcatggtgggcatcaacattcccatccccgtgccgctgccattcttcagcttcacaggctggcgtggctccttctatggcgacctccagatgtacggcaagatgggagtgcagtttttcacgcgcaccaagacggtcacgcagtcgtggaaggacgccgacagcaaggccatcccaggcctggtcggtgtgggcgcaagcacgcctggcggcaagcactgagcggcctggcttacggcagccggccagcccggcgggagctcttgcgacagccagagttttgtatatctaccgattgttgtatcacaggtccagcccagcagttcaaatggngcagtgttgtaatgcatg

SEQ ID NO: 5037 - DNA, 373 bp, Chlorella sorokiniana
  unsure (1)..(373): unsure at all n locations; Clone ID: LIB3602-057-Q6-K1-E9
gcgagggaaagtctcaccatgggcaagtgcggcaagggcacgggcagctttggcctgcgccacaccaagacgcacacgctgtgcggccgctgcggccgccggtccttccacatccagaagagcacctgcggctcgtgcggctaccccgcggccaagatccggaagtacaactggagcgtgaaggccatcggccgcaagaccaccggcaccggccgcatgcgccacctgaagaacgtgcagcgccgcttccgcaacggcttccgcgagggctctgctgccaagaagatcgctgcctaaacagctggtgtctgcagctacgcggcagcacgttgagccagctgtgtagcaggatgtaacaccgcgacccacanaa

SEQ ID NO: 5038 - DNA, 601 bp, Chlorella sorokiniana
  unsure (1)..(601): unsure at all n locations; Clone ID: LIB3602-057-Q6-K1-F1
gcggggcgacgcacgccgcaacgatgtcgccagccgacaagcagccagagcagcagcaggacgcggcggcagcgcctggagcggggctgcatcgagcgagcagcaagcgcgaagcgcccgtggacggcgcagaggtgcagggagggagcaggctctccgcagagatcgtccgccgtccttcaaggtgatgggccgcatggtgatggccatgaagcgcttctccaacagcctgaaccccacctacacgtacggcaagcggcccgcgtcttcgactggcagcggtcgggtgtcggcgcaagagggcgaggggcaggggcccgtcaccagccggcccaccagcccagaggagaaagacaagtacgcgttccccgaccacggccaccgcatggcctacctgctgaagccgctgccgcccacagaggatgaggaggcgtancangcacagcacgctaggcaaagcgtgccaaatcatggccctgcctgacgccccaacggtagctggggtgcgggcggagctgccacgtaatacgaacccatcgncggccacggcttgcatccccgttgtagcatgcctcagcacgtgtatccctttctggaaagc

SEQ ID NO: 5039 - DNA, 388 bp, Chlorella sorokiniana
  Clone ID: LIB3602-057-Q6-K1-F10
ggcgggctcactgccatgccactcgagtcctgcgcgtgccggccgtcccctgggccctgccgcaaggggccttcagacgagggctggcgtcagcgcactgtcttttgttgttttgcctcctgctgcccaaccgcaacaccccctgcctgctggtatagccgaactttccaccccggcttactacgcaataaccagcgcccttttccctgccgaacggatgccactacctgcccctccgctccaccaacaacaccacacatcatgcttgctcacccggccccgcgcaagcgggactgcgccgtccctcaaacttccccctgccaatactttacccttttccggatgccgagacgatcacaacgcaacaatgtgtgaacagagctgatct

SEQ ID NO: 5040 - DNA, 319 bp, Chlorella sorokiniana
  Clone ID: LIB3602-057-Q6-K1-F11
ggcggggacgcgtgggcggacgcgtgggcgaagaccgagaagaagggcagcaagtaccgcgtgatctggggcaaggtgacccggggccacggcagcgtcggcaccatccgggccaagttccagaagaacctgccccctgcggccatcggcagcaagatccgcgtgatgctgtacccctcccgcgtgtgagggtcggttgcttcccggagcagcagcggtgcggcacggcgcggcggtgacgagtcgtggcagtgcgaccccgctcggcacggccgcccgggtggcgccgccgtcgcctccatgtaacccttgattagcc

SEQ ID NO: 5041 - DNA, 401 bp, Chlorella sorokiniana
  unsure (1)..(401): unsure at all n locations; Clone ID: LIB3602-057-Q6-K1-F12
gggcccgctgcagaacctgaccgaccacctgtcggccccctcctccaacaactggaccaccaacattggccactgcatgntgcccacctctgtggacgtccagggcctgaccatccccctgagctgcctgtggcccggccagcagatggtgtaaggcggcggcagcagcagcaggggcggcagtgtgcacccacctgcaccgccgccccagccccggccccgcgtgtaactggttaccctccttcgtcccatttccttgctccgcccgccgccgcggcgtgctagcgcacccgcccgggcacctctcccgttgcacctgagaagaaaacaaccactcacatcgctcacctgtatggcagaccgtgcgtctgcggctgcgcctcggttaacttgcattcaac

SEQ ID NO: 5042 - DNA, 556 bp, Chlorella sorokiniana
  Clone ID: LIB3602-057-Q6-K1-F2
ggcgcggacgcgtgggcaaggcccgcggcctgaacgtgggctcctccctggtggaggaggacaagctggccctggccaaggagcggggggagaaggccaaggccaagggcgtggagtttgtgctgcccaccgacgtggtgctggccgacaagttcgcccctgacgccaacacccaggtggtggaggcgaccgccatccccgacggctggatgggcctggacatcggccccaagtcgatcgacctgctgaaggacaccctgaagggcgccaagaccgtgatctggaacggccccatgggcgtgttcgagtttgatgccttctccaagggcacctttgccattgccgacgagctggccaccatgaaggactgcatcaccatcatcggcggcggcgactctgtggcggctgttgagaaggcgggcgtggctgacaagatgagccacatctccaccggcggcggcgcgtccctggagctgctggagggcaaggtgctgcccggtgtggctgccctcaacgaggcctgagcggccctgccctaggcggccctcaacgctgc

SEQ ID NO: 5043 - DNA, 653 bp, Chlorella sorokiniana
  Clone ID: LIB3602-057-Q6-K1-F3
gcgataaaactatggtggagaacaaccttagcatgtggactgtaaaaaagcagtttgcgctaagcactgcgatgtcagcggtggcgtgtcacacgctgctcctcaccgggcgctcgccaagcaagctgcttgtgtctcgggtatgggaaccatcacgcacgccgacctcatctccacctacgattcgcgtttccagctggagcgcggccaagagacggtgccattccgcctcacccgcaacatgcagtccttcattggcccacagggcatggaaggcatggtggtttgcgccatcactgcagcagcgcaggcgctgcaggcagagcctgccatcacttcatctatcgttgccctgttcttcagggatgacattctgtcctgggcagctcggcgcagtggagcgcgctgcatcgcggcactgaacgccagcctgaagacctcccagctggagacgtgcgtggcctggaacaccgcaacctgcctgaaccgtgtgggcaccatggcacctgcacgcaacggccatccgcagcagggcacccgggctcttgtggcagaagcagtagcgcctgccaatctgtgtcgcatgtgccctacgtggtttgcctggctgtaacacgggcacctgcccgttgctgccctgcatgtaacacaca

SEQ ID NO: 5044 - DNA, 602 bp, Chlorella sorokiniana
  Clone ID: LIB3602-057-Q6-K1-F4
gcgagcagaagaagggctacaagctgccgcgccacatcatggccaacggcgacctggcccgcctcatcaactctgatgagatccaggcggtggtcaagccgcagaagaccggcaccgcccgcgccgcgctgaagaagacccgctgcgcaacctgggcgcgctgctcaagctcaacccctacgccaaggtggcgcgccgcgccgagctgctggccgcgcagaagggcgccaagtcggccaaggtggaggcggcccgcaaggccaaggccgccgcgcgccccgcggtgaagaaggtgtccaaggccttctacagcaccatgatcaccgactcggactacgtgggcgaggactacgaggtgttcagcagctggctgggcaccacccagtgagcgccccggccggagtagctccccagaggaggcgagcgcggcgcggcggcgccgcccgccgcgggcggcggagggtcaccggcccgcggcggcggccgctgcgcgcgcgccgccccgagcgttgacagagaggcccgcccagttgagggcgcacagaagtacacgcacccgtgtaacacgcacacacgcataaaaaaaaaaaaaaagggcgggc

SEQ ID NO: 5045 - DNA, 523 bp, Chlorella sorokiniana
  Clone ID: LIB3602-057-Q6-K1-F5
gcgcggacgcgtgggagcagcgcggcttccagctgtatcagtccgaccccagcggcaactacggcgggtggaaggccaccgccagcggcgccaaccaccaagcagccaccaacgtgctgcagggcgactacaaggacacctgtcgctggaggaggccatcaagctggtggtcaaggtgctgagcaagacgatggacagcaccacgctgagccccgacaaggtggagctggccacgctcagccgcgacgaggacgctgggcaggtggtgtacaagatgtacgagccctcggagctcaagccggtgctggaggcggtgaacgaggagatgaccaaggagaaggagaaggaaaagaagtagaaaggatcaagcaggaaaggcatctgagtttgttaagcctgcgcggccttgtgaaatgtcaactcacgggggcgcacttcatgtttggaagggtgggcgccggcggccctgtttgattttgcgccctgtggctgcacggccgcacaactgtaactgaaaaacctg

SEQ ID NO: 5046 - DNA, 539 bp, Chlorella sorokiniana
  unsure (1)..(539): unsure at all n locations; Clone ID: LIB3602-057-Q6-K1-F6
ccgccgattccgtcgcccacctgcgcgggctagaagccggcgtggcggggcaagccaacttcgagctaacggcgtgaccacgtgtttgtggcgcgcgtgagctctgaggagttcacctccgcctgcacgagcggcggccatgaagcggtggaggggctggacctggccgccctcaacttcaccaccctgctggtggacccgccgcgtgcggngctggacgaccagacggtgcagctgctgcacgagtttgaccgagtcgtctacatctcctgcaacccggacacgctgcacgccaacctgctggaggtgaaggacctgttcgaagtcaagcgctttgcgctgtttgaccagttcccgtacacgcaccacgtggagtgcggcgtgtacctgcagcggcggccgcaagcagaagggcagcagcagcagcagcagccagcgacggcggcaggcagcggcgagcagccagnggaggatggcagccgcggcgagaaacggaagcggaggacgagccngcggcatgaaacatctgaattatggga

SEQ ID NO: 5047 - DNA, 472 bp, Chlorella sorokiniana
  Clone ID: LIB3602-057-Q6-K1-F7
gcggggcgagaacccctatgtcaagctgctggtgaagctgtaccgcttcctggtgcgccgcaccgagagcgacttcaacaaggtggggctcaagcggctgttcatgtccaagaccaaccgcccgcccctctcgctgtcaagctcgccaagttcatggccggcaaggacggcaagattgcggtgctggtcggcaccatcaccgacgacgtgcggctgtttgaggtgcccaagctgcgcgtgtgcgcgctgcgcgtcaccgagaccgctcgcgcccgcatcctcaaggctggcggcgagatcatgaccttcgatcagctggcgctggtggcgcccaccggcagcaactgcgtgctgctgcgcggccccaagaacagccgcgaggccgtcaagcacttcggccccgcacccggtgtgcccggctcccacgccaagccgtacgtgcgcagcaagggccgcaagtttgagcgcgccc

SEQ ID NO: 5048 - DNA, 524 bp, Chlorella sorokiniana
  Clone ID: LIB3602-057-Q6-K1-F8
ggcgagggcggccaacaagtacatggtgaagaacgcgggcaaggacgccttccacctgcgcgtccgtgtgcaccccttccacgtggggcgcatcaacaagatgctttcgtgcgccggcgcagacaggctgcagacaggcatgcgcggtgcgttcggcaagccatttggtgtgtgcgcgcgcgtgggcatcggtcagatcctgctgtccatccgctgcaaggacacgcacgctgcggtggcggaggaggccctccgtcgtgccaagttcaagttccccgggcgccagaagatcgtggctagcaggaactggggcttcactccctacctgcgcgacgattacttggagtggaagcgtgagggccgccttgtgaacgacggtgtgaatgccaagctgcttggcaaccacggcccgctggacgcacgggagcccggccagattttcgagggtcctgcccgtctgtggcgtgtgccggtgcatgcctaacatgttgcttgggttctaaagatgtaacgaacatctgagc

SEQ ID NO: 5049 - DNA, 428 bp, Chlorella sorokiniana
  unsure (1)..(428): unsure at all n locations; Clone ID: LIB3602-057-Q6-K1-F9
ggcggggggcgcgagtgcaggcgcaggtgccgcggccactcctggagaggatgcagcgatggcagacctggaggtggatgacccaganctcgctctggcgctgcaaatgtcactggccgaggcgcagcagccccccaaggaagaggacaagaaggagtgagcagctgccacctggaagcgtctgcaaatataccaggcagcagcagcgcggcatgtctggttgcaggctgtgtcccagactgtgagccgggcaccggaaccatctgtaccactcttgtcacacttgtaacatcatgattaanaaaaaaaaaaaaaaaaaaaaaaaaaaaaaaaaaaaaaaaaaaaaaaaaaaaaagaaaataaaaaaagaaaaaaaaaaaagaaagaaaaaaaattaaataaaaaaaaagggggggggccgttttaaa

SEQ ID NO: 5050 - DNA, 415 bp, Chlorella sorokiniana
  unsure (1)..(415): unsure at all n locations; Clone ID: LIB3602-057-Q6-K1-G1
gcgggagaaggctcaggagagcatcaactcccgcctggcgctggtgatgaagtcgggcaagtacacgctgggctacaagaccacggtcaagacgctgcgctccggcaaggccaagctggtgatcatctccaacaactgcccgccgtgcgcaagtcggagatcgagtactacgccatgctgtccaagaccggcgtgcaccactacaccggcaacaacgtggacctgggtaccgcgtgcggcaagctgcaccgcgtgtccgtgctgaccgtcaccgaccccggagactctgacattgtgtccggcatgtaagcggcgcagcatggcatgcgtacccgggcgctgtctgagctgggactgcccctgtataagaaacagagganaaaaaaaaaaataaaaaaagaaaggaaggggagag

SEQ ID NO: 5051 - DNA, 242 bp, Chlorella sorokiniana
  Clone ID: LIB3602-057-Q6-K1-G10
ggcgatgcccggcagcggcgccgcccctatgcagaggcatgggggcggcgggcagctggccccggttctctcggctggctggggggcccgcctaggcgacagttgacacgaccgttaccctattcttttcgccccacgtacactctgcgtttcggtgattccccttgatacgagtgctgcttgtcgccgcggtgggcatgcctgccacccggtttgcgcaactgtaacgataccgcagttgc

SEQ ID NO: 5052 - DNA, 234 bp, Chlorella sorokiniana
  unsure (1)..(234): unsure at all n locations; Clone ID: LIB3602-057-Q6-K1-G12
agaaaaaaaaaaaaaaaaaaaaaaaaaaaaaaaaaaaaaaaaaaaaaaaaaaaaaaaaaaacaacaaaaaaacaaaaaaaaagngggaaaaaaaaaaaaaaagaggaaaaaggccccaaaacaacagcccccaaacgccccccgcgcacagcccccaacgaccaacccacccaccccgcagccacccngccccccgcccgcccaaaagcccccccccacccacacacccccccc

SEQ ID NO: 5053 - DNA, 420 bp, Chlorella sorokiniana
  Clone ID: LIB3602-057-Q6-K1-G2
aaaaaaaaaaaaaaaaaaaaaaaaaaaaaaaaaaaaaaaaaaaaaaaaaaaaaaaaaaaaaaaaaaaaaaaaaaaaaaaaaaaaagaaaaaaaaaaaaaaaaaaaaaaaaaaaaaaaaaaaaaaaaaggggccccccctttaaagattcaaattttacttccccttttttccaacttaattcttttttttttttcccccttaaattaatttaattgccccccttttaaaaacttttgacttgaaaaacccttgcttttcccaaatttattccctttgaaaaaaatccctttttccccatttgtgttaataccaaaaagcccctacctatttccctttccaaaaatttgcccaccttaattgcaaattggacccccccttttaccgcccttttaaccccgcggtttgtgttgttttccccc

SEQ ID NO: 5054 - DNA, 359 bp, Chlorella sorokiniana
  Clone ID: LIB3602-057-Q6-K1-G3
gcgggcggccggcagctatgtcgatctgtacaacaaggttctgtccatctgagagacagggcagctgcctgcccatcttgagggaggaaactggagctggaagtggcgaagttgagcgcgcctgagaaggccagtccatggctgctgccatcccgcacatgttgtctgcttagtgcacagttgtccctggccagctgcttgctcttccctgtcgcctggcaagctagccgcctgagctcttgcttcaacgctttgtgctgcctgctcctgcttcccttcgctgctgcactgcctgatttgatgccgaacattcatgatgcgagcaaatattgcgctcccgatatgcaagccaacccatg

SEQ ID NO: 5055 - DNA, 379 bp, Chlorella sorokiniana
  unsure (1)..(379): unsure at all n locations; Clone ID: LIB3602-057-Q6-K1-G4
gcgtgacacccacctgctgccactgctggagccgtaccaaaagcacaagctgtggcggctagacttttcagacgtgggcagccgggggcacgcttttgcggggtgggagtgcgcggagcctgccaaaaagtttgaccagcgcctcagccgagcggtcaagccgtggccggcaccaaacggcagcggcctgcagcagctgggcatgacggctgggcggacgtattcagccataccgcgcttgaaggactgcccgccaggcaccaatgcagcagcaggcggcggcgcggcagcgacaggagggcaagcggtggcggccagaagattttgacctctagcagcagcatggaatcaaccagcagtgtaaacaagccaccccana

SEQ ID NO: 5056 - DNA, 375 bp, Chlorella sorokiniana
  unsure (1)..(375): unsure at all n locations; Clone ID: LIB3602-057-Q6-K1-G5
gcgggggcagcatgtggagtggggcaatgaggagtcctgnncttccgcgggctttggcgccaggcaccctggctgnnagctgtaccgtctgcagcgccagtattgccgatgcggcagcaaaggcagaggcaggggcggcaggtggcggcccagcggagagcagcaggcagcggcgcacgaggaagcgcagcagcggcggcggcagcgggagtggactgtgcaacacgtgctgctgcctgcactgcggctgttcttggcgccttcccgccagcgcgcctcggacggttcagtggtggagctgactcgcctggaaactctgtaccgcatctttgagcgctgctgaggggcgtggtctctgttataatggcccacgtg

SEQ ID NO: 5057 - DNA, 657 bp, Chlorella sorokiniana
  Clone ID: LIB3602-057-Q6-K1-G6
gcgcggagccgctggcatcgacgcaacagagccttcaagatgggctctctggtgggcagcgacaacttcacgcacattctgcgtgtgctgaacaccaacgtcgatggcaagcagaagatcatgtatgcgctgaccgcctcaagggtatcggccgccgcttctccaacatctgctgcaagaaggctgaggtggacctgagcaagcgcgccggcgagctgtctgccgaggagctggagagcatcatgaccatcgtggccaacccccgcgcctacaagatccccgactggttcctgaacaggcagaaggacgtcaaggacggccgctactcgcaggtgacctcctccgcgctggacaccaagctgcgcgatgacctggagcgcctgaagaagatccggaaccaccgcggtctgcgccactactggggcctcaccgtgcgcggccagcacaccaagaccactggccgccgcggcaagaccgtgggcgtggctggcaagaagaagtaagcagcttcttgcgggcgcggcctgcggcacgggcggatgctggcggctgggtgacggcggctggcgccgcccgcgcagcaaccccactggcagagccggcggcagcaggtggatccacaccagtcgttgcagtgctgccgtcctgtaatgcacc

SEQ ID NO: 5058 - DNA, 467 bp, Chlorella sorokiniana
  unsure (1)..(467): unsure at all n locations; Clone ID: LIB3602-057-Q6-K1-G7
gcggttgaagagcctacctaagcaggctctgtggttaaagcacccttgctctcaacaagaaagcagcttcccacgtggaacagcgggtaaccccgccgtcaagatgcctttcgagaccgtgtggaaccagcaccccaggagtatggcaagggctcccgccgctgccgcgtgtgctccaaccagggcggcctgatccgcaagtacggcatgaacatctgccgtcagtgcttccgcgagtacgccaacgccattggcttcgtcaagtaccggtaaacggctgagcggcatcggtgtggccagtgccgcccaccgcaatcatgtcggctttcgaggcgacgcagcggcgggcggcactgcctgccggcactttcctgcctgcaaccttgattgtgtaacagccttggttgccaaaaaaaaaaaaaaaaaataaaataaanaaaaaaattatttatataatataaataata

SEQ ID NO: 5059 - DNA, 626 bp, Chlorella sorokiniana
  unsure (1)..(626): unsure at all n locations; Clone ID: LIB3602-057-Q6-K1-G8
ggcatcacggtgaccggtgcgcagccagatttttgttaaagccagccagccagacagacagacagacttttttcagcttntggtgggccgagcttgtctccatcatgacgccaccgtactgtgctccctgcttcgtaacttctgccctccctcctgccaaccccgcagtgtacaaccgcacggctggcgatgccggcctgcctaaccagcacgaccgcaccagcgtgattggcctgtcgtgggcatgctttgtcggcatgctgctcatcttcggagtggcctcccacctgtaccgggcgaaatgggagcccgaggagatggggcggggaccaatggacgagtatggtgcatatgctgagttcaaagcgcgggcagagggcgcccgtgtggatgggggcaatgtgtaaggatgggcctggcgctggagactntgattatcacccaagtccgcgactattgcatgccaccagcggcgaggggcatgccttttgccacctgctctccgtctcgagcgctgctgccctaacggagctgccaaattataggtttctttgtcattcgcgtaatttcctgttggttatcttgccaagactttgattgccttcttttgacctncacttatgttc

SEQ ID NO: 5060 - DNA, 514 bp, Chlorella sorokiniana
  Clone ID: LIB3602-057-Q6-K1-H1
gcggacgattgcaccgcccgcctggtggatgcggcggggcaggaggtggatgcactcaacactgacggctcggcggcggtggcgggggaggtgctgagcgccgacggcgacctgcaccagcgcatcaagcgcaaccactgcaccttttcagtctaccacacacaaggtggcccagagaagagcaagagcgagcaaccggcggaatgcgacagcgcggacgccacacagcggggggcgcacagggtgacctgtgacacctgctcactttgggctcgcggagcatcactgttgcgtgtgaccccggccccaccagcagatgtgttgcgtgcatgaccgaccgcactgcttgcagttgtgctatatgctgcgctgctgtgatttcctcattcgctaccaccacaatacctgatcctttatgcaccccctcctaatttttgtgccatcacatgcgatgctcttacgttgccgacacgctatgacactatgtctgatgacacaatcctgggtgatgttg

SEQ ID NO: 5061 - DNA, 402 bp, Chlorella sorokiniana
  unsure (1)..(402): unsure at all n locations; Clone ID: LIB3602-057-Q6-K1-H10
gcagaccaggccggccggtgaggcggctgcggcttgtagctgcagcttggcggctttaggctcctccatgctggcttcagggggttcggctacagcaatggctgcagcataattggcctccactagcgggtggagatgcttctggcttagacatgcgaaacttgtggcgctcgatggctctgttgcctaccgcccaagcttgtggctgaagccacttcaacggcttagagcctgccaagctgccggagattacctcatcacagccgactgccaagcctcactgaaggttctttagcccaaaccggcccttgcactgccttcttccttgctcccttgtcctgctgctgactctctgcccaccactataactccacaccatgtaaccaatcgaccagcnnanaa

SEQ ID NO: 5062 - DNA, 645 bp, Chlorella sorokiniana
  Clone ID: LIB3602-057-Q6-K1-H11
gcgaggacgcgtgggcggacgcgtgggctacgccggcaacaacaccttctgggcgcccaacgagaccctgattgccatctccttgctgctgttcaactgggctgagctgaaccgcatgcaggactacatcaagcccgcagcaacgtgaccgaccccttcggcaacaagatcaagtacgtggagctcggctaccccggctttgaccccctgtcgttctccaagaacaactttgatgagtggaagctgaaggagatcaagaacgctcgcctggccatgcttgccttcctgggcattgtggcgcagcacaacgcgcagccgggcagccccctggagcagctgggtgctcacctggccaacccctggaagaaccacttcatcaacaacggcgtgtccctgcccttcatcaacgacaccgtgcacaatattttgggcggcagcgcatgatgccttgtaatgcagcttccagcgccgatgagctgtgcgtgagcgcagcttgagagaaccgagcaggcgggcacgctgggggccctcccccctgcaagcctgcctgccgcgttgtaccggcgtgccccgcgccagccacgtcaccaccctcctcctcatcccctctatccgcccgccgctgatgggtgcacggagccccgg

SEQ ID NO: 5063 - DNA, 152 bp, Chlorella sorokiniana
  Clone ID: LIB3602-057-Q6-K1-H2
gcgattttctttccctgattcagtctttgcggattttatttgccaaagcggctcctgccccgcccgcgcgcctttctctgtatcgtcaattcgagaagaactgctttcgtttctcggcgtgcttcttttttgaccggtgcatgcaacacttc

SEQ ID NO: 5064 - DNA, 398 bp, Chlorella sorokiniana
  unsure (1)..(398): unsure at all n locations; Clone ID: LIB3602-057-Q6-K1-H3
gcgcgtgcggcagggtacagcgacgccgacttcagcgccgtcatggatgcagtggcctcccgcaagtagagtggcactgcaggcggcttcgcggtggcagcgctgcagcaccaatccagaacagccttgagcctctgagctgggacctgaccgttgaccatcgaactttacatttgagcatttcatgtggtaacgatacaacttttaaaaaaaaaaaaaaaaaaaaaaaaaaaaaaaaaaaaaaaaaagacagaaaatataaaagaatcaaagctaaagtncgcgggcatgaaacatcaaagctagaagcttagtgacacataaataaaattcgggggggccccttttaaaaaatcaaagtttatttacgcgcctgtgcaaattaaaatttttttttt

SEQ ID NO: 5065 - DNA, 225 bp, Chlorella sorokiniana
  unsure (1)..(225): unsure at all n locations; Clone ID: LIB3602-057-Q6-K1-H4
gcggcggcgcgaggcgctcacgcacaagctggacatgctgagccgcgcgcaggcggagctgaccagcgtggatgtgtgaggggcgggacaggccggcgggggcgatgccgctccctgtggcgtcgcccagcccgccgcgcggcgtgccctagcagctccttctctccctccctgtgcctgacctgtactgcgatatgctcactgtaactctggctgtacgacana

SEQ ID NO: 5066 - DNA, 369 bp, Chlorella sorokiniana
  Clone ID: LIB3602-057-Q6-K1-H5
gcggcagcacaagcgcacgcagggctcctcgctgcggggcgggcccaagccaatgatgatgcagcgcatcgtggtggtcaaccgcgcggcggcccaggacgacaagccggagcgcctgcacgactccttctccgccgtcgactacagcgccagccgctgagcggcagtggggcgcagttgtgcgcccgcagacgactgttgatggcccgagccagctggccggcggtgggcagaggcccgcaggcattgccctcgaagttgccagcccggcggcacaattttggctgcatcgctgtattgctagtgttcacatgcacgtatgttgtatgtccttggcgctgctgcgccccatgtagatcgtttgcatgc

SEQ ID NO: 5067 - DNA, 325 bp, Chlorella sorokiniana
  unsure (1)..(325): unsure at all n locations; Clone ID: LIB3602-057-Q6-K1-H6
agccgccccgtccaaacggtgtcccctccctgccacaccgagctgtgcacttgcctcccttttccaaagacccatgcacctggcccccattgcccgacccctgcctgaaagcctgccctgtacattgcatgggtcatggcgcagcangccggcgcatgtgcgcccctgcctatgtgtttattttttcaaacccaagccgaggcccagccccttgagctgcggaccccacactccattgttgctgcctgcacttaaacgtccgattctttgcgtagcgtgctctccatgccaagctgaaacctgacctgtaaccagttgctgtgtt

SEQ ID NO: 5068 - DNA, 454 bp, Chlorella sorokiniana
  Clone ID: LIB3602-057-Q6-K1-H7
gcgagtttgtgctgcgctccgtgggaggcaagtcacacgcgcgctaagccaaggcgggtgtcgggagtgcagcacacgtacaaggaagctgggagtgcggcacacatgtcaggcagctgtggagtgccgctccaaccgctggcaacagcagacagccctggcggctaagccatgcggccggcagcagctgctgcgggcactgctacaaaccatgcgctgcaaaatgcgctcaggcccccaaaagcagcagcagaaggtttccaagcagctgcatgccatgcgatagccccacccagtacagttcacttttatcgtcgatagtctcaagctttgctctccaccgtcccagtttgtttgcccttctctgctccgtctggttgccagcgctgcaccactcctgctgcgtgctctgccctgctctttgccaatcccctgtagagaacctgctgtgccc

SEQ ID NO: 5069 - DNA, 635 bp, Chlorella sorokiniana
  unsure (1)..(635): unsure at all n locations; Clone ID: LIB3602-057-Q6-K1-H9
ggcgcgctggaggaggaggggtacaccaacattgtgggcctgcagggcggcgtgaacggcttcctgcgcgtgttcgacgcccgccgcaaccccaaggacggccggcccgtggcgcggcgggcaatgaagaagctgctttaaggcgctggctggccacagcctttcaatctagagctgctctcactcgctaggcccggggccacggcatgcgccccacagccgacagcccagcagagggcggcgtctatgcgataccccgcccattcatccattcatcgcggcagcagcagcagcaggcagcgcggctggagctggctgccgctcaagcaccgcccactgcccctcccggcgcaattcccctctctcgttgcacatgcaccattggcgcccgcgcgccgcatgcattctttcttccctgcagcactacagtaaccagctgagaaaccaaccaattttgtgcggngccggctgtgttaccgccccatagcggccccttgtccattttatgtgccacgtctgaagccccgctttgatgatgtccctctggcccggcaccgcctccccacaacgttgtgattttttgcgccccgccacggcacgatacaccacccttcctggctggcgggcggtagcgc

SEQ ID NO: 5070 - DNA, 457 bp, Chlorella sorokiniana
  unsure (1)..(457): unsure at all n locations; Clone ID: LIB3602-118-Q1-K1-A1
catgaccccttcccagatcggcgtgatcctgcgcgacagccacggcatcgcccaggtcaagtccgtgaccggctccaagatcctgcgcatcctcaagggccagggcctgcccccgagctgcccgaggatctgtaccacctcatcaagaaggcggtggccatgcgcaagcacctggaggccaaccgcaaggacaaggacggcaagttccacctgattctggtggagtcccgcatccaccgcctggctcggtactacaagcgtaccanaaagctgccgcccaactggaagtacgagtccgccaccgccttcgcgctggtgcagggctgagcgctcgcctcgcgcgtgagctgacggctgcagccacggctatctccaactggtgtgccagcaggcatcaccacgaagcagccgcaactcttcagctggctcttgctgcgtttgcagcccctggcttgat

SEQ ID NO: 5071 - DNA, 592 bp, Chlorella sorokiniana
  unsure (1)..(592): unsure at all n locations; Clone ID: LIB3602-118-Q1-K1-A10
ccccaacatcgtctccttcttcggcatggcggtggacaaccagaagggcctgctgcttatggagctctgcgacggccgagacctgggcagcgccctgaagctctgtgatggaggcggcacacgactgtttggctggcatncggcaccggttggcagaaatcgcgtccgaggtnnggccactgcggtcaactacctgcacnagccagagcccagnccgttgtgcacatggacatcaaaagtaccaacgtgctgctcagttcctgcggcaccgccaagctgtcggatgtgggcgtctcccgcacccaaaccaaaacctacctgtcccttgcggcgcctgtcggcacctttgcatgggttgcaccagaggtgctgatgggcgggcgctgcgggagggccgtcgacatatacagttttggcgtcctgctctgggagatcatcactggggagcagccggtgcgcggcaacctgcgcatgccacgcgtaccagaggaggcgacgcangaggcggctgagctgatggagcagtgcacgcggctggacccggaagaacgccccagcgcacaagtggtgatgaagcggctgcatggcatgc

SEQ ID NO: 5072 - DNA, 493 bp, Chlorella sorokiniana
  unsure (1)..(493): unsure at all n locations; Clone ID: LIB3602-118-Q1-K1-A11
tcatcccctgctcacccggccagctcgcacgcctcctgacacccctttcccagcatccccccatgccgtgcagagctgaagctggacgagaagggccagcccgcctccaaggactacgctttcagcctctggctnngcccgaggaggcgcagaagggacacgccccagcccaccgacgccgatgtgcgggtggtggagtacgagtccatcacagtctttgtccgcgtgttcagcggcttcgccaccgagggcacggttgtggatgagacgcgcagcctgcacgagatcctggaggacgaggaccgcgactttgccacagatgtggtgtgggctgcggtgtacgacccgcctcagaagctgatcaacaggcataacgagatccacgtcccatacgcccagaagcagcacaagcagacctgagcaggtcaacagccactgggttgcgccatgtgcatgcagcaggcgaaggcagccctgtgccgagcgatgcaca

SEQ ID NO: 5073 - DNA, 506 bp, Chlorella sorokiniana
  Clone ID: LIB3602-118-Q1-K1-A12
ggcagcctgtggcagacgccgccgccgccgtcttcggagcagctgggcgaggtcatccaagcactggcacgccagaatggctacgccacccacgccaacagcgcaatcggcaacggccacgtggccacagcccagaccgggagctgacctccccctcccgcctcctcacccacgattccacggggtccggctccaagcagcaggcagccaagcggcgccgaacgtccgccggccccgccggctccgcgccgcacgcatgagcacgcgctgtgcttgaagatcctttgtcgctcggcccttaccatgccttgcaacgtgcttgagctggtctctgccgagtctttgtcaaattctttcatcctgtgcttctgtttcacgctttgctttttcctccagggagcagccagctcacctggcttgctgcgctgcggccgtcggcctgccacagccctgacgcccaggggctttcatgttgcctccgctgtgcatccaacataggacacacg

SEQ ID NO: 5074 - DNA, 479 bp, Chlorella sorokiniana
  unsure (1)..(479): unsure at all n locations; Clone ID: LIB3602-118-Q1-K1-A2
gacccacgcgtgcggtgccttccttgatgtgccaacgtgttgtgctgtgatattgatacactgcgccggtcagtctgtattactatgcccctgccctcccatgcaccgcatgggagcgggtggcttgctcagcgggcagcgctgcctcccttggaggtcccttcaaagaaggtccaggcctgccgcctcagtccgtactaaacaaatcagcacctttcgttcgtcgcctttcattccgctctcgtcctccctgcctacctggtctgcctgccctagtgtgctggactggtagcaccctttgctgccccagcgtctgtctgcctctgcctccttgtgctttcatgcagctntcatgcagcttatgcagcatcgttgcggctgtcccgctgttcacccctttgcctcacctccctgcccctgctagctccttcccctccccacaaatgaacccaacagctggcctcgctcggctgtgaacc

SEQ ID NO: 5075 - DNA, 461 bp, Chlorella sorokiniana
  unsure (1)..(461): unsure at all n locations; Clone ID: LIB3602-118-Q1-K1-A3
ggggaaagctttcgcgagcgccgcctgaagctgattgcggctgtggagggcgatgactggagcgaggtggtccagcagcagacggcagaggctgcggttgcgggccgtggacaggagcaggaggcggctgcggcagaacgcctcggcgcagcagnccgccggtgaccccatttgcacgggcctcagtgcaccgtgctgtgggtgagacggcagcggcagagcagcagcaggtggagatgactgtggaggcggttgaccatgcgctggacgatgtgcggccgtatttgattgccgacggcggcaacgtggaggttgtggcggtggagaatggccgcgtcttcctgcagctccagggcgcgtgcggcacgtgcgcggcctccagcgcgaccatgaagatgggcattgagcgctgcctgaaggcggcctttggcgagcagctggtggaagtgctgcaggtgggc

SEQ ID NO: 5076 - DNA, 384 bp, Chlorella sorokiniana
  unsure (1)..(384): unsure at all n locations; Clone ID: LIB3602-118-Q1-K1-A4
ggcgggtcnagttcaccttccccaaggcgcagttcgaggtcgatgttgcctccggttcggatgccctcatcgccaccaccgccgggcggggcggtcgggggcgcggtcgcgggcgtggcaagggcggtcgggctgggctgggccgcggcggccgcggcacgcctgccgtgtctgcggttgcgggcgacgcggcggctgccctggggctgggagtccgcaagaagaagcggaggggcaagacgggcaaggcggttgggctggtggagaagagtgcgctcgctaaggagttcgaaaagtctgactccgagaagcactatggcagcgacctgnagggcgatgaggaggaggagggagacgagtttgcctcctccctgccccctgcca

SEQ ID NO: 5077 - DNA, 526 bp, Chlorella sorokiniana
  unsure (1)..(526): unsure at all n locations; Clone ID: LIB3602-118-Q1-K1-A5
atcgtaactgctgctgttctgcaggagccccaaacagccgcagggccttggttggcaagggctcggcgcccgcacgctgcggcagctgcgcactgtgcattgctagcacccagcaactctgcccgagtcccgggaagcgcgcccagtagcccgcagcgatgccgccgcgccgcaccactttgacgtactcgagtgaggacgtggggccggtggtgggcgacaagccgctctacgtctactactgcaagtacagtggcaagcacgcgctgacgaccgactgcaacctggccacggcgccgcgccgccgcaccgaccacgcgctggtgctcgatacgcaggcgttcctggtcaagctgtacaccgctgatggcggagccaagctgctgcgccgcaagagcggagaggtggagcggcagatccggtacaatgtgggcaagctgccggtggcataccgcaccgagccagacggcaggtacctgtacatactagacaacgcgctgaccacatacanccgcggggagggcga

SEQ ID NO: 5078 - DNA, 325 bp, Chlorella sorokiniana
  Clone ID: LIB3602-118-Q1-K1-A6
gcatccagaagatgtacgaggtcatcgagggcgacattgcgccccaggtggcctcgcgagccgtgaacgtggcgccctacaagggcaagcacgcgcagggcagcggcggcgaggcggcggcagacatctacggcaggcggcagcggcagacccggggccctcaaccagcgcgcggccaccccggggcggccctgttggcctgggcggcggcacactgcacgtccaggaggtgatcgacctcacgggggacagccccgccccctcgcggcggcgcggaaccgctgcctcccccctgggcaagggcaagcgcaaggcagggtcgtga

SEQ ID NO: 5079 - DNA, 394 bp, Chlorella sorokiniana
  Clone ID: LIB3602-118-Q1-K1-A7
cgtcccctcacatttcgttcgcccccgttcgcctcattcatttggttctgtccccccccctcctccccccacacaccccgttgtctgtactgctgctgccccctgcctaaccaacgaacgcccgaccgctgcgcgtggcggcgtgggcgcggcatcccgccgctccgctcctgagaagactcccctcccccaccccaccccgcacttggtagcacttttctgcggccagcggcgggcgtgccctgcctgctcggtttcccagcccgctcccactggccaaattttttgcaccgcttgtagcatcgcccggccggctccacaccactcagctcggcaggcgcggcaaggcgcgtggcggcgtgtgcgactgttcctcagatctgtaaatccctca

SEQ ID NO: 5080 - DNA, 330 bp, Chlorella sorokiniana
  Clone ID: LIB3602-118-Q1-K1-A8
cccccctgtcttgccccgctttctttccctctattgcattgtttattgtgggatgctcccacggcttttcgccatccccgttcaatcccctgctctttccccctcaaccaacattttcccttccctaacctgtcgcatttcgccattttcttttcattcttgaacatgcatgttgatgcgccgcatcttgttccgctgctttgctgcgtctttgcccttctttccatgcaccacactcccatggccacgtatgctggcatgccttgccttgatatacacacgattgtttgaaagtacgacatggctatatgtttgtaacggaacaacaca

SEQ ID NO: 5081 - DNA, 245 bp, Chlorella sorokiniana
  Clone ID: LIB3602-118-Q1-K1-A9
ggccggccgcggttagacgcaccaccgtgcacgtgaacgcatcgactaagcagcagccacgcgctcacgcgccgaagccccacaagccagttgctcgcctgactggctccttccgttgcacaacactgttgctggggtcgcgggcggcaacactagctcaggccagcagcgccaagagaacagcagggtgcgcaccagcaaccccacctgcaagatgtgagctaagagacaacggcacaaactga

SEQ ID NO: 5082 - DNA, 457 bp, Chlorella sorokiniana
  Clone ID: LIB3602-118-Q1-K1-B1
tcggatcttggccctctgccccgaactcgcaggtgcgagtgtggcgccaactgcgattgcaagggcaactgtggctgctgcggcggcaagtgagcgctaaaccagcgctggtcagggcagccgctgctgcctgaacccccctaaactcctgagagcgagtgagagcgcgaagtgcctttttgaggtttgtgcctgaagttaccggagcactgcccaccctcccatgcctaaagatgtccattcagggcgcactccttgcaaaacacccgcccactgctgaaaaagaatgaccactgccgaaggccaagtcaaacccttgactgagcctgagcactgagtgcctccacccaacgcatgccccctttgctcctgtgctgctgcctcctggcgcagccagtcttgcccccattcattaagagctgagctgagccaatgagatatgtaaggcttacgtaca

SEQ ID NO: 5083 - DNA, 412 bp, Chlorella sorokiniana
  unsure (1)..(412): unsure at all n locations; Clone ID: LIB3602-118-Q1-K1-B10
cggacgcgtgggcggacgcgtgggcggacgcgtgggcacctgtatagttggcgtccagcgcccgtactgtacattgcctgtacctgattaactgtgtttccatgtcagcaagccctgcagcagcggcggggctcagcaccacccatcccatctgatgcacttcgcagcgccgtgctcgtgtcgccctactctgaacccatacccgaccaccattccctgcccatccatccatctgcccggcgctgccaattttgcttttgcccccatgcgcatgctgcaaccaagctgtggccgctgcacgtgatacccagtacattgccccactcggggcctgtttcacaatcccccgttccaatcaatctgaatctcatactacttgtcgagtcgagacagtaacgtcacccacngtnna

SEQ ID NO: 5084 - DNA, 483 bp, Chlorella sorokiniana
  unsure (1)..(483): unsure at all n locations; Clone ID: LIB3602-118-Q1-K1-B11
gaagggcgaggccagccacgccgccaccaccgagcacgacgtgacggtgaaggacattacccccatgggcggcttcccccactacggcgtggtcaaggaggactatgtgatgatcaagggcgcctgcccggcgtcaagcgccgcgtcatcaccctgcgcaagagcctgttcccccagaccagccgcaaggcgctggaagatatccgcctgaaattcatcgatacgtccagcaagttcggcaacggccgcttccagacctcggaggagaaggccaagatcctgggccgcctcaaggcctgagcccagaaggcgtgctgagcggggagcgcagcgcgcacagcacgccgcccgcccgccggcggcggcggcgctctgcgcccgcccagctagaatgcggcgcangcgtaggcggctgggccgctgcgccggccgcctgagtgccctgcagcagctgtgcatgcatgcctgggaggagcatgtaac

SEQ ID NO: 5085 - DNA, 415 bp, Chlorella sorokiniana
  Clone ID: LIB3602-118-Q1-K1-B12
gcaaggctgctgattggcgcggccgtccttgtgcgggctgcgcgccctgcgggaggcgcttccatacccaccctggcagcgcttgcttgctaggcttgtaccaacaccttgacctgaccagcgttgtgctggcacctcggcggcccgtgttgttggctgccccaattcccctgcctttttgcctccctgccgatagccctgaatagcccttactaccctttgtttctctccctctgctggtgtgcagcagctttttcattttgtggccgccgcagcgccaagctgttgcagccaccacagtgcatgctgaagccgaacgacgcactgtgcaacgcaactctcacacctgtcgattgttcacattgggtctactttttgggatcgcctccctgttacatttaaagcaaggatctga

SEQ ID NO: 5086 - DNA, 370 bp, Chlorella sorokiniana
  Clone ID: LIB3602-118-Q1-K1-B2
ccgcccggtggaacctttaagcctctcaaaccccgcttcagccccatttcgcatagctgtgccctccagcctgcatgcccttcttttgtgcaccaagacccttccgaaactcaagcaacaccactgaaacgctccctcgagtgtgctatcacctaccatctgccacatcctgcattacaggcctgcttaccaatcctgcttgcttgctcaacgctgcctgccttctggtgccagtggccgtgtacagtgcggcctgcccgctggccgagtgttgcctttcacaccaccaactccctgcctgtcgctccatccctttttccgtaatacctcaaatggcacaagtcttccttttgttgaaacctgtgacctc

SEQ ID NO: 5087 - DNA, 231 bp, Chlorella sorokiniana
  Clone ID: LIB3602-118-Q1-K1-B3
gggggagccggtggaaggctgaaaaaaccgccgagcagaaggaggacgaggagctgcgcaaggcgcgcgagtgggacgagttcaaggacgacaacccgcgcggctggggcaactcaaagctgcggccctgccttgaaccgcgcgccaaccaggcgtgcccgctgcctctcgaccccttgatgcttacagcaattgtgtatgcaacagtgtacagcttcgtgtaagcatggg

SEQ ID NO: 5088 - DNA, 228 bp, Chlorella sorokiniana
  Clone ID: LIB3602-118-Q1-K1-B5
gcgtcctgttgccaatgctctgccccattcatttgccccaagttgttggcgtgtcaaaaagtttcgatgcccaaaaaaaaaaaggagaaaaaaaaaaaaaaaaaaaaaaaaaaaaaaaaaaaaaaaaaaaaaaaaaagggcgaaaaaaaaaaaaggggcggccgctcgcaataaaaaacaaggtcatagaccgggagcggccgcacaagatgatctaaactgacatcc

SEQ ID NO: 5089 - DNA, 357 bp, Chlorella sorokiniana
  unsure (1)..(357): unsure at all n locations; Clone ID: LIB3602-118-Q1-K1-B6
aaaaaaaaaaaaaaannnaaaaaannaaanaaaaaaaaaaaaaaaaaaaaaaaaaaaaaaaaaaaaaaaaaaaaaaaaaaaaaaaagaagaaaaaaaaaaaaaaaaggggggggccgtttaaaagaaccaaagtaactaaccgctgcaatgcaaaggtaaaaagttttttaatagggcaaccaaaataaaattaacgggccgcggtttaaaaacgtcggaacgggaaaaaccttggcgtaaccaaattaaatcgctttgaaaaaaatccccttttcgcaagttggcgaaaaagcaaaaaggcccgaaccgatcgcctttccaaaaagttgccaaccctaaatggcaaatggaacccc

SEQ ID NO: 5090 - DNA, 381 bp, Chlorella sorokiniana
  Clone ID: LIB3602-118-Q1-K1-B7
gctgcgctggcgcggccacacggcggcggcgcggccggcggcctgagcgcgctgcagtgcgtgctggcggttgcgctggcggtggccgtctggggcctgctcctggtcaccaagctggtgctgggctacctgctgcgcctgatagccaccacctacgtgcagcactacgacgacaagcgagcagcagcaacgcgcaccgcgagccgtgcgctagaggcgcggcggcggaccatgggcggccccgctttgcaggcggctgcggcagcggctggcggcggcggcaagaaggaggagtgatggaagcggcgtgatgcctttaggctcagatttcatgtacatcagatttcatctgtttgtgtccagcacgctttgtgaaattgc

SEQ ID NO: 5091 - DNA, 165 bp, Chlorella sorokiniana
  unsure (1)..(165): unsure at all n locations; Clone ID: LIB3602-118-Q1-K1-B8
gtccctctctccccctaacgccgccaccgtctgcccgggcgctttgctctctaggcaggggcgcaccgataccgaatgaacgcatctaagttagttgcattgtagccttgacatgtcatccgcggctgtaacacacagaccacanacaagataaacaaacaagat

SEQ ID NO: 5092 - DNA, 553 bp, Chlorella sorokiniana
  Clone ID: LIB3602-118-Q1-K1-B9
cgacaccttccaccgacagggcctgttactgtacacctggggcgacgccaacaacaactacgactcgtacatggcgcagcgcgaggccggtatcgacgccatcatcatggatgacgtggagaagctggcaaggcgcgcaagaagcaggcctcgctgttcgccaccaagtcgctgcggtcgcccgcctccgcgcaggacattgagaggctggccagcggcctgccctccctctccctggagcgcctcaccagcgggctgggcagcatgcacatggtggccatcagccccatcggcagccccgacaatccagacctggcgacccttgccagcggctcgctgtccccacatgcggcagccatggccagcctggccagcggctcgctgtccccacacgcagcagctggttccaccgccacgttcagcctggtgcccatccaaaacggggaggcagcgggctttgatggcctgagcaagtagaggtgcaccgacctgacaagcagacagccccagcaaaccagcccaacatctgagggccaggcccccgtcccctgtg

SEQ ID NO: 5093 - DNA, 221 bp, Chlorella sorokiniana
  Clone ID: LIB3602-118-Q1-K1-C1
cggccaacgcgttccgcccacgcgtccgttcgcggcggagttgccaagggaggcagtttcaagggcaagggcggcggcggcggcaaggggcggcggtagtgtgcgctgcatgctgatcctgtaatgctgattggtgcacgtgtctatgctttctctttttgctgcgctgacctcagccacacgctattgttacacgacatggtggtaaagctggaagctgt

SEQ ID NO: 5094 - DNA, 453 bp, Chlorella sorokiniana
  Clone ID: LIB3602-118-Q1-K1-C11
gaagctgcagacaaacgagatccgcaacggccgcctggccatgattgcgtgcctgggctgcgcggcgcagggcgtcatgacgcagaagggccccttcgccaacctgctggagcacctggccgaccccgtgtccaacaacctgctgggcaacctggccaccatcctgaagcagtaagcgtgctgccccaagccccggcctgggtgtgagggctgccagggcggcggccagccacatctagagcctttgcattccttggctcggggcggcgactggtggcgggccctccggccgtgcctgcctgccgccccgcagcgcaccctcactcaccccacttcacccctgagaagaaatcaactgcccaactcttgttttgttgccgctcctacgcttccgtgtgcctcttgtatgggataattgctgctacactcctgacagtgtaactctccgctgcc

SEQ ID NO: 5095 - DNA, 521 bp, Chlorella sorokiniana
  unsure (1)..(521): unsure at all n locations; Clone ID: LIB3602-118-Q1-K1-C12
cggacgcgtgggcgtcacgtgtctcaaaacctgctccagacccagaaccaagcgtgcgagacttggcgcgcggctaccccacggcgatcgccacccccaccgctcgatagcaagccatggcgggcctcctgggnggcgtcnntgcgctgtcccgagcnggcccacnngccctgctgccgccctgcaaggggcctgcagnccggagcagcagcaccatcagcgggcagcgggcgccagcagcagcgcgctgttggcggcggtggtggcctgcgacgccaccgcagctgccgctgcgcttgcaacggccaccgcagtcaccgcctccgtgtgcttgccgccgcgcacatccagccacacacggcgcatcgtcgtgcccacctactgcctgtccggtacgcgcacgcggcgcagccgcagccggcgcctcggcggcggcgatgaggaggcaggcggcggcgatggcggcgacggcgggtggtttggcggcaatggagacgacggcggcagcggctggtttggcg

SEQ ID NO: 5096 - DNA, 552 bp, Chlorella sorokiniana
  unsure (1)..(552): unsure at all n locations; Clone ID: LIB3602-118-Q1-K1-C3
gtgcacccgcccgcacaccaccttgataaaatcaattaccctgcggtggccaaggaggagaattcacgacgtggtggagcacccgccgccggtcaagctgatgagcggccgcgccactggtgtggaggcgtgggacaaggtcnaactcgccaaaggccaggcacgactgagcggccagagtggcagagtggcggagaggctccagcagtgaacgcactgccgccggctggtgtccacagatcaactcaatctgttgagaccagctgctgcctccatccaagcttgcaatgctcactgccaacgcaacccacacagacgcgcctcccagcccaccagcagcctcgccggtgcacgctgcgctacgtgagttttccctcctgttcctccagtattgcactgccccccaggtggctcgcgcttagcagcggcccgcctttttcactgcattgtagattaaacgcgcatgctgcagtgagcagcctgtgtttatgcttgagggccatgttgttgtagtcctggcctctgcctgcaagcctgccgtacgcagactta

SEQ ID NO: 5097 - DNA, 537 bp, Chlorella sorokiniana
  unsure (1)..(537): unsure at all n locations; Clone ID: LIB3602-118-Q1-K1-C4
gtttaaagctagtgtggcctttcttccttgcgcaatttcgacctgctgctgcgcgtcctgcgggaggcagtggccaccgcgctgcaggtggtcagccagttttgtgttgccttccttttgctcatgttcatcgtctgccatacctcctgtgtattgtagcagcggcagtgaaccccaggagcgcacacgcccgcctctgccccgcgccccactaccaccagctgccttccgcttgctcctttgcaggaccccagcgccggcggtgagggcacggcgccgctctacggaatggcagcagttgtcccagaccgcagaattgtggcgcaattcttgactgcctaccaggacgcgctgctggagggcatttgatggccttccagtgccgatgcaatctgacccaattcatccacccaactctgccgcacggccgcagcaccatgacctcattacgagcgctggatcctgctgagcatgcctgtgttgcaaggccatgtaaacagcgcccacttggggccaacttnngaaaaaaaaannaaa

SEQ ID NO: 5098 - DNA, 546 bp, Chlorella sorokiniana
  Clone ID: LIB3602-118-Q1-K1-C5
gcgcgtgcatcgagcccagcccttcatctttttttgacgagatcgacggcctcgccaagttgcgggaggccagcggcgaaggtggcgtgggcgtgggcgagcgcatgttagcacaaatgctgcaagagatggatgggttgcagtcacgcattggtgtggttgtcattggtgccaccaaccggcctgactgcctggatccagctctgctgcggccagggcgatttgacaggctggttgaagtgccgccccctgacaacgccgggcgggctgcaattttctgcgtccacacccggcacatgccgctgtctggagtggacgtgcaagacctggcccacaggacggaagggtttacaggcgcatccatagcagcatgttgcaaagaggcagcactttgtgctctgcaagaagacttgaatgcctcttccgtaatgactcgccattttgatacagctatcagcatgcttacctctcgcctacaactgttgtgatgtgaatgtggcacgctatgcgccacgtatccgtcagtgtttgttaatcaacgagctg

SEQ ID NO: 5099 - DNA, 433 bp, Chlorella sorokiniana
  unsure (1)..(433): unsure at all n locations; Clone ID: LIB3602-118-Q1-K1-C6
attggccccacatggatcagaggactctggagccaatcctgatgcacagccccagcctgcagctgctgcaaacagcatgggggccgcctgccgcaccccacatccccgctggtgctgagccggggcgcagcaacagcaagagctgcagcgctttgagcaggcgcatgccttctgccgcacatggcgcctcaagctgcagcacagtttcatgcctacctggatccttgacgcaagctttgaggaagcgctggctgaggcggccagccaggcactgcctgcttgaaagcagagctgccgccatgctgcccccctgaatcttgatgcctgctgctgggtggttgcggctctacgcgcctgttgaatgaggcgggctgagcacagccacgcctcccttctgctgcctccgctttatgtgtaagatggccatgtcnna

SEQ ID NO: 5100 - DNA, 105 bp, Chlorella sorokiniana
  Clone ID: LIB3602-118-Q1-K1-C7
aaaaaaaaaaaaaaaaaaaaaaaaaaaaaaaaaaaaaaaaaaaaaaaaaaaaaaaaaaaaaaaaaaaaaaaaaaaaaaaaaaaaaaaaaaaaaaaaaaaaaaagg

SEQ ID NO: 5101 - DNA, 413 bp, Chlorella sorokiniana
  Clone ID: LIB3602-118-Q1-K1-C8
gcaccggccagccttctctctcctcgaaacctttgttccactgacaccgcacagcagcagccctttgatccaccttcccttttagttgctagattgtagcaggacgttcgctccctgaatcctgcctgcaccacccttctctgggcctccgcattggtgagcgccccggcttgctgggggttttgttgcagcacccggcagcgatgccccccgtgctttcaactggtctcaactggaacacactgtgcgcaaatgcatgccgcaccaagctctgtcatttttcctgatcgctgtccaccccaaatgcacccctgttacgtcggcagatgccccttgttaagtccccccctgttcataatattagagcgacgtccctgttggttttgttggtccggtgtaacgcactgctcccc

SEQ ID NO: 5102 - DNA, 475 bp, Chlorella sorokiniana
  unsure (1)..(475): unsure at all n locations; Clone ID: LIB3602-118-Q1-K1-D1
cggcatgacctccaccgtcctgcgcgacatccagggctacgcctggttcttcctgtgctacgaggccacgctgcacgcgctggcaggccccgcgcaccagcgccaggagctggactacaagcacgtctgggcgcgggcgtgatggccggcttcggcctctggggctccatgttccccatcgacaccatcaagtccaagatgcagggcgactcgctgtccaacccgcagtaccgcaacaccatggactgcctgcgccagtccgtggcggtggagggctggggcggcctgttccgcggctttggcgccgccatgtaccgcgccatccctgtgaacgccggcatcttcctggcggtggagggcacccgccagctgctcgccaagtacgagtcgtacatcgacgagaagctggtcggcgaggtgcccgcacccgcacagacggttggcggcgaggtgcctgcccncgcgcagtaagagc

SEQ ID NO: 5103 - DNA, 282 bp, Chlorella sorokiniana
  unsure (1)..(282): unsure at all n locations; Clone ID: LIB3602-118-Q1-K1-D10
cacattgctcgtgcggttttgagttttggtcgcgctgtgctctaccccctgttgtcacccatccctcctgtgcaacatctgcctgcgggcaaaaaaaaaaaaaaaaaaaaaaaaaaaaaaaaaaaaaaaaaaaaaaaaanaaaaaaaaaanaaaaaanaaaaaaaaagaaaaaaaaaaagaaaaaaaaaaaaagaaaaaaaaaaaaaaaaaaaaaaacaaaaagaaaaacaaagtaaaagggtgggaaaaggggaaaagaaaacgaagtagatggaaaaaca

SEQ ID NO: 5104 - DNA, 364 bp, Chlorella sorokiniana
  Clone ID: LIB3602-118-Q1-K1-D11
aaaaaaaatacaatacaaaaattgaccaaaacaataataggataacaactgttgaaaaaagcaaactaaacaaaaaagcaaaagacgtgaaaaccaaaaaagggggggtggttgtggggatccacgcttataccgggtgcttgccctggggggccgcttttttaggggcccctaatttccatccactggcggtggttttgcagctttttttattgggaaccccttggggtttcccacggtcgtcgttttacaaccgcgtctctgttaaaaccccttgttgtaaaccagaatagcccctttcaagtcccccttctttcccctttctcgccttttttgcagactgccaccccctttgtcccttccc

SEQ ID NO: 5105 - DNA, 550 bp, Chlorella sorokiniana
  unsure (1)..(550): unsure at all n locations; Clone ID: LIB3602-118-Q1-K1-D12
cgccggtgcacaggtggacaccgtcaagaagcagacgcagggcaatgccagtgcagctcgcggccccatcaagagcgcagtcaagctggagaacgacaccgagacgtttgagcacgagcgcgtgagcagcgagctgaagaagcagattcagcaggcgcggctggccaagaagctgacgcaggcgcagctggctcagatgatcaacgagaagccgcagctgatcaacgagtacgagagcggcaaggcgatacccaacccgcagattctgtccaagatgtcccgtgtgctgggcgtcaccctcaaaaagaaccccggcaagaagtgagactgcaggcgccggcatggcggcagcggcaggcccatacttcggctgctgcagcccgcatccggcaccccttgcctcgcttgagcatttgattntctccatgtagctgccattgctctgcccgcttgcttacctctgcgcttgtaccaccacctgngccggctgccatgcacgcgcgccgncgttgcccagccctgcagtcagcaacatcttgtaaggctgatg

SEQ ID NO: 5106 - DNA, 493 bp, Chlorella sorokiniana
  Clone ID: LIB3602-118-Q1-K1-D2
ccggaagctggttgctttggcgcccccgttggaggtgcctgctgcatgcggatggccggcgctgtgtgggctggggcggcgggaggatgctgctgcgccgctgctgcctgatgccttctgctctccttcgcccgtggcgcatccctcgtgccgctgctgccccctgccctccctggcctggccttgctttatggggcgctccatgcagctcacatccccctacgcttgtgcttggctagctcgcggtggcgggcacctgctgcactctgctgcgccatgccccactctctccccctcctgtcccctgctctcccacgactgacaacagcgtttctcgtgtcatgcgccagtcttggtggtgcttaacgatggggccacccagaggcacccggcctccatttctgtttcatccctgcgtggcacatttacgttgcgatgtttccagagccagcaagcctgtggaccaggcccagcctctgtaacctcagtcagt

SEQ ID NO: 5107 - DNA, 549 bp, Chlorella sorokiniana
  Clone ID: LIB3602-118-Q1-K1-D4
cacgagaccggccaggtcaccgcgtacgcgattgacagtgtgcagcagcgcggccgcctgtttgcggcccccggcgaccaggtgtacgagggccaggtcatcggcatctaccagcgccagggagacctcaggtcaacccctgcaagaagaaggcgctgaccaacatgcgcgcgtcgggcaaggacgccaccgtggtgatcagcgagcccatccctgtgaccctcgactacgcgctggagtacattgcggatgatgagctggtggaggtgacgcccgcctcggtgcgcatgcgcaagaaccccgccgcaaagaagaagaagtgaagcctttcttgatcttgcaacggcctggaacccccatgcaacaaccgctatttggcgctcgtcacgccacgcctgcccacaatgaatgctgctctatttggtcgcccgtttcattacccgtatatcgttcctcaccatcagaatcccttttgcttctcagcactggacagcacaggcctcagttccccttgttcctcccctgtgttcacccaatgtaagaaatgct

SEQ ID NO: 5108 - DNA, 435 bp, Chlorella sorokiniana
  Clone ID: LIB3602-118-Q1-K1-D5
ctcatgggcctgattgagggctaccgcgtcaacggcggcccggccggcgaggtggtggaccccatctaccccggtgaggcctttgaccccctgggcctggctgacgaccccgacaccctggctgagctcaggtgaaggagatcaagaacggccgcctcgccatggtgtccatgtttggcttcttcatccaggccattgtgaccggcaagggccccgtgcagaacctgtccgaccacctggcctccccctccaccgacaacttctactccctgtacgccaagaccctggcgtaagcggcctgcacttgctcctgcttgagcctcgactggcggcgggcgtgaccctgtggcagtgcgctcccgcttgcgcccgctgcctgacttgacttcagctccactgttgcaccgaggggatggtgtaacatgtatgctgggg

SEQ ID NO: 5109 - DNA, 567 bp, Chlorella sorokiniana
  Clone ID: LIB3602-118-Q1-K1-D6
cgcagtcaaaaagacaagctacgacattttgaaggacgctgggcaccaggctgccgggcacattgatatgtggcgcaggcacggcagcgtgtacaagacgcagagccgggcaggtgctgcggctgacccatatgaggcgattcgggagtcgattggcaaggggcggcgccaggagctcttctcctttgccgtggcgcagctgctggtgatgggcacgcctgagcgggcggcgctgctgctcagccaggacacgggcgcccggctcaactttgtgctggcggcgctgcgcccatacctgctcgagctgcaggccaaggcgagcttgaaacgcagcctggagtgagtgccaaatgggctgcacacagaaataatccctcgtttttgcattgcggcggaccccgctgccgccgcctcaagcaaatgtgtgcccggctctgttccccgggcagcacatgaacatgcatttccccgttccaactgtactttgcacccaacagtagctctcactgccaatgccctcaaccgggcacaccctgtacctctgctcttctgtttacgcctgtaccc

SEQ ID NO: 5110 - DNA, 125 bp, Chlorella sorokiniana
  Clone ID: LIB3602-118-Q1-K1-D7
agaaaaaaaaaaaacaaaaaaaaaaaaaaaaaaaagaaaaataacaaaatctcgttctagatcgtggcgtccgtctatagggggcagcttcgtacgcgcgcatgccacgcttactctgcttccgt

SEQ ID NO: 5111 - DNA, 90 bp, Chlorella sorokiniana
  Clone ID: LIB3602-118-Q1-K1-D8
aaaaaaaaaaaaaaaaaaaaaaaaaaaaaaaaaaaaaaaaaaaaaaaaaaaaaaaaaaaaaaaaaaaaaaaaaaaaaaaaaaaaaaaagg

SEQ ID NO: 5112 - DNA, 524 bp, Chlorella sorokiniana
  unsure (1)..(524): unsure at all n locations; Clone ID: LIB3602-118-Q1-K1-D9
gtttttcctcaccgagtttgcggtgacagtggcagatggcgagccgcagctcacacctgaagtggacgcctgggccgcgccctacctcgtgcgcatcgtggcagcacacgtggcagacgcaaacaacgaccgcctcatgtccggcaccgcctgcatcaagtttcccaagctgcaagaaatgggcgctgagggtccgttcatcctgcaacgctacaaagacttgtatcgcgaggcgcaggagtatgagaaaaagttcaagcgctgggcgccgggctcgctggtccgcatgtaccaggggagcgctgtccaagcaaagcagcagctggacagcgcgcaagagcgaggcttcactatggacgacatgattgaacccaagacagccggcctgctgcagcagtcgcaggaggactggcacgaggtgcaccaagctgcgctggaccgcgcacgctgcgccgnctgcacccgcgtcggcatcggcctcatgcgctgctcagcctgcaagtcggtcaagtattgcagcagcg

SEQ ID NO: 5113 - DNA, 578 bp, Chlorella sorokiniana
  Clone ID: LIB3602-118-Q1-K1-E1
gaggtggtggtgtcggatgtcaccgatgccaacggcatctacgtgcaggttgcggacgagccgcgcgtgatgtgggtggcggagcagctggcgggcctgagcatcggcgacatgccggcccccacggcgccgctcaagggcgggtggagaagtggcctggcgcccagagcagcgcggaccaagcagtggtacccgcgcttctgttgagaaggcgtacgcggcagacccgaccgcgcccaagtacgacgtgctgttcatggactttggcaacaaggagcacgtgacgggggcgcaggtgcggccgatgccgcagacgctggctgcggtgcccggccaggcgcaccaggcctgcctcgcattcatcaaggcgccctctgtggatgctgagcacggcgtggacgctgcgcagttcctgtggcagctggtgggcggcaaccggcggctgactgcccatgtggagcggcgggagcggctggcgggcgggggcaagagctggggcgcccaggcgcccaccaagctgcacctgaccctcatcgagtcgggcagcgacgacctcaaggagagcgtgaacgggcagc

SEQ ID NO: 5114 - DNA, 440 bp, Chlorella sorokiniana
  Clone ID: LIB3602-118-Q1-K1-E10
actagttctagatcgcgagcggccgccttttttttttttttttttttttttttttttttttttttttttttttttttttttgtggtataatatatttttttttttattttttaaaaattaaatataaaaaaaaaaaaaaaaaaaacattacaaataaaaaaaaaaataaaaaaaaaaatacacaaaaaaaaaaaaaaagggaacaaaaaaaaagaggggcgacaaaaaaaaagcaaaggagggacgaaaccaaaggcaaaaaaaaaaagcgggaacaaacaaaaagagcccccccggaaggggggggcgccaataaaaacaggaacaaataaaaggggggggaacaaaaaaaaaaaaggggggggaaaaaaaaaacggacaaaaaaacttgcaccccaaaggaaaaaaacaggggggggaaaaaaagggcatcccaccca

SEQ ID NO: 5115 - DNA, 575 bp, Chlorella sorokiniana
  unsure (1)..(575): unsure at all n locations; Clone ID: LIB3602-118-Q1-K1-E11
tccaccggcccgtcattgtgcaccgcgccatcctggggtccgcggagcgcatgtttgccatcctgactgagcactggggcggcaagtggccgctgtggatctcgccgcggcagtgcatggtggtgcccatctcggaggggctgtgtacgactacccggccaccaggtgcggcgcaagggctgcgggcagcgggcctgcacgtggacattgacgtggcggaccgcaagatgcagaagaaggtgcgcgaggcacagctggcgcagtacaactacatcctggtgctaggcgaggaggagaagcgcaacggcaccgtcaacgtgcgcacccgcgacaaccaggtgcacggcgagcacaccctggagtcggtgctggatgtgatgacgcgggagcgcgacacccgcagccaggtcagcatgtttggcggcgacgagaagaaggcggcacaggcagcggccgatggcgcgtgatgcgctggggtgcccagtgcctgcggcacagcattcttgtctgtcctgacagctagtgaatgctcagtttagtacaggatcagtatgaaccactgtcgccaaanaaaa

SEQ ID NO: 5116 - DNA, 499 bp, Chlorella sorokiniana
  Clone ID: LIB3602-118-Q1-K1-E12
gcggccaccgccccatcattgagcaccgcgccatactgtggtccgcggagcgcatgtttgccatcctgactgagcactgcggcggggagaggccaatgtagatctcgccgcggtacttcatgatggtgccatatcggaggctgtgtacgactaccgccaccaggtaacgaggcaagctgcggtcagcgtgcctgcactgtggacattgacgtggctgaccgtaagatgcagaataaggtgcgcgaggcacagctgtctcaatacaactacatcctgatgctaggcgaggaggagaagggcatctgtaccagaaacgtgcgcacccgctacaaccaaatgcactgtgagcacaccctgtaaacaaagatggatgttataacacgtgagctgcaaaccccaagacaattaataatttttgtcgcaaagagaataaagcggcacatgcagatatctgatggcgaatgatgcactcaagtacccaatgcctgcagtacaaaat

SEQ ID NO: 5117 - DNA, 256 bp, Chlorella sorokiniana
  Clone ID: LIB3602-118-Q1-K1-E2
cggacgcgtggtggcattcgcggttgccactgccctgtctccgccatcaccaaacacatccggtttcctcatacccacagacggcagccaaccaccttcatgcctcccagcgtcacttgctacccactgtttcagaacgtgcagtttgccgcttttccagcccaccacgagccatttgcttctttcgctgctcagtgtcagtttcggccaaggagtggattacgtactccgtcatgctttgtaaaccctcaacgtg

SEQ ID NO: 5118 - DNA, 545 bp, Chlorella sorokiniana
  Clone ID: LIB3602-118-Q1-K1-E3
aggaggtgtatgggccccgccaagctgtgggaaggcccacgcacacccttcctgctgcgcttcatcactgctgaggacctgtacctctcccctgcccatggagagcctgccatgtacatcaactttgaggacacgtgtccctgagcaccggcaagcccaacgagcagtttgagcagattgcgcgcctgttccgcgagcgctgcggcgcgcgctggcactggggcaaggagggctggactcggcacgcccagtgctttgacggcgccaaggagtaccccaagtggtgccacttcggctgcgcagtgcaggagctggacccaaccggcaagtttgccagtgagtgggacggctggcggttcaacgccacacgcggcggcgcagtagtgcccttcgcctcgtgctgcggcccccagggcttctcagccgagtgccagtgcgccagccgtggcagctgcaagtgagctgttgcaacatggcaacagcagcaacagcgatcaacgtgtggcgacttggtacttgccaagacttgccacaaacagaaagca

SEQ ID NO: 5119 - DNA, 659 bp, Chlorella sorokiniana
  unsure (1)..(659): unsure at all n locations; Clone ID: LIB3602-118-Q1-K1-E4
ctggacgtggccaaggccccgcatcaaggaggctgagaagcgcatcgacgccgacctggacgcctacatcgccaaggcgtactggactgagggccgcaacgagctgcgccgccaggtgggcaccctgcgctcgacctgaacgcggtggccgacaccctgcccaaggccgccaagaaggaggcgcaggccgccaagaacgagttcctggccgccgtggaggcgctggacctccagctgcgcaagaagaacggggacaaggccgccgctgccctggctgacaccaaggccaagctggacgccgtgatcgccaagctggcgtaagcacccgccagccaggcggctggccggtaccacccggacggccgccgcggcaccccgcagcagcccccttgccagctggcgccccacgcgccggcgcaacgttttgactccttctcgcaccctggtggggtttgtccaccggcggngcccccgcgccccagcccgcagcagctgcagcagcattcctctgctctacaccagtcccgctagttccctccagctttgattcccggccccgcccgacgcggcgggcgcccccgcactctagagcgcctgttcactttgtactgccacccccctaccacccgcgcttgccccgcggcgtgtgtaacgagaag

SEQ ID NO: 5120 - DNA, 467 bp, Chlorella sorokiniana
  unsure (1)..(467): unsure at all n locations; Clone ID: LIB3602-118-Q1-K1-E5
gctagccaatgctaccggcgttctgacctgtggcacgcaggcttctgatgtcgtcgactgcccacgggactggcagggccagacccgccaccgcctgtatctcaacgtctcctgcgaggagtctgctcggaggtgattgtgaacctggaggtggacgccctgngcgcagctgacggcaccgtgcggngcattgacgtagatatcgagcgcgtcactgttgatggccagcggattggcgacgacctggaggacctgtttggcgatgatgacccgcgggaggacaccatggagacgctggaggaccgcattgaggacctgttcggcgacgatgatgacaatggggacgacatttgcgacgataatggcgatgacaatggcgaccgacacgacgacgacaactgaatccgttgatatgctcgctctggccgcctgctggccccagccttgcgcgcctggggacaaccccc

SEQ ID NO: 5121 - DNA, 108 bp, Chlorella sorokiniana
  Clone ID: LIB3602-118-Q1-K1-E6
caagaccagcgaacctgtaaaacaggcaaactgccaatcggcagcggcggcccccgcctcgccgcgcgtttttgtttgatgcgaactgccatgtattcaccaggatgt

SEQ ID NO: 5122 - DNA, 383 bp, Chlorella sorokiniana
  Clone ID: LIB3602-118-Q1-K1-E7
acggaagacatttacaagtacagtgctgcaggctcaaagaattgcgtaactgccgggtggagcggtgaaaagcagaggcaaaacgtttgctcgcaaaagctaaacacataatcagtgcgggtgccaatacccgccgcaggaacgctgaatagtgcatgggctgccgcaacactaggctgctggcacgctattgggcagcatttgcatgctcggcccgctttgtgcatgctgtgcttgccgcctagatctcctttttggcaggacccagcaccatggacatttgccggccctgcattgcgggcgcctgctcgatcgccacgtcctcgccacagtcctccacaaagcgctggaacatctcgcgcccgatctggtggaacttcatt

SEQ ID NO: 5123 - DNA, 319 bp, Chlorella sorokiniana
  Clone ID: LIB3602-118-Q1-K1-E8
gtggggaaaggcgggaaattgaacccaacttaaccaacgggggggggggggaggggccaaaaaaaaaaaaaaaaagggggggttgggggcccaaacctttttgtaaatggggagcccccaatgggcccgataaaatttaaaaaaattctggccggcggtctcagtgtcaaaaaaaaaaaattttgtaaattaaaaaaggagggggaacaaaaaaagggttaagggtttttttttgcccatttttggggcggggttgggttttttttaaaacacttaagggggggcctataaaaaaagaatcccccgggttggatccccc

SEQ ID NO: 5124 - DNA, 455 bp, Chlorella sorokiniana
  unsure (1)..(455): unsure at all n locations; Clone ID: LIB3602-118-Q1-K1-E9
gacggcctggcccaggcccgcgagaacctggacgtggccaaggcccgcatcaaggaggctgagaagcgcatcgacgccgacctggacgcctacatcgccaaggcgtactggactgagggccgcacnagctgcgccgccaggtgggcaccctgcgcttcgacctgaacgcggtggccgacaccctgcccaaggccgccaagaaggaggcgcaggccgccaagaacgagttcctggccgccgtggaggcgctggacctccagctgcgcaagaagaacggggacaaggccgccgctgccctggctgacaccaaggccaagctggacgccgtgatcgccaagctggcgtaagcacccgccagccaggcggctggccggtaccacccggacggccgccgcggcaccccgcagcagcccccttgccagctggcgccccacgcgccggcgcaacgttttgac

SEQ ID NO: 5125 - DNA, 394 bp, Chlorella sorokiniana
  Clone ID: LIB3602-118-Q1-K1-F1
ccgtccgaatcggtcgccacgcgtccgcacgttttgcaaagcggtctattttcatggcatcgtgcttcaatgataacctgcccaggcgtccactgcgatttgttttcaccccccaaatgcatgtgcccctgttcccaatctgctgccggcctgcgccactcgtgccgccagcgtgttaccctacatttccgcagtcgtgtgtttttttctgccctggtgcaccacattccctgcgccgcttttcccctggatctctacccttgtggattcattccccagttgcactgcgtgctgctttgcctgatctgcaccttgcgcctccccttctgcatgcctttcatgtgcctctctgccggcaccgccgagtcattctggaatgtaacatcgctcagaa

SEQ ID NO: 5126 - DNA, 385 bp, Chlorella sorokiniana
  Clone ID: LIB3602-118-Q1-K1-F10
gcggctgtagcgtccaatgctgcagctcgctgccccaggctggcgagcgtctgcgccggccgctagcttgcccagccctgcggccagcaaggctgctggagcctgcaggccctgcccttgactgtatgccccttaggaacccgcctgccctgcctgcctcggaaacgcacgcttctcctttcctgcttgttcagcgccggtagcgaccattgagttttgactctcaggacacagccttttttggccatttttgtagcgctctccccgccccccatgccggccgcccagctgctcgctagttgcattgtgcaggcgctcgataccccgcccgctcttgcatggcagcagccttgtgtgcttagcgagcaattgatatgtaacatgg

SEQ ID NO: 5127 - DNA, 429 bp, Chlorella sorokiniana
  Clone ID: LIB3602-118-Q1-K1-F11
cgacagcggggggttgtccaggctggggctgcgccagcgacagggccgcggcgaggcagcagagcgctctgcccgttcatcataagtaagctgccacgcgagccgggttgcccctgtggtgcggccgacagccgcaggctccgacatgttttgctcccctgtacgtctcccttcgccctgcctctcttccacactctacactctgctctaacctcttcctctcttctctgtcttcccctcttttcactcccgcctccactctctgccctcttcctcagctgaactgcttgagggtgccccactgcatgctcccgagctcatgcattgtgcactgcattgcatcttgcccagcgcctaacaacgcgggcaagccacgtgtggcatttacagccggttggaacaatgtgggacagggtaagagagcaggcg

SEQ ID NO: 5128 - DNA, 494 bp, Chlorella sorokiniana
  Clone ID: LIB3602-118-Q1-K1-F12
cgacgacccgcggcccttctggggattcctgggagacctgtgcgaggggctgggatacggccgcccccgcatccggctgcccttctacctgatctacttcatcgccctgattgtccagtacctggtcgtccccctgctgcgcctgtttggcaaggagctgcagagtgacttcacgcccttccgcatcgcgctgtccgccgccaaccgcacttttgcttgcggcgctgcctaccgagactttggctacgtgccaaaggtgcccatggacgaagcgctgaagcgcacgctgcgccacttcagccacctgcacgccggcaagcagaaggagggctgaggccccggctcgctggctggctggctgctgcacagcggtggaccgaggcgccgtttctgaccacccgtgccctgcttgatggctgagccatgcggcagtgcacacactacatctagatacgccgcagcccctgccacagggtgcgcccttgcagctgact

SEQ ID NO: 5129 - DNA, 517 bp, Chlorella sorokiniana
  Clone ID: LIB3602-118-Q1-K1-F2
cctgtttgagatcggccgcacctcccccgctgacattgtggtgcccatcccaaccgtgtccacccggcacgccgtggtggcgcgtcgtcgacgccacgggcgctgcggccggcagcgtgtagatcactgactgggcagcacaaacggcacctttgtggacggcaaggagctgaaggccatggaggcggtgcccctcaaggtgggcggcgaggtggtgtttggagacgccaacctggccaccttccggctggacctgctgcccgactcgctgcccgcggcgccggccggcaccaaggaccctctggaggacaagcgcgtggacgactgcgaggccgacccgtcccagccagagtgccgggtgtacgatgaatgagcgagagccgcggtcctgcaaacactgcccctgcccactgcactgccactttgcgtcaccgcaccttcatcacaaagccagatggccagacaatgatgtagtttctgccacatgaagatcgcccccacccctgtaatgcatgta

SEQ ID NO: 5130 - DNA, 549 bp, Chlorella sorokiniana
  unsure (1)..(549): unsure at all n locations; Clone ID: LIB3602-118-Q1-K1-F3
acggcctgctcttgcggcctttcatacccttgtacctttctgtatcatcttgcagcattggcagccggctgcatctttctaacatcgtcaccggcccactcgtttgtgccatgcccacctgcctccacgcacccttcatcaaccctcacccaacccatccacctgccacccatccactcaccttccctccgccacaacctctgccacccactcaccacccatcacccgctcaacgccctccatgcaccatcctccccatccaccaaatctgccaccccaaacgcacgtccgccgctgcaccacctgccgccccctcacccgcacccatcttccacccgccacctttcctgccgctcaccgccgcacatcctacctcccacacctcactccatgtccacccttcacccgcgcttcacacagcggctgctgccatgcaaagctgctgccaaacccatccatcatgctcgcacacccactcacccacacgtncaacgtatccagacccattntcaggcccgactgacagtgccttttgcgtctatgcgatct

SEQ ID NO: 5131 - DNA, 93 bp, Chlorella sorokiniana
  Clone ID: LIB3602-118-Q1-K1-F4
ggcggcgccaaaaacaaccggccgttaagcaagcggaaatgaaccggccgtagcggcctgctgggccgctgccgttgtaacgcacttcctcgg

SEQ ID NO: 5132 - DNA, 362 bp, Chlorella sorokiniana
  Clone ID: LIB3602-118-Q1-K1-F5
cgctcaacgccttcatgcaccatcctccccatccaccaaatctgccaccccaaacgcacgtccgccgctgcaccacctgccgccccctcacccgcacccatcttccacccgccacctttcctgccgctcaccgccgcacatcctacctcccacacctcactccatgtccacccttcacccgcgcttcacacagcggctgctgccatgcaaagctgctgccaaacccatccatcatgctcgcacacccactcacccacacgtccaacgtatccagacccattttcaaggcccgactgtacagtgcctttttgcgtccttatgccgatctggtaccaggacttaatgtgtaacaaatggtatgt

SEQ ID NO: 5133 - DNA, 593 bp, Chlorella sorokiniana
  unsure (1)..(593): unsure at all n locations; Clone ID: LIB3602-118-Q1-K1-F6
ggatgtgcaacagccggcggtgcggtttcatcaggcgcatgatcccgagcttgatgcggcggcggaggcggcccttgcagacaagggctgctggccggccgactgcgcccggctggcaggggaagcagacatcattgcactgacgtgccaccaagacgagagcaaccgcggcatggtcaacgccgagttcctggcgcactgcaagcagggcgtgcgcatcgtgaatgtggcgcgcggtgaggcgccgcttagacttggattgcttagacttggattggttggaagaggggcaggagaggcgagctagtccgccattgcacacatatgtcatgcgctacttcttactgcggctntttgcctagcgcaggagggctgatggactatgatgcgctcagtgaggcgctnttcaccggccgggtggcgggcctgggcctggacgtgcacccccaggtggggctggaatgttaggcacgaacacggctgcctgaacggctgtgcatggaactcatggcatgctcctgtggtcctgcccagcanggcagtgtacgcgcctgcgaggatgctcacagctgctcagagctgatgcaatcact

SEQ ID NO: 5134 - DNA, 419 bp, Chlorella sorokiniana
  Clone ID: LIB3602-118-Q1-K1-F7
ctccctgtaccccggcggcttcttcgaccccctgggtctggctgacgaccccgacaccctggctgagctgaaggtgaaggagatcaagaacggccgcctcgccatgttctccatgttcggcttcttcgtgcagggcctggtgaccggcaagtcccccctggaaaacctggctgaccaccttgctgagccgtctgtgaacaacggcttcgcgtccgccaccaagttcctgcccctggcctgaacgccgtcgtcaacctggagcgacctgtgcatcccatattaacggcggccagccggttctggacaagcacacacaacatatgagattcccaacctccctgcgcactgcttgtaacaatcctggctccctcttgtacccttgacccgcactcgagcgtggatatgtaacgttccgcggg

SEQ ID NO: 5135 - DNA, 493 bp, Chlorella sorokiniana
  Clone ID: LIB3602-118-Q1-K1-F8
ccacgcctctgtttcctttccgctctcgaagctctccgctgctcccgaacttgtgcactcgcccgtcttccaggccccgcccgcaaagcaagatgctgaccgtgtgctcccagaccagccgccccacggcgccgcagccgcagctgctctcccggcgcccgctggcgcacacccccagttggcggctgcacgcggccagcctgtttgcctccgagcccaacgggcccttctccttctggccccgctccaccgacccggccaaggcggcgccgcagcagccggcgcgcggcaagaaggcggacaagccggccgccgctcccgctcagtcgagcctcgacacgtttgagcctgatgccccggtgggcgcgccccgcttccgctccgcgcttgagcaggtctccatctacaccagcgagcaggcgtacatgcatcgcaacgactgaagggctgccatccgcgcctgacgccacttgcggccgtattctttgacaac

SEQ ID NO: 5136 - DNA, 419 bp, Chlorella sorokiniana
  unsure (1)..(419): unsure at all n locations; Clone ID: LIB3602-118-Q1-K1-F9
cgaggacttcattgtgcacctgctggaggactgcaacctgtgcgccatccacgccaagcgcgtcaccatcatgcccaaggacatgcagttggcgcgccgcattcgcggccccgtctacggcgtgtgcagctattgagggccttgtgccatgcagcagcatcgcgctcacatttggcctatcagtggctcaatttgggcagggctgctgccagccaggccccagccattgtgcctagcccaatggcctttcgtttgtactctaggtagccagcagcagcaggagcagcaggagcaacacacactgaccgcaccacacgcaatacttgctttgcctggaggactttaacattgcctcctcaccaccaaccaaaccgcacgttcagcagccactccctctgtgtaaagcacgacgcactana

SEQ ID NO: 5137 - DNA, 529 bp, Chlorella sorokiniana
  Clone ID: LIB3602-118-Q1-K1-G1
gcggcaattgacagcccggctggccttccggccccggttgccgcggacgggggagggcggcctgcgcggcaacgacggacagcgcactggcccatgctgttccggtgcccatgcgttgctccagtgcgccacagcccagccgccctgccaagcccttcccatttgctttgtgaccttcagtagtagcacgattcctgcttttgaacccgcttgcatcgactgctctgcgctgcccctttgaccctcaccctcgttttccaacccaaatatgctaccggccactgccgcagcgctcgccattccttgcataatccctggtatgccacccaccaagccacttgcctgctaggcagcgtcgcgccgcctgtgacccaagcacactcatttgaccatccctttctgaatggaccatgagcaccccgctctgcacagcccctccccccaccctttgcacagacttttccgttgcacagccgtgcgctctatggtgggccttgcacccctcccaggaacacaatcgagcgccaca

SEQ ID NO: 5138 - DNA, 503 bp, Chlorella sorokiniana
  Clone ID: LIB3602-118-Q1-K1-G10
cgttcttcctgcgctgctggtcccgctgctggccatccggctaaacttggctgatgtctttggccacctgcagcggcacggcggcagcccgctgcgcctgctgggcctgctgctgctcagccacccggcacgtgggtgctcatctccgcgctctgcggcggcgcggccatcgcagcaaacgtgctggtcctgcccatgcttgcggcccctacggtgtgggccagccgcggcatgtgccaacaagtgctgcacgtgccgggggtggaggagcctctagcccggctgcatggcgcgctagataccctgcacggcaactcgctgctgtcgcagccgcatgcagcggtgctgggagagccgagcagcatgcagtgctgcctggcggtcaacatttggcttgcagcggcagttggcgtggtgctcccactgttcgtgctcgggcgctgggaggcggcggggcggtgcaacctgtatgcacggcgctggcggcaggcacagcaggcaca

SEQ ID NO: 5139 - DNA, 295 bp, Chlorella sorokiniana
  Clone ID: LIB3602-118-Q1-K1-G11
cggcaacctgtacctgatcaaggtgcagtgcggcgacaagcgctggttcaagggcgccaagcgggaggccattggcgcctgggactccttcaccgtggtgtaagcacttgcaccgtggtgaccccgccgagtagccgccgcagcagcagcacagcacacgagaagaaacaccccccccccacactttcccttgcttgtacgttcctccgctcttgttggccgtcccgcgggcgccagccacaatctgatttttcgctcagcgtgtgtgccacaccatgtgtaacgacttgcccgc

SEQ ID NO: 5140 - DNA, 572 bp, Chlorella sorokiniana
  unsure (1)..(572): unsure at all n locations; Clone ID: LIB3602-118-Q1-K1-G12
cgcgcacgcagaatgtgctgggcgtcaagggccgccgcattcgcgagttgaccagtgtggtgcagaagcgcttcaagttcccggagggctctgtggagctgtacgccgagaaggttgccaaccgggcttgtgcgccgtggcacaggcggagtccatgcgctacaagctgctgggcggcttggctgtgcgccgtgcctgctatggcgtgctgcgcttcgtgatggagagcggcgccaagggctgcgaggtgattgtgtctggcaagctgcgtgcgcagcgcgccaagagcatgaagttcaaggatgggtacatggtgtcgagcggcaacccggtgcgggagtacatcgactcagccactcgccatgtgctgctgcgtcagggtgtgcttggcatcaaggttcgcatcatgaaggagtgggatccgactggcaaggttggcccccgcacccctctgccggatgtcgtcaccgtgctggcacccaaggaggaggagtatgtcagcgactccaaggaaaagcttgccaaggcttgagagnctgtcgcacattagatgtactgctgcatgttaaaca

SEQ ID NO: 5141 - DNA, 527 bp, Chlorella sorokiniana
  unsure (1)..(527): unsure at all n locations; Clone ID: LIB3602-118-Q1-K1-G2
gtgctctgatgtgactgtcacgcagggcgattttgatgagagcaccaagtggnctgacacgcaggtggtgtctatcggcgactttcggataggtatctgccacgggcaccaggtggtgccctgnggaaccgtgatgcgctggccatcctgcagcgcaagctggactgtgacattctggtgactgggcacacacacgagtttgcggcatacaggcatgaggaccggctggtcatttctacgggctcggccaccggcgcctacagtgcactgtctgcgtcagatggtgggcggcggcccacaccctcgttcgcgctcatggacgtggatggcagcaaggccacagtgtacgtgtacgaacttgtggacgaccaagtcaaggttgacaagctggagtttaccaagcgacccancggcggctgcggcggcggcgccctgcagctctgacgggcagttcgagtgaatggcttcccctggccgcttggccgtccagagggctgcgcaagatatcgaacacgctgtaatgatgt

SEQ ID NO: 5142 - DNA, 633 bp, Chlorella sorokiniana
  unsure (1)..(633): unsure at all n locations; Clone ID: LIB3602-118-Q1-K1-G3
accggccgatccgtcgccacgcgtcgacggctgtctgcgccctcatacctttgaccctttctgtatcatcttgcagcaatggcagccggctgcatctttctaacatcgtcaccggcccactcgtttggccatgcccacctgcctcacgtacccttcatcaaccctcacccaacccatccacctgccacccatccactcaccttccctccgccacaacctctgccacccactcaccacccatcacccgctcaacgccctccatgcaccatcctccccatccaccaaatctgccaccccaaacgcacgtccgccgctgcaccacctgccgccccctcacccgcacccatcttccacccgccacctttcctgccgctcaccgccgcacatcctacctcccacacctcactccatgtccacccttcacccgcgcttcacacagcggctgctgccatgcaaagctgctgccaaacccatccatcatgctcgcacacccactcacccacacgtncaacgtatccagacccattttcaaggcccgactgtacagtgcctttttgcgtccttatgccgatctggtaccagactaatgtgtacaatgtatgtaaaaaaaaaaaaaaaaaaaggcgcgttaag

SEQ ID NO: 5143 - DNA, 195 bp, Chlorella sorokiniana
  unsure (1)..(195): unsure at all n locations; Clone ID: LIB3602-118-Q1-K1-G4
cgngngttnttttttttctttttttttttttttttttccatgcgagttgttgcctaacaacttgatcccatccagcacgtagcacgcgggggttgccccctcgttaggcgctcctttacgcgcactcatgccctattcttccgcatcttcttcacataaaactcaaactaacctccctccaagatgtcatcgtcc

SEQ ID NO: 5144 - DNA, 549 bp, Chlorella sorokiniana
  unsure (1)..(549): unsure at all n locations; Clone ID: LIB3602-118-Q1-K1-G5
gncagttgggcgacctgatgcggctgtttgaggagtacggcacgccctccactgccggcgacatcacatacatcgactacctgttcctgggcgactttgtggaccgcggcgcgcactcgctggagaccatctgcctgctgctggcgctcaagattgagcacccgcgcagcgtgcacctcatccgcggcaaccacgaggcggccgacatcaacgcgctgtttggcttccgcctcgagtgcctggagcgtctgggcgaccagcaggggctcaaggcctggcagcgtctcaatacgctgttcaactggctgccgctggctgcgctcatagaggacaaggtgctgtgcatgcacggcggcattgggcgcagcatcaacagcatcgagcagattgaggagctgcagcggccgctgaccatggaggacggcggcatcgtgctcatggacctgctgtggagcgatcccaccaccaacgatgcggtggaaggcgtgcaaccctcgccacgcggncccggcctggggacccttggccctgatcgcgtcatggagttct

SEQ ID NO: 5145 - DNA, 540 bp, Chlorella sorokiniana
  unsure (1)..(540): unsure at all n locations; Clone ID: LIB3602-118-Q1-K1-G6
tcggcgaggagaagcttgccgtccttcctggtggacgagagcacggtgcaaaagatcagcttgctcacgcccaacatcggtatgacgtacagcggcatgggccccgactcgcgcgtcctggtgcgcaaggcgccaagagcgggcaggtgtactatcggcagtaccacgagcagataccggtggcgcagctgtgcagagagacggcggcggtgatgcaggagttcacacaaagcggcggcgtgcggccttttggcgtgagcctgctgatggctgggtatgacgaccacggcccgcagctgtaccagatcgacccctccggctcctattttgcctggaaggccagcgccatcggcaagaacatggtgaacgccaagacgttcctggagaagcggtacgccgaggacatggagctggaggacgcgatccacaccgcgctgctcacgctcaaggagggcttcgagggcgagctgtcggnggacaacatcnaggtggctgtggtgggtgaggaccgcaagttccgggtgctcacccccgctgagg

SEQ ID NO: 5146 - DNA, 497 bp, Chlorella sorokiniana
  Clone ID: LIB3602-118-Q1-K1-G8
gtgatgaagatcatgcccgtgcagaagcagacccgtgccggtcagcgcacccgcttcaaggcgtttgtggtggtgggcgactacaacggccactgcggcctgggcgtgaagtgcgccaaggaggtggcaccgccatccgcggcgccatcatcctggccaagatggccactgtgccggtgcgccgcggctactggggtaacaagatcggcaaggtgcacaccgtgcccaccaaggtcaccggcgagtgcggcagcgtgaccgtgcggctgatccccgccccccgcggtgccggcattgtggcggcccgcacccccaagaaggtgctgcagatggctggcattgaggactgctacacctgctcccgcggctccacccgcaccctgggcaactttgtgaaggccaccttctacgccctggccaacacctacggcttcctcacccccgacctctggcgcgagaccgtgttcaccaagagcccgctgcaggagtactccgac

SEQ ID NO: 5147 - DNA, 490 bp, Chlorella sorokiniana
  unsure (1)..(490): unsure at all n locations; Clone ID: LIB3602-118-Q1-K1-G9
cgcatggaggcatctggggcctgcgaggcctgcacggtggccaactgctcgatgtgcgacgatgacgctgccaagtgcaccctgcccatggagggctatcgtgtgaccgctagtggcggcaccgaggcgtgcactgtggaccgctgcggctggtgcagcgatgcgccggacaagtgcgagtcgtgtgtgactggcttcaacctggacaccaacaccaacagctgctacgcgtgccccgccaactgcgactcctgctccaacaaggacacctgcctcacctgcgctgacggcttctggcggcaaggaggcaccggcctgtgcgagaagtgccaggcggacgatacacgcacggagtgcagcccctgatgtataggagcggactgctgagcggctcaagaaacagcgacggcttangcagtcattgacgcatgcttaggtccaaaacagcagctaggtcactgacaatgtagcttacccttgctttttcgtc

SEQ ID NO: 5148 - DNA, 499 bp, Chlorella sorokiniana
  unsure (1)..(499): unsure at all n locations; Clone ID: LIB3602-118-Q1-K1-H1
cgctcgttttgtgccatggccaaccggcctccccgtcacccttaatcaaccctaacccaacccatccacctgccacccatccactcaccttccctccgccacaacctctgccacccactcaccacccatcacccngctcaacgccctccatgcanccatcctccccatccaccaaatctgccaccccaaacgcacgtccgccgctgcaccacctgccgccccctcacccgcacccatcttccacccgccacctttcctgccgctcaccgccgcacatcctacctcccacacctcactccatgtccacccttcacccgcgcttcacacagcggctgctgccatgcaaagctgctgccaaacccatccatcatgctcgcacacccactcacccacacgtncaacgtatccagacccattttcaaggcccgactgtacagtgcctttttgcgtccttatgccgatctggtaccaggacttaatgtgtaacaaatggtattgt

SEQ ID NO: 5149 - DNA, 483 bp, Chlorella sorokiniana
  unsure (1)..(483): unsure at all n locations; Clone ID: LIB3602-118-Q1-K1-H10
caggcggccggctggcggtcatcaccttccactccctggaggatcggatcgtcaagtgggccttccgccacgccgcacgcatggcgcccagcgatgaggccctgccctcctactgcctgccctttgagtctgcccaggaggaggccgcagtcaagattctgacccggaagcccatcctgccgagcgatgaggagcaagcagccaacacacgcagccgtagcgccaagctcagagttgttgagaagctgtaaggctggctggctgcaccgcgcctgctgtggcaggcaggcagctaacgcccaccagcagtacaagcttacgcagcctgcagtccaagctgcagctgcactggccagttctagcgcaaggtgtggcgccccgccccgctgctaccaggcgncgcacccacccatcttttgctcgtgtacactagcacgttttgcaagtttggtagatagcaagctttcagttactgacgtcccg

SEQ ID NO: 5150 - DNA, 306 bp, Chlorella sorokiniana
  unsure (1)..(306): unsure at all n locations; Clone ID: LIB3602-118-Q1-K1-H11
gccatgtgcagcctttgtggcagcagttggacagctgtgcagagagcagtgccaggcggcgttttcgggcccgtctgactcaattttgaggtgcctgcatgcgcaaagccctagcacagctgaacctcacaggtcgagggaaggggagaccttcccttccgcccatatcacctctccttcaaattcatccattgtgcctgcgctcatgcctatacagcacacagcagatatgatatttgctgctgtccctgaacaaacggagcgaatgcgcacaacatcccgcttgtaaatgcagtttgcccanna

SEQ ID NO: 5151 - DNA, 529 bp, Chlorella sorokiniana
  unsure (1)..(529): unsure at all n locations; Clone ID: LIB3602-118-Q1-K1-H2
gcggcatttgacagcctggcttgccttccggcccccgctgccgcggacgggggaggngcggctgcgcggcaacgacggacagcgcactggcccatgctgttccggtgcccatgcgttgctccagtgcgccacagcccagccgccctgccaagcccttcccatttgctttgtgaccttcagtagtagcacgattcctgcttttgaacccgcttgcatcgactgctctgcgctgcccctttgaccctcaccctcgttttccaacccaaatatgctaccggccactgccgcagcgctcgccattccttgcataatccctggtatgccacccaccaagccacttgcctgctaggcagcgtcgcgccgcctgtgacccaagcacactcatttgaccatccctttctgaatggaccatgagcaccccgctctgcacagcccctccccccaccctttgcacagacttttccgttgcacagccgtgcgctctatggtgggccttgcacccctnccaggaacacaatcgagcgccaca

SEQ ID NO: 5152 - DNA, 505 bp, Chlorella sorokiniana
  unsure (1)..(505): unsure at all n locations; Clone ID: LIB3602-118-Q1-K1-H3
cacgtctgcaggccgcccagacgcagagcctgctggccgacaaagcggcgctgcagcagcaggcggccaagctggagtcgctggtgtgcgcgctgcaggagcgcctcgacttcctgctgctggaggaggactcgcaggagtgggaggccagcgagggcctgcttcccgacagtgagcaggacggcagctacggttcatccgcagcccagccatccacccccagcgcaacacatgtgcatgatgcggtggcgcctgccctgcacggccgccttgatgcacttgcagcagagcggcagcagcagctttgcgcggcagctgcgcaggccacgcccagcagcagcggcgcaagcgggccgccaagcagccgcagcagcccaggccaggcaaccccagacgaataacctcaaatgaaaacgattttgcagcccctccttccttccaactgctgtttcttgttcatgcttcctatcacaccaaattttagtgttgcatcgttnannaaaaa

SEQ ID NO: 5153 - DNA, 393 bp, Chlorella sorokiniana
  unsure (1)..(393): unsure at all n locations; Clone ID: LIB3602-118-Q1-K1-H4
tcgggaggtcaatccccacccaccacaggcgcccggtcagccggaacacctggaaccagctgctggagtttgtgctgaccacggcacccgacttctccaactacgacgacagcggggcctggccctacctgattgacgagtttgtggaggagatgcgcaagcagcaggacggccagcagcgctgctaggcggaaacacgaagccgcaggcagcgcttgtgactctgccgcagacagccccctcccactcatggcccaccataggcaacccgccagatgcaccgaccaaccaatccttggaacacaaccagcctgctgtgatgtaatgctcaaatggccanccnataaaactacctgcttgcgccgacagtctgctgctgccaccgcaactgct

SEQ ID NO: 5154 - DNA, 530 bp, Chlorella sorokiniana
  unsure (1)..(530): unsure at all n locations; Clone ID: LIB3602-118-Q1-K1-H5
ggctgggacacctctggcctgtccgccgaccccgagaccttcaagaagtaccgcaccatcgaggtcatccacgcccgctgggccatgcttggcgccctgngctgcatcttccccgaggtgctggagaagacagcggcgtgcagttcggcgaggccgtgtggttcaaggctggcgcccagatcttcgctgacggcggcctgaactacctgggcaactccggcctggtgcacgcccagtccatcgtggccaccctggtggtccaggtgctgctgatgggcgccgtggagatctaccgcgccaacggcgagggccccaacggcttcggcgagggccaggacaccctgtaccccggcggcgccttcgaccccctgggcctggctgacgaccccgacaccctggctgagctgaaggtcaaggagatcaagaacggccgcctggccatgctctccatgctgggcttcttcgtgcaggccatcgtgaccggcaagggcccccctgacaaccttctgagcatttggagagcccgggag

SEQ ID NO: 5155 - DNA, 73 bp, Chlorella sorokiniana
  Clone ID: LIB3602-118-Q1-K1-H6
aaaaaaaataaaaaacaaaaaaaaaataaataataaaatgcactgtacaaaaataataaacacaaaaataaaa

SEQ ID NO: 5156 - DNA, 400 bp, Chlorella sorokiniana
  unsure (1)..(400): unsure at all n locations; Clone ID: LIB3602-118-Q1-K1-H7
gcacggcacttctttgaagctgcctaagcttggcatggcgccaagcactcaagctcccgcagccagacctgcctaccccagcgcctgagtaagccaccaagctgccgccacacatcgcctttaaacctggcccccagtcagccacagcccctccctctgtgcgcacttcctgattcatcggcagcccaaccagccccacggttgcggcctgccaccccccaaaccaaatgcactcccctcctgatgctccgcatgctgcctcttgtttgttcgtatatttgattcgttgccacctgccatacctggacactntttcagactcagcccttacgccgtaaccctgtcaacacctcancncanannanaaaannnaaaanaaaaaanaannaaanannnnana

SEQ ID NO: 5157 - DNA, 418 bp, Chlorella sorokiniana
  Clone ID: LIB3602-118-Q1-K1-H8
tgctacaccaagcgcagggaggactggctgacggagaagatgcggcagaacaacttcaccgtgtccgccatgcacggtgacatgccgcagaaggagcgcgaggcgatcatggacgagttccgcagggcgcccccgcgtgctgatcaccaccgacgtgtgggcgcgcggcctgtacgtgcagcaggtgtcgctggtcatcaactacgacctgcccaacagccgtgagctgtacatacaccgcatcggccgctccggacgcttcggtcgcaagggtgtggtcatcaactttgtgaagaacgacgacatcaagatcctgcgcgacatcgagcagtactactccacacagatcgatgagatgcccatgaacgtggccgacctgatctgaggcggctgggccgatcctcttggcggcgtgccg

SEQ ID NO: 5158 - DNA, 526 bp, Chlorella sorokiniana
  unsure (1)..(526): unsure at all n locations; Clone ID: LIB3602-118-Q1-K1-H9
gccacgctggagcgcgctctgtgcgctgtgaagggcatcggcatttggacctgccacatgcacgccatgttccacctgggtagccccgatgtgctgcccgtgggagacctgggcgtgaggaagggctgcaggcgctctacggcctcaaggagctgcccagcgccgacgccatgcaccgcattgcggagaagtggcgcccctttgccagcctgggcagctactacatgtggaaagtgccgaccgagaagaaggcaggtggcggcggcaaggccaagaaagccaagaagggctgagatcggcagatgggcgtatgcggatgcacgacatgcacacgacgcagctntgcaacacccacccagatgcattcaactgttgccagcttgtacataccagtgattctcgctactcgttgtacacctgaacgcaagtccagtctgcactacttctccgttgtttcacccaacacactggccattcgggcagcaagtctgccatctgggcagcaatggcaggcaggcggaatgtg

SEQ ID NO: 5159 - DNA, 335 bp, Chlorella sorokiniana
  Clone ID: LIB3602-120-Q1-K1-A10
gaacgagccgtccaacccggagcactactggcgctaccgcctgcacgtcagcctggagcagatccgggaggacagcgacctgcggcacctgctgtcagacatgctccaagcggcgcagcggtaccacggcgaggcgccaccatgggctgatgcatggacgccttggctgccgggcagctgacaacccatgcgtgcgccctgcctgcaagcttgccagtgtgcaaatatgcacaataggctgagcttgcatgctgaatgtgtgtgatagagagaggcactgctgtttatacaacgtgacgaaacgtgatgtgttgatgtgtgacagattggccttt

SEQ ID NO: 5160 - DNA, 319 bp, Chlorella sorokiniana
  unsure (1)..(319): unsure at all n locations; Clone ID: LIB3602-120-Q1-K1-A2
cctcagtgggaagtttgaccaggtgcgtattaacctgccaaacggtgacatggttggtcacactggtgatattgaagccacagttgtgctgcaagctgtgatgaagctgtcaagatggcttggtgctgtggacaagttgtggtattatctgtccagctgatcatgaaacgcaagatatggtagagacanactgcgagccgatctgcagagggagctcaatctactgcatccttacagcctgtgtatcgagcctgtctcacagaggaatcgtcgactcaacaccgctgcacgtgtgcacggatgactcacgtcagcctgt

SEQ ID NO: 5161 - DNA, 270 bp, Chlorella sorokiniana
  Clone ID: LIB3602-120-Q1-K1-A3
actacaccaagttcctggtggaccagaacggcgtggcccgcaagcgctacaagcccaccttcaacccggccgactttgatggggatgtggcccgcctgctggcaggcaaggagccgctgcctgccgagtgcatcgccaaccgggccgcaaggtctgcaaggtggatgcctaggcacgggctcggcccgccgccttgtggatgcctgggcatggcgggcacccctgggcacgtgccttgcagacgcggcgccacctgcagtcactacagat

SEQ ID NO: 5162 - DNA, 167 bp, Chlorella sorokiniana
  unsure (1)..(167): unsure at all n locations; Clone ID: LIB3602-120-Q1-K1-A7
gttgaggaccgnccggattactgctgggtcacccacgcgtacggatgaaacctgaaaccatagtcctgaaagcaatgcatctgttgacagacaagcgtatcatgcacattccggcgatcagcggcgccgagatgatggggatggtctgcatcggcgacatggtgcgc

SEQ ID NO: 5163 - DNA, 146 bp, Chlorella sorokiniana
  Clone ID: LIB3602-120-Q1-K1-A8
gcaccaaggccggcaccaagaagggcacccagaagcaggccaccaccaagaaggctgcccccaagaagtcttcctctggcgccagccagtggtacggccccgaccgccccaagttcctgggcccctacagcacgaacttgtgccca

SEQ ID NO: 5164 - DNA, 72 bp, Chlorella sorokiniana
  Clone ID: LIB3602-120-Q1-K1-A9
cctcggttaacttgcattcaaccaaagcaaaaaaaaaaaaaaaaaaaaaaaaagaaaaaaaaaaaaaaacag

SEQ ID NO: 5165 - DNA, 319 bp, Chlorella sorokiniana
  Clone ID: LIB3602-120-Q1-K1-B1
tgcgtagtttgtgccaccgtctaccagtctgttcagaacgccttctctatgttcggtgactttatttgactccaagctcatcactgggggggataccgtccgttctcgctggttcagattctttacctttgcctcgactagcatgcgcccatcgatcgacgccatgaacggacatgacctgaacagtcgccacttcacctttcactattaccagtcccgcccgtccgacggctgctgcacccccttcagctgtccaagctgcccccactactggggcttgcgccccttgggctgcggcgaacggtacttcggcacctgc

SEQ ID NO: 5166 - DNA, 280 bp, Chlorella sorokiniana
  Clone ID: LIB3602-120-Q1-K1-B10
cgagtgttctcttctgaatagtgttggttctgatttacaggtaattaatataaacaagggaatacgtcatcatctgtgtagccggcactcctgccacgtgcgatgcaattaatgcaggcggtatattttgctaggattatgtgcaccaaaggttcggacgacgtagtgttttgaattcttgtaaggctcctcttcaaagcccacgccgaagcacatctgagtacttcaaatttaatgtatatccatatgagcaatctaacgagttcaagaattttaattt

SEQ ID NO: 5167 - DNA, 486 bp, Chlorella sorokiniana
  unsure (1)..(486): unsure at all n locations; Clone ID: LIB3602-120-Q1-K1-B11
gctgcgccggcggcaggccgcctaccgcaccaccattgagcaggacgatgccatcattgctgacccaaccaccggcccccgtcagaccgtggccgcgcgtctgctgcgcatcgaaaagcagatcctggcgggcgccacccaggcggcgctggcgctgccgggggcggcagaggccgccgctctggggccgctgcctacggcagtcaagatggagtaacagtcttccttgctgtggtgcgaaatcatgcacaaggtttggttacctgtcagtgccgcgtgccgcgtcacccgatgtgcgggctttagcctgcccaacccagccccgtttcctttttcactgccgggctccccctgcccaccggttntattgtatcatagcagcatgcgcccttttcccccggctcgtatttcgtggcgttttcaggactctcaccccacagcacccccaccccttctctgcgataccctcagcacttgtaacgcact

SEQ ID NO: 5168 - DNA, 458 bp, Chlorella sorokiniana
  Clone ID: LIB3602-120-Q1-K1-B12
cccgctgttatgaattgctctcttcataggaggctgtcgtgcgcgctgcggacgctgtggtctgcccacactcacccttacgcacttgctgccacgctccctttcacaggaggctgtcgtgcgcgctgcggacgctgggggccgccattgaccaggcggccctggccatcttcctggcccaaaagtgcggggaggagggtccgggagccgcggcacgcaagaaagagatggaggagcggaaggcagccctaattgaggccctggccgccaagtgcggagctctgctggagctgcagactgccggcggcaaggccagcaccgcagctggtgctgacaagcccagcaccgcagccggtgccctggctgccgcgagtggtggcgaggcgccaccggcgagcggcgctgccactgcagctggggacgcgggcaccggcgcgagcgcggcgggtgatgcggcg

SEQ ID NO: 5169 - DNA, 566 bp, Chlorella sorokiniana
  Clone ID: LIB3602-120-Q1-K1-B2
cctggcatctggctgtaccctggccttgttttcagcccaaggcttgtgtgcttgcactactatccttacccttgtcattacctggcgcacgctagtggcggtgctgcagccggctgcagcccgtgcgtcctggcatctcacactgctcgcgcgcctgcgctgcgcacggcttgccatgctggcggcgccgcctgttcctcacttgatcgccccattatgtttccagtctgtcccgcctcgcatacctggcatgcattggcatatgtgttgcggccgccctgctgctagggctggccaatctgtccctaccccccggacattctcacacagacttgtacctgccccgccggcagccgcgccaggcagcgccccaccctcatgccacctccctccctgtcctgttaatgtcccggatacacttttcttccctctttctccttgatgacccgccaattcccattgatgccagagagcacacacagagtacgataccctggtgctgcatgcttgtgactgtgtcatcacgagtttacgcacggtcatgaggcgtgacacaatgacacacc

SEQ ID NO: 5170 - DNA, 549 bp, Chlorella sorokiniana
  Clone ID: LIB3602-120-Q1-K1-B3
tctttccttcaccgccacctcaccaaggaaaggaggatgtcttgctggggcggtaactgcgggtgcggcgccggctgcaaatgcggcaacggctgcggcagtgcaagatgttccccgacgtggaggccaccgccggcgccgccgccatggtcatgcccaccgcctcccacaaggggagctccggcggtttcgagacggccggtgaaaccggcggctgcgactgcaccacctgcaagtgcggcaccgcgtgcggctgctcctgctgcagctgcaactgagccggcgcccaggaagccggccggcaaaggcgatcacgaggatgaggaggacaagcaatcatcaccatcaccactcagtcactatcacgcatcgtatcatcaccagccgccgcatgcgctcgctggcgcgcgcgctgaataaaataaaaccaccgttcgtgttccgtagttctgtatgcccctgtcgcgtgtgttcgaccagtactgtccttccttgtgcctccacttctaatgaatatatggcgcctcaactttgtgaaaaaaaaaaata

SEQ ID NO: 5171 - DNA, 485 bp, Chlorella sorokiniana
  Clone ID: LIB3602-120-Q1-K1-B5
gaggaggagggcaagaaggggcttaagggggactggccattttgccaggcccagaagcctggcgtccatccgaacctgcacctggcacgtgcagaacatgatcaccggcgtgaccaagggctacgagtacaagatgcgcctgtgtacgcccatttccccatcaacatcaacatcgagaacaagggcggcaaggtggagatccgcaacttcctgggcgagaagattgtgcgcgtggtggacatgctgccgggcgtgacctgcgagcgcagcgccgccgtcaaggacgagctgatcctgaccggcaacgacatcgagctggtgtcccgcagcagcgcgctgatccaccagaagtgcctggtgaagaagaaggacatccgcaagttctggacggcatctacctcagcgagcgcggcaccctggtgaagcccgagtaagcggagcccgcacgttgcagtaaaggtggcggcacgagcgcagcagtgcgc

SEQ ID NO: 5172 - DNA, 217 bp, Chlorella sorokiniana
  Clone ID: LIB3602-120-Q1-K1-B6
actgagcgctgtcctgccgtcctgcagcagcgcacaaccggcagccctgaagagcctctggatgtagcggcggccctgcagagtctgctagtgcagccgcagtaatgagcctgtgctgtggaaccctgctgcatgttgtcgggcatgggttgtgctgcgccgacgggcctttgcagcctgaagctgctcccggttcgcatgcggcactctgaacttt

SEQ ID NO: 5173 - DNA, 487 bp, Chlorella sorokiniana
  unsure (1)..(487): unsure at all n locations; Clone ID: LIB3602-120-Q1-K1-B7
gcgggcgataagcacggctcatgggtgccgtggccgcccggaagattcacaaggggcaggctgtcccttgcaactcgcgcggcggagcgctgcccgtcgtgcgcctgtgtgtgctaactgctgcagggcctagccaccgaaacgggctgcgttccgtcacctacgacaagggcctgtgcggcggcatcaacaccgtggtgtgcaagtacactcgtgccactgtgaagacggtggccgacaccgctggtgatgatcctaacgaggagctgctggtggtcatgggcgagaagggccgctcccagctgcagcgcgacatgcgggagagcatctacgccaccattgcggacaccaacaaggtccgggtggaccttccggaggccagccagattgcggaagaactgctgaagacggagtttgacaccgngcgcatcatctacaactcgctttgtgtcggacatctcccagaagcccacgatcgccaccgtgc

SEQ ID NO: 5174 - DNA, 484 bp, Chlorella sorokiniana
  Clone ID: LIB3602-120-Q1-K1-B8
cggacgcgtgggcaagcccaagtatgcgcgcttcaccaatcacagtgcgggccgcttgcagaagcgccgcttccgcaaggcgcagtgccccatcgtggagaggctgaccaacagcctgatgatgcacggccgcaacacggcaagaagctgatggcggccagcattgtcaagcacgcgtttgacattgtcaacctgctgaccgaccagaacccggtccaggtgctcgtggacgccatcatcaacggcggcccgcgtgaagatgccacccgcattggcagcgccggtgtggtgcgccgccaggctgtggatgtgtcgccgctgcgccgcgtgaaccaggccatctggctgatcaccaccggcgcgcgcgagagcgcgttccgcaacatcaagaccattgcggagtgcctggcggacgagctgatcaacgcggccaagggcagctccaacagctacgccatcaagaagaaggacgagatcgagcgcg

SEQ ID NO: 5175 - DNA, 542 bp, Chlorella sorokiniana
  unsure (1)..(542): unsure at all n locations; Clone ID: LIB3602-120-Q1-K1-B9
gtggcttcacgcagtttgccgctgtttgccaaaaggtgctgcggcagcagccagcccctctggcccctctggccatctgcttttcacaatgaatgaagctgtcctgtacctgctgcagctgcggcagtatgcgtacctcttaccaattgacaccttccacaagtgatgcctccctccattactcttcccttgcagctctccctctgcgcatgcgaatgcaccctcctgcccaccaccaaacgagcgctcgtgcgccgctccctactcctccccacaacactcccactcatcctgctcatgccatctgcatgggtgaatgcatgtttgtgaagtgagtttgccgcgctgcaaatgccttggcacctcaagtttttctgaaacgttcccatgagcgccttgtgtgcctgcccgtccttccgttccgtgtgtgcacccgcgatgccttgccgtgtccactctcctgttcaagagcgcctgttgcgcgtgcctgcatgcccttcctgcctnctcattgcacatgcctnctccataccaccttgagt

SEQ ID NO: 5176 - DNA, 467 bp, Chlorella sorokiniana
  unsure (1)..(467): unsure at all n locations; Clone ID: LIB3602-120-Q1-K1-C1
gaattccggtcgccacgcgncgagctcgccaccagtcaacaagcagcggatcctgcggacccctggcggcaagctggtgtaccagctggccaagaagaagacctgccaccccacctgccccatctccggccagcggctcaatgggctgcccgcggtgcgcccaacagcctgcaccgcgtgaacaagagcaagaagacggtgcaccgcgcgtacggcggccacctggcggcgggcgtggtcaaggagcgcatcgtgcgcgccttcctggtggaggagcagaagatcgtgaagaaggtgctgaagctgcaggctgccaaggaggctgcgcaggccaaggccgcggcggcaggcagcaagggcaagaagaagtccaagaagtgagcggcgcacgcgagcggacagttgcgccccatgctcccgctgtaatgcaccctcgntgnanaaaaaannnnnnnnnnnnnnnnnnn

SEQ ID NO: 5177 - DNA, 396 bp, Chlorella sorokiniana
  Clone ID: LIB3602-120-Q1-K1-C10
aacattgcgcagagctggacgagacggcggataccgcgcctgatcgtccaacggtgctcgttggggccgatgtgtttgctgcaggcggttctgcacgcgcctgtcgaaagcgtgacctactgattactatgacacacgctacttgcaatctatgactcaatgccttgaagaacaccatgctaccaaacttgaaccaactggaaggcggttgtttcttctgtgatgtcacgcgcgcgcctacgagcaagagcagcggccggtgtatggatggccagctcaagctccacagccaccgccgcccagcggagcgccggccggcttcccgcccgcggctggctatgcaggtgcagccggctatccgcctgccccggggcagcaggcgtaacgaacgcagcg

SEQ ID NO: 5178 - DNA, 477 bp, Chlorella sorokiniana
  Clone ID: LIB3602-120-Q1-K1-C11
ccccatcgtggagaggctgaccaacagcctgatgatgcacggccgcaacaacggcaagaagctgatggcggccagcattgtcaagcacgcgtttgacattgtcaacctgctgaccgaccagaacccggtccaggtgctcgggacgccatcatcaacggcggcccgcgtgaggatgccacccgcattggcagcgccggtgtggtgcgccgccaggctgtggatgtgtcgccgctgcgccgcgtgaaccaggccatctggctgatcaccaccggcgcgcgcgagagcgcgttccgcaacatcaagaccattgcggagtgcctggcggacgagctgatcaacgcggccaagggcagctccaacagctacgccatcaagaagaaggacgagatcgagcgcgtggccaaggccaaccggtaaacggcttgtgcgcacccaccaaaacagcagcccgccacagccggcacccctgggcaggat

SEQ ID NO: 5179 - DNA, 295 bp, Chlorella sorokiniana
  Clone ID: LIB3602-120-Q1-K1-C12
gcttgggtggagcacagcggctggcaccatgtcgaagcgtactaagaaggtcgggatcgtcggcaagtacggcacccgctatggcgcttcgctgaggaagcagatcaagaagatcgaattgccagcactcagtctttgcacttctgcgcagttcccatgaacgccagggtggattgaaggcaagctgcaaaacccagctgcgccgacgtgctaacatggggtcggatggcgccacatcgcgctgcgagcaaccaaatagcgacggcatgagatgaacggcgcgcgcgcctcacac

SEQ ID NO: 5180 - DNA, 440 bp, Chlorella sorokiniana
  Clone ID: LIB3602-120-Q1-K1-C2
gttcggccatgggcggagctgcagagacgtgacgctgaggacatataagtcatgccggtgaggtttgagctgaacatgtggaaggcgtggggtgctgtggcgatcgctgtggcctccttctccctgtcgctctacatcatctccatctgccccgcgccgctgctgcccttcgcgtgggccttctccggcaccgccctgaccgggtggtttgtggtgggccacgactgcggccaccgctcgttctccaagaacaagctggtggaggacattgtgggcaccatcatgttcatgccgctgatctaccccttcgagccctggcggatcaagcacaacgtgcaccacgcacacaccaacaagctggtggaggacacagcctggcaccctgtggagcgcgagaagatggagaagtggagccccgcggagtctgccatctacaagct

SEQ ID NO: 5181 - DNA, 53 bp, Chlorella sorokiniana
  unsure (1)..(53): unsure at all n locations; Clone ID: LIB3602-120-Q1-K1-C3
nnggaggaagaaaaaaaaaaaaaaaaataaataggggggggacgatctagagg

SEQ ID NO: 5182 - DNA, 185 bp, Chlorella sorokiniana
  unsure (1)..(185): unsure at all n locations; Clone ID: LIB3602-120-Q1-K1-C4
gcgggcggagcaccgggaaccatggcaccggggcaagggaaaccctgtttatggtggtggttggggggggacctggtaaagagcgttggccgctggacctttactaacggctggcatgcaatctctgaaatatatatttcccannaaaaaaaaaaaaaaaaaaaaaaaaaaaaaagggngggggg

SEQ ID NO: 5183 - DNA, 304 bp, Chlorella sorokiniana
  unsure (1)..(304): unsure at all n locations; Clone ID: LIB3602-120-Q1-K1-C5
ggggcttgccgatttccccaatcaggtaccgtccaatttcaaggatcagtgttgtataggcacatacaacgaccttcgaaatcgaatattttctaaatatccagatttgttccccgagaaggtatacaccatggagaactntagatggtccttcggcattctcttctcacgtctggttcgtttagaatcaatggacggaaaggttgcactagtttcttgggcagatatgcttaaccacagccctgaggtagatgcattcctggattatgacaagtcatcgcaaggaatagtcttcaccactgat

SEQ ID NO: 5184 - DNA, 92 bp, Chlorella sorokiniana
  Clone ID: LIB3602-120-Q1-K1-C6
cttacggttatggccggcccaaaatgcaataagtttaagctggactgtccttgtccatgctgtgtcagtccctgtaaagccccgttgctgcc

SEQ ID NO: 5185 - DNA, 449 bp, Chlorella sorokiniana
  Clone ID: LIB3602-120-Q1-K1-C8
gcagcccgagacgctgcgctggaaggcgtttgagccggtgctgctgctgggcaagcagcgcttctccaacgtggacatccgcatccgcgtcaagggcggcggccaggtgtcccagatctacgccatccgccaggccattccaagggcattgtggccttctaccagaagtacgtggatgagcagagcaagaacgagatcaaggacatcctgctgacctacgaccgcacgctgctggtggccgaccctcgccgctgcgagcccaagaagttcggtggccacggtgcccgcgcgcggtttcagaaatcttacaggtgaaggctgccccgtgggacggttgggcgcctctggaggcttcttctgcgccgctggcgtggcggcagcggcgtctgcggcctaagcagctgccctggagcagcatgccctcagcgaaagcaccatgagtacacctt

SEQ ID NO: 5186 - DNA, 502 bp, Chlorella sorokiniana
  Clone ID: LIB3602-120-Q1-K1-C9
cgacatggacatggccatgtgagcctccagtggccagcgctgcagccccgggtgctgcaaccccggtgctgctgcagccgcccgtgcggcggcaggccagttggctcgccgatgtggcttcattcagcggctgtgcagcgccagcccattgatgccagctgccaaggcagggctgctgcctggcttgaagcgaggcctgggcacggccttctcttgcctgcttgaggccctgaacaccccaaccagattgtcacctgtggtgcacgtcaaaacccaatgcgctagctgctgactgtggggtgcgggcgcatagcccgctgcccgagagagctccccctcccctgaccaaacgtgaccatgcatcctttccctggcatcctttcccccccttcttttcctggcgtgtcgcccaaccgttgcccgggccgcccattctgcggctcgtggcccattcagctgctgctgcggcctgatcgcaccccatctctggcattccgggtct

SEQ ID NO: 5187 - DNA, 456 bp, Chlorella sorokiniana
  Clone ID: LIB3602-120-Q1-K1-D10
cagacaaggccgagcaggaatatttggatggtctgcgccggaatgagagcctgccgctggtgtcttggacgtgaaatcaagcagcggaaggctgggcgcatagagatggtcctgtttactgacatctcgccgcgagcagctgaaaactttaggcagctgtgcacgggggagtcaggcacggtgcccaacgagcctgggcgggagggcgcggggcgcaagcggcactttaagggagcctacttctatcgcatcattgatcagttcatcgaccagacgggcgtggaaacagagtccgtgtttggcgggcagttcaaggacgacccccgcggcctgaagctgaagcacacccgcagggggctgctgtccatggccaacatgggtcccaacacaaacaccgcccactttttcatcatgatgaaccccgccccacacctggatgggcactacaccattttt

SEQ ID NO: 5188 - DNA, 231 bp, Chlorella sorokiniana
  unsure (1)..(231): unsure at all n locations; Clone ID: LIB3602-120-Q1-K1-D11
tctggcctgcgcagctccattgccatgcgggacatcgtacatcaccggcgcacatgaggctttgaaagccagtgcaacagccatggtgcatggtaatgttcggtctgactgccgttgatgtgcaaatctgccaactgcgatggtctcgtgtaaaatgcagtactttgctgcaanactattgcnnnaaaaaanaaaaaanaaannaaaaaaaaaaaaaaaaanaaaaaataa

SEQ ID NO: 5189 - DNA, 507 bp, Chlorella sorokiniana
  unsure (1)..(507): unsure at all n locations; Clone ID: LIB3602-120-Q1-K1-D12
cccacgcgtccgctcttcgagtatggcggtttcccgccagaggccaactaccttttcctgggcgactatgtggaccgcggcaagcagagcctggaaaccatttgcctgctgctcgcgtacaagatcaaatacccggaaacttttttctgctgcgtggcaatcacgagtgtgcatccatcaataggatttacggcttctacgatgagtgcaagcggcggtacaacatcagactttggaagaccttcacagactgcttcaactgcctgccagtggcggcgcttgtggatgaaaagatcttgtgcatgcatggtggcctctcaccggagctcaagtcgttggagcagatcaagcgcattccgcgcccaactgacgtgccagacaccggtctgctatgcgactttctgtgggccgaccccgacaaggatgttcanggatggggtgagaacgaccgcggtgtcagctacacatttggccctgacagtgtgaccgaatttctgcaaaagcacg

SEQ ID NO: 5190 - DNA, 414 bp, Chlorella sorokiniana
  unsure (1)..(414): unsure at all n locations; Clone ID: LIB3602-120-Q1-K1-D3
tcggccaaggggtcggccaacgcgtccgcgccggatgcgctgtctgagatttgggagcaagagcggcaggcctggtcggtgctgctggatggctcggggctgagcgagcacatggagccgtgtattgagaacctgcaaaaccttgagacgatggcagcagaaggggaaggtgcacaacaggagcagcagcaggggcagcagggcggcgagggcacacaaggcaacaagcggcaagaagcagcagccgaccgaccagctgccagcccagaaccatcttgatgcactgtccctgtcctcctgtcatgccgacttgcgtttatggcttgtcactcagcaggctttacactggcaagagttggcgaggaatcangcaaatcaggaggaagtcagtgctaaatgaagagcatcccggtc

SEQ ID NO: 5191 - DNA, 464 bp, Chlorella sorokiniana
  unsure (1)..(464): unsure at all n locations; Clone ID: LIB3602-120-Q1-K1-D4
gtgtacaccgtgctgcggtcgccccacgtgaacaaggactcgcgcgagcagtttgaggtgcgcctgcaccagcggctggttgacgtgaaggacctgtcctcctccaccatcgacaagctcatgaccctggacctgcccgccggcgtggatgtggaggtcaagctctgagcggagtgatgcatgtttgagcgcggngagcacagcacaatgcagccacccncggcaacatgacgcacagcgggcgggatcagcggncttgctgcgctcggaccacaatcacatggggcgcccgctgcccgccacctcctttctttctagttcagtgctttgtagtttcggtgattacgccatgccttaccacttgaactgcatccaaaaaaaaaaaaaaaaaggcgcgttaagtcagtactcctgctcagatagttttggactatcatatgcggtaacgtgtgaactggtcatat

SEQ ID NO: 5192 - DNA, 360 bp, Chlorella sorokiniana
  Clone ID: LIB3602-120-Q1-K1-D5
tcggtggcactcttcaacttatggtgcaaggccaggttggtgggggccccaacttggttgtggggcagcgcctacacttggcggcgggctgacaaagcgcagttccccgtccgccccggcggtagcgcggcagcggcgcaggcggcggcaccacggtcggagggcagaagacgtggcacagggcgcttgcagcggcccggcggcggcggaggagagcagcagcagcagcagcagcagcagcagcagcagcagccggcggcagactcagcagcagcagtggagcctgcagcacccggttgatgtgctgatgagttgagcgctgcagtcccccttctttctctcagccatgtgaacacgtgt

SEQ ID NO: 5193 - DNA, 540 bp, Chlorella sorokiniana
  unsure (1)..(540): unsure at all n locations; Clone ID: LIB3602-120-Q1-K1-D7
cggagagctctcgcgagcgccgcctgaagctgattgcggctgtggagggcgatgactggagcgaggtggtccagcagcagacggcagaggctgcggttgcgggccgtggacaggagcaggaggcggctgcggcagaccctcggcgcagcagccgccggtgaccccatttgcacgggcctcagtgcaccgtgctgtgggtgagacggcagcggcagagcagcagcaggtggagatgactgtggaggcggttgaccatgcgctggacgatgtgcggccgtatttgattgccgacggcggcaacgtggaggttgtggcggtggagaatggccgcgtcttcctgcagctccagggcgcgtgcggcacgtgcgcggcctccagcgcgaccatgaagatgggcattgagcgctgcctgaaggcggcctttggcgagcagctggtggaggtgctgcangtgggcggccaagaggacaaccgcgcgacagcggagagcgtggacatgcacctcaacatgctgcgcggcgcggtggcggcgtatggtgg

SEQ ID NO: 5194 - DNA, 419 bp, Chlorella sorokiniana
  Clone ID: LIB3602-120-Q1-K1-D8
ggctcgcaagacggtgggggagcgccgcggcaccaggcgcctacagcgcgacatccgtgtggctgccagtggcggcgagaactgccctgagagcgacgaatgagcacccgagggtagcccgcttccagctgcaagccatccgcagttgcacccaagttttgcccccgaccggcactgcatatatagctccccttgcctctgtaccatgctgcccaagcttgcaacgagcctgccttgccaccttactgtttgcgaagatgccccccgtgtgcctgtgccccgtgctgcacttgaacccgccttgccaaattcatgacccgcgccgcatccaactcctctctcttgccgcctgcctcccttgtctcccaagcatttgctaactgttgcacactgactgtagagcatgtaaagtgaacatg

SEQ ID NO: 5195 - DNA, 525 bp, Chlorella sorokiniana
  unsure (1)..(525): unsure at all n locations; Clone ID: LIB3602-120-Q1-K1-D9
gttgtcatgccggccaccgcctttgcccttgctcccgccctctccctgcggcacaacaccctctctcgcgctcggcgtgccagccgcgccacgatcgctacccgcgccaccagcgaggattctgtcgtcgagaaggcaangnngagccctcaactctgccaagggaagccgtgnggcgacatgactcagaaggttaagggagaaagcctgtcccctgcnntgccgaccatgtcaaaggaggggctgcccgcgaggggtgggcactgccgtgaagggagggacgccaccaccgccaaggacaaggggtggctgatgnnccgccaccgccgccggcgattccgcaaaggccaaggcagaggccgccaagcagcgcatgtcggaggctgcggagggagctaagcaggacggcgccgncgacatgatggagcgcgccaaagagaagggcaaggacatggncaacaccgncgccgacaaggcggaggacatgattgaaaagatcccgccctaaaccaanggctatacctt

SEQ ID NO: 5196 - DNA, 565 bp, Chlorella sorokiniana
  Clone ID: LIB3602-120-Q1-K1-E1
gtcgagtgcgggggaggtcaccaatcccgtgttcacccccaaaccgaccacaatggctctgtccctcaaggtgaccgccactttcggcggcaagaccaaggctggcaccaaggccggcaccaagaagggcacccagaagcaggccaccaccaagaagggctgcccccaagaaagtcttccttctggcgccagccagtggtaccggccccgaccgccccaagttcctgggcccctacagcacgaacttcgtgcccagctacctgaccggcgagttccccggtgactacggctgggatacctctggcctgtcggccgaccccgccaccttcgctcgctaccgcgagatcgaggtcatccatgcccgctgggccatgctcggcgccctgggctgcgtcgtgcccgagctgctggacggcaccaaccacattgcctggttcaaggccggcgccgagatcttcggcgacgacggcatccagtacctgggcatccccggcctgatcaacgccaagtccatcgtggcgaccctgatcgtgcaggtggtgctcatgtcgtatgttgagggcta

SEQ ID NO: 5197 - DNA, 360 bp, Chlorella sorokiniana
  Clone ID: LIB3602-120-Q1-K1-E10
aggaaaaaaaaaaaaaaaaaaaaaaaaaaaaaaaaaaaaaaaaaaaaaaaaaaaaaaaaaaaaaacaaaaataaaaaaaaaaaaagggggaggtaaaaaaaaaaaaaaaaaataggggggcggccgttttaaaggttccaacttccttctccggtccatcgaacactaaatatctttttttttggggaaaccaaaaataaatccacgggccgcagttttacaacttgggagactggaaaaaccttggcatacccaaacttattgccctttcagcaaatccccttttggccagatggggtaaaagaaaaaagcccctccccattcgcctttgcaaacaattccccaccttgaatggaaaat

SEQ ID NO: 5198 - DNA, 271 bp, Chlorella sorokiniana
  unsure (1)..(271): unsure at all n locations; Clone ID: LIB3602-120-Q1-K1-E11
gtgtgtcgcggtgttacatcctgctacacagctggctcaacgtgctgccgcgtagctgcagacaccagctgtttaggcagcgatcttcttggagcagaagccctcgcggnnaagccgttgcggaagcggcgctgcacgttcttcaggtggcgcatgcggccggtgccggtggtcttgcggccgatggccttcacgctccagttgtacttccggatcttggccgcggggtagccgcacgagccgcaggtgctcttctggatgtggaaggagc

SEQ ID NO: 5199 - DNA, 175 bp, Chlorella sorokiniana
  unsure (1)..(175): unsure at all n locations; Clone ID: LIB3602-120-Q1-K1-E2
tcggaaagagaaaaaaaaannnaaannnnnnnanaaaaaaaaaaaaaaaaaaaaaaaaaaaaaaaaaaaaaaaaaaaaaaaaaaaaacttgggtgtaaatcgaagggggccgttttaaaggatcaaagtttacgaccgcgggcttgcactttttagctttttttatgngggccac

SEQ ID NO: 5200 - DNA, 291 bp, Chlorella sorokiniana
  unsure (1)..(291): unsure at all n locations; Clone ID: LIB3602-120-Q1-K1-E3
aaaagggaaaaaaaaaaaaaaaaannnaaaattaaaaaaaaaaaaccaaataaaaaaaaaaaaaaaaaaataaaaaaaaaaaaaatacgagtggcaaacttaaaaaaggggggtggccccccctttggcccccccctctaatatcccatcctttccaccccttaaaaccactataaaacccctttaattgcaccccctaaacaaaattaattccccgccttttcaaaaaaacccaaattttaacccccttccatccccccacttataccccatctacaaaaaccccttttt

SEQ ID NO: 5201 - DNA, 354 bp, Chlorella sorokiniana
  unsure (1)..(354): unsure at all n locations; Clone ID: LIB3602-120-Q1-K1-E4
ccgttttgaaggccggggggctgaattggaagcgccagaaggaaaccaccgacgccttcggcaacaccataagatcaaggcccccaagaaggagctgtcgcgcaaggagaagaaggccaaggccaaggccaacgccgcccgccgcgcgcgcggcgaagaggtgtctgacgacgaggatgactactgaggcggcgctttgccgctgcaaacctctcggtttctgtagcgccacgaccccaagtcactgctagccctttggaccgccttttgattgacccctccccctttgattgccaaccctgcctcccctgtaactcgaccgcatctgcttgtaagcctacacagagcananaa

SEQ ID NO: 5202 - DNA, 182 bp, Chlorella sorokiniana
  Clone ID: LIB3602-120-Q1-K1-E5
gaggggaaaaacagatttgaagctgaacttgttgcagtacccccttaataacaaaaaaaaaaaaaaaagagggcgcttgtattacggggaggcaaaaatcaatgatgccggcctgcggcgttttcactgtcctgctgtaatacctcaggcgactgccctgtctgctttttttacaacaccct

SEQ ID NO: 5203 - DNA, 576 bp, Chlorella sorokiniana
  unsure (1)..(576): unsure at all n locations; Clone ID: LIB3602-120-Q1-K1-E6
tgcgccacgccttccgnnaaaaaaaaaaaaaaaaaaaaaaaaaaaaaaaaaaaaaagaaaaatattaaaaaaaaaaaaaaaaataaaaaggagaaaaaaaaaaggaaaaaaattttaaaaaaaaaaaaggtggggggcctttttaaaggataaattttacttcccgggtgcttgcaaaaatattagtttttttataggtgaacttaatttaaattaattggcctttttttaaaaacttcgaaattgaaaaaaccttggctttaccaaatttattcgctttgaagaatatccatttttcccaagttggtttattaacaaaaaggtccgaaccattggcttttcaaaatatttgcaaattttgaatggcaattggaacgccccttgtagcggctaattaagcgcggtgggtttggtgtttacgcgaagtgtgaccgttacatttgcaagcgctttagggccggttcttttagtttttttcctttcttttttaaccacttttgcgggttttccctgtaaagttttaaatggggggttccttttagggttccaattaaatgttttacggcacttcaaccc

SEQ ID NO: 5204 - DNA, 407 bp, Chlorella sorokiniana
  Clone ID: LIB3602-120-Q1-K1-E7
cccgctcgctgccgcactgcggcgcaccatgctccttccccacaccgaccctgcaccttggccctcgtattgctgccgtccgtcgcctgccgtgccccgccagcccgcctcatggggcgctccatgcagctcacatccctggcaggctggctgagcacttaggctagacagcagctgcccgttggcctccctgcacccggttttgctcccttcttgcttccacaacccgcttgcagcaacgttgctcgtgcactgctcccagcagccggtggtgctcaacgatggggtcacccggacacccgacctccgctgttgttgtttcattccagcattgcatgcccacgttgtgttgtttccagagccagtcagcctgtggaccaggcccagcctctgtaacccaagcaagc

SEQ ID NO: 5205 - DNA, 440 bp, Chlorella sorokiniana
  Clone ID: LIB3602-120-Q1-K1-E8
cttcatcactgggctgcaggcgggctgcaggctcaagcggtgcaaagccgcgtttgggaagccacatgcgcacgccacgtgaggcgcgtgccagataaatagaaaccttggcgcgtgagccacattgctggtcctggcgcgaaggcggccggcaatccatgcattattcgtgtacccattgcctgcaaggcaggcagcagccatgtcccagcagcggctgctggactcctcatgaccaaccaccctgtacggtttcctatgcatccattttccgctgcatccattcagtcggcatcaagccttttgccgtcgccctccactcattattcggtagcgtttctgcgcacgcatctgccccagcggcaccactgtacgatttgacatgcccctgccatggccagctgcattccgtgcgactcactctgtaaacagcctcagcg

SEQ ID NO: 5206 - DNA, 383 bp, Chlorella sorokiniana
  Clone ID: LIB3602-120-Q1-K1-E9
tgcgacgtgaacgacgacatcgtcaccttcaccgattggaccgagaccgacttccgtaccggcgaggctccctggtggaactgagcgggtggcggcagcagcggctgatgaggcgcaatgttggacccccagcagcacaccccgccagcccgcagctccccactcgccgcccgttgagcggcggcggcttgtaaacccggcccagctccgcggctggctgtcctattctttgattgcagctttcgtccccttgtgggctgcgcgcggccggggcggcgggcagcgcggccccgccccctgctgcgctgcaccccgccaatcttatcatcccctaccgagaagaatcgctcaatattctaatgacactcctccgcgtgtgtaag

SEQ ID NO: 5207 - DNA, 74 bp, Chlorella sorokiniana
  Clone ID: LIB3602-120-Q1-K1-F1
cttcggggaaggagaaaaaaaaaaaaaaaaaaaaaaaaaaaaaaaaaaaaggggcggccgctataaaagggggc

SEQ ID NO: 5208 - DNA, 425 bp, Chlorella sorokiniana
  unsure (1)..(425): unsure at all n locations; Clone ID: LIB3602-120-Q1-K1-F10
agggcatcgagcccctgctgatcaccatactgaaaaagggcgcctcgccgatgctgcccgacagcatgaaggcggcgggcgtgggcgtggaggctcaccttcacccgcacctgaggagagtacaacctcaagcacgtggtcaacggctacctgtattgcaacctgtcgggactggaagcaccccgcggcagcaacgttcgctttgtactcatcggcatgggctccgaagccgacctgcacttccccgcctttgcaggacacgtgctgcgcactaagtagaccacctaccagaccgcggagctgatacccacggtggtgcatgaggtggatgtgcagctgcangcggagggccgctgggacgtgtactgacaggtgcacgaccactacacgtnctgcatgcnggcaacgctggtggtcactgatgc

SEQ ID NO: 5209 - DNA, 434 bp, Chlorella sorokiniana
  unsure (1)..(434): unsure at all n locations; Clone ID: LIB3602-120-Q1-K1-F11
cttcggcaaggtgggcatgcgctacttccacctgaacaagaacaagtaccactgccccgtgatcaacctcgacaaggtgtgggctctggtgggcgaggacgcgcgcgtggcggcggccaaggacaccgcggccgccccgtgattgacatcaccaagcacggctacttcaagctgctgggcaagggccagctgccgcagcagccggtggtggtgcgcgccaagtttgtgagcaagctggcggagaagaagatcaaggaggtcggcggcgcggtgcagctggtggcgtaagcacccccacgcccacccgcagcagcagcagcagtaccccagcagccccgattgactcctgagagcttgcccgcccacgcaaagcggccacatgcctgccggnggcgccccccggcggngccttagcgaggcgtgtaacccgcacc

SEQ ID NO: 5210 - DNA, 488 bp, Chlorella sorokiniana
  unsure (1)..(488): unsure at all n locations; Clone ID: LIB3602-120-Q1-K1-F12
gcgccaaggaggtggccaccgccatccgcggcgccatcatcctggccaagatggccactgtgccggtgcgccgcggctactggggtaacaagatcggcaaggtgcacaccgtgcccaccaaggtcaccggcgagtgcggagcgtganccgtgcggctttgatccctgccccccgcggtgccggcattgtggcggcccgcacccccaagaaggtgctgcagatggctggcattgaggactgctacacctgctcccgcggctccacccgcaccctgggcaactttgtgaaggccaccttctacgccctggccaacacctacggcttcctcacccccgacctctggcgcgagaccgtgttcaccaagagcccgctgcaggagtactccgacttcctggccaagccggtggttggcaaaggcctactgagcggnctncccatgcccgncgncccgcgcgccgnggnggcaggagcagcagcgtaacagcagc

SEQ ID NO: 5211 - DNA, 475 bp, Chlorella sorokiniana
  unsure (1)..(475): unsure at all n locations; Clone ID: LIB3602-120-Q1-K1-F2
tcgggcgagcgatgaagaacaagcaggccacacaagccagccgaagggttaagctaaaagttgttgaaaagctgtaaggctggctggctgcaccgcgcctgctgtggcaggcaggcagctaacgcccaccagcagtacaagcttagcagcctgcagtccaagctgcagctgcactggccagttttagcgcaaggggtggcgccccgccccgctgctcccagccgccgcacccacccatcttttgctcgtgtacactagcacgttttgcaagtttggtagatagcaagcttccagttcctgacgtcccgtcctgcactttgctaactgcagaggtgcaggcttgacctgcctgaccgacatttgtgctctcccttccctccatttgctgccctttcaaacgtgctctactcttgtttgtgtccctcttggccgctcgaccctcagccaactatgcaactgttgcacagngaanaaa

SEQ ID NO: 5212 - DNA, 453 bp, Chlorella sorokiniana
  unsure (1)..(453): unsure at all n locations; Clone ID: LIB3602-120-Q1-K1-F3
gcggtgcagcgccttaactaccggccggggtaccagttcccccaccaagtccaacaggcagcggatcctgcggacccctggcggcaagctggtgtaccagctggccaagaagaagacctcccaccccacctgccccatctccggcagcggctcaatgggctgcccgcggtgcgccccaacagcctgcaccgcgtgaacaagagcaagaagacggtgcaccgcgcgtacggcggccacctggcggcgggcgtggtcaaggagcgcatcgtgcgcgccttcctggtggaggagcagaagatcgtgaagaaggtgctgaagctgcaggctgccaaggaggctgcgcaggccaaggccgcggcggcaggcagcaagggcaagaagaagtcncagaagtgagcggcgcacgcgagcgggacagtgcgcnccatgctcccgctgtaatgcaccctcgat

SEQ ID NO: 5213 - DNA, 323 bp, Chlorella sorokiniana
  unsure (1)..(323): unsure at all n locations; Clone ID: LIB3602-120-Q1-K1-F5
cggaggcngctcaagccgagcgcaacgcccggttgaccccgccagcccctgtccgttgccaaggccgcaccggaccagtggctgaaggaccttataaacctagcagctctctactgagagggtgcggcagcagcctgctgccctgggcaatttgacgagagctgctctggtgccaaatgcgctcgcagccggcttgcacccgcagcccaggcgtttagtgcgcatgcagcttttgcctgagactgcgattactgctgacattttgaatgaatcccgatcatgacacctgccattccctttgctgcatgcaacactgcctannt

SEQ ID NO: 5214 - DNA, 90 bp, Chlorella sorokiniana
  unsure (1)..(90): unsure at all n locations; Clone ID: LIB3602-120-Q1-K1-F6
ggnggggaatgaantttttttttttttttttttttttttttttttttttttttttttttttttttttttttaacaagttctagaggggga

SEQ ID NO: 5215 - DNA, 68 bp, Chlorella sorokiniana
  Clone ID: LIB3602-120-Q1-K1-F7
gcgcaggagggtaaagagcaaagatgcccgcgggccagggctaccgcgcgcgtacgcgccacatgttc

SEQ ID NO: 5216 - DNA, 392 bp, Chlorella sorokiniana
  Clone ID: LIB3602-120-Q1-K1-F8
gcactgcggcgcaccctgctccttccccgcaccgacttgcactttggccctcttgctttggccgcccattgcctgccgtgccccgcccgcccgcctcatggggcgctccatgcagctcacatccccctggcaggctggtgagcgcttaggctggtcggctgctgcccgttggcctctttgctctcggttttgctccctttgcttccacaacccgcttgcagcaacgttgctcgtgcactgctcccagcagttggtggtgctcaacgatggggtcacccggacacccgacctccgctgttgttgtttcattccagcattgcatgcccacgttgtgttgtttccagagccagtcagcctgtggaccaggcccagcctctgtaacccaagcaagc

SEQ ID NO: 5217 - DNA, 326 bp, Chlorella sorokiniana
  unsure (1)..(326): unsure at all n locations; Clone ID: LIB3602-120-Q1-K1-F9
tgctgaccaacctgctccttccccgcaccgacttgcacttcggccctcttgatttaatgcgaccattgcctgacaagcgggggcccccctcgtcatggggcgctccatgcagctcacatacccctggcaagcagcagagcgctaaggctgctcggctgctgcccaacggcctctttactgtctgacacactccattcgctcccacaacccgcttgcancaacctgcctcgtgcactgctaccagcagatggcggcgctcaacgattgggtcaacacggacacccgacctccgctgttgttgctttattccagccaagcatacccac

SEQ ID NO: 5218 - DNA, 319 bp, Chlorella sorokiniana
  unsure (1)..(319): unsure at all n locations; Clone ID: LIB3602-120-Q1-K1-G1
agtgnntnncnnnncnnncacaacccaataaaaaaaaaggaacacgatctaaaggctgcaagtttacggacgcctgcatgccaagaggtggctggactgtcgtgcagctaagttcagtaactggccatgggtcacgatctactagctgcgaaaacccttgcagcacccaatttcgtacgattgggacacatgcgagtttgctcagctggggtgacagcaacgaggctganaacgatggcctttccgaactgttgccgagcatgcagggctgaagggacgctgcttgtggccgggcattcatttcagccgctgttggggg

SEQ ID NO: 5219 - DNA, 404 bp, Chlorella sorokiniana
  Clone ID: LIB3602-120-Q1-K1-G10
cggacgcgtgggcaaccatcggcattgacttcaagatcaagaaggtgctgattgacggcaagtgggtgaagctgcagatctgggacacggcgggccaggagcggttccgcaccatcaccagcgcgtactaccgcggcgcctgggcattctgctggtgtatgacgtgacggacgaggccagcttcaacaacatccgcaactggatgaagaacatcgagcagcacgccagcgataatgtggtcaaggtgctggtgggcaacaagagcgacatggatgaaagcaagcgggcggttccgtacagcagggggcaggcgctggcggacgagttcaagatgcagttctttgagacaagtgccaaggccaacacgaatgtggatgaaacgttccagtcggtggcacgggaca

SEQ ID NO: 5220 - DNA, 479 bp, Chlorella sorokiniana
  unsure (1)..(479): unsure at all n locations; Clone ID: LIB3602-120-Q1-K1-G11
cgcagaatggatccacggccagcgacgagcacatcgcaaccgcccgctggtttggtgcagcgctggcgtgtgacgccgccaccaccctgtctgtggggctgtctgagggcagccaggatgccaagcgcaacgcactgcgccannacggcctgtgctgggtggcctgcggcggcatgcacctctacaacgccggcgctggtgtgcagaagaaggaggttgcctactcgtccgctgcgctggcaggcgtgctgggggcgctgtgcctgtggcgcggcttccgcaacaacgatgacgatgccaaggagctgtgagcttcaacataatttctgacaccttttgtgtttgatgcgttgcacaactgatgggaacaatgagcangacgcccaggcatgtggagacggnggctaaagggcagttggnggatgccgagctgcagcaggaggcagctggcggacagcaaacagcctgactctgaatga

SEQ ID NO: 5221 - DNA, 481 bp, Chlorella sorokiniana
  Clone ID: LIB3602-120-Q1-K1-G12
gcgccggcgaccgcatggccattgtggagtcggtcaaggccgccagcgacatcatctcgcccgtgtctggcgagattgtggctgccaacgaggagctgtccagcgactcatccaagatcaacaccgacccctacggcgaggctggatggtcaaggtgaagctgtccaaccccgaggagctcaaggagctgatgagcgccaaggagtacgaggagttctgcgcatgagcggcagcatcctttttgccccccggaaggcatcctggtggcagtctttctctgtagttttgtaggtttggtggcctggccgaggggcgcgtcagcgccgtgtggccacgcctcatgttgtttacgttgcgggtgccgccgtggccggtccggccctgcgtgccccgcaaccctctgctttctctctgttgggtgttcctgctctcaccgcatccgcgccagttccgctgtcctgccgcactgaaccaaaacgca

SEQ ID NO: 5222 - DNA, 122 bp, Chlorella sorokiniana
  unsure (1)..(122): unsure at all n locations; Clone ID: LIB3602-120-Q1-K1-G2
aaaaggaaaaaaaaaannaaaaaacannnttaaaggaaaaaaaaaaaaaaaaaaaatacattccgagggccggccgctttaaaagatggcgggctaacttacccgagctggccaaggcttac

SEQ ID NO: 5223 - DNA, 222 bp, Chlorella sorokiniana
  unsure (1)..(222): unsure at all n locations; Clone ID: LIB3602-120-Q1-K1-G3
catgcaccctggacccaatggctttggctggtttccgtttccttgccgttccgttttttgaccgttaagtctttccgggggcttggtcgcacgcactcgagttttccccagtggggggcgcggaccatgcgcccgcccctcgagccccattttgtccttcagccactgtagattccaggcccagagtacccccactgttgtaacaattggaaacgcanaana

SEQ ID NO: 5224 - DNA, 203 bp, Chlorella sorokiniana
  unsure (1)..(203): unsure at all n locations; Clone ID: LIB3602-120-Q1-K1-G4
tcggacgggctggcccaagcccgcgagaaccttgaccttggccaaggcccgattaaaggaggctgaaaagcgcatcgacgccgacctggacgcctacatcgccaaggcgtactggactgagggccgcaacgagctgcgccgccagtgggcactcctgcgccttcgaacctgaacgcnnggtggccgacaacccttgcccaagg

SEQ ID NO: 5225 - DNA, 420 bp, Chlorella sorokiniana
  Clone ID: LIB3602-120-Q1-K1-G5
cggacgcgtgggcggacgcgtgggtgttgcggcagcaagtgcggcagcaccagccggctctcctggcaagggctcccgggcggcagcaacggcggcggcagccaagctgagcagcccgcagaagggtggagtgcagaagcgcagtctcctgccaaacctgccaaggcagcagttgttgcagtggcggcaggcgcggcagcaggtgcccccgtgcgcacatcccctcgcaagctggccctgagcttggcgatggatgaagcagccggcagcaaggccagcaaggctgcacccgcagctggcgccaacccgctggtggcggcgcgtgtggtgaagagcggcgcggcggctcaagcagctgccaagctgcgcagctcgccacgcaagcaagcgggctgctgcggtgggccgcttgtggcggtg

SEQ ID NO: 5226 - DNA, 316 bp, Chlorella sorokiniana
  Clone ID: LIB3602-120-Q1-K1-G6
ccttgttgcctatgtccgcgtcatcggcttcgacaacatgcgccaggtgcaatgcgtcagcttcattgccttcaggccaccaggctgcgaggaatccggcaaggcctaaagtgcaagttgaagtaaccgattacatgtcatgttagtcacatttgtcggcggctctgctttctcagttttacttctcgttctactcatatgtgaatatatgagcatatgtatgtaagcacttaccaatgtaggtcgaggaggatgcatatgagaattatagcaccggctatacatatacatatatattatatgcaatcaacggatt

SEQ ID NO: 5227 - DNA, 445 bp, Chlorella sorokiniana
  unsure (1)..(445): unsure at all n locations; Clone ID: LIB3602-120-Q1-K1-G7
cgctctacatcatctccatctgccccgcgccgctgctgcccttcgcgtgggccttctccggcaccgccctgaccgggtggtttgtggtgggccacgactgcggccaccgctcgttctccaagaacaagctggtggaggacagtgtgggcaccatcatgttcatgccgctgatctaccccttcgagccctggcggatcaagcacaacgtgcaccacgcacacaccaacaagctggtggaggacacagcctggcaccctgtggagcgcgagaagatggagaagtggagccccgcggagtctgccatctacaagctgttcctgggcaccccgctgaagctgtttgcctccatcggccactggtggatctggcactttgacctgagcaagtacaccgagcagcanaagccgcgcgtgctggtcagccttgcagcagtgggcctgttcat

SEQ ID NO: 5228 - DNA, 282 bp, Chlorella sorokiniana
  Clone ID: LIB3602-120-Q1-K1-G8
gcctgttcggccggcagtcgggccaggcggagggcttcagctacagcaaggccaacaaggagaaggcggtgatgtggagcgaggagacgctgtatgagtacctgctcaaccccaagaagtacatccccggcaccaagatgggttcgctggcctgaagaagcctgaggagcgcgccgacctgattgcttacatgaaggaggcctgcaagtaaacgggcccgccagcccacccgccgcacggcccaccccagcccactgaaccaagatggtgtttgctgggctg

SEQ ID NO: 5229 - DNA, 372 bp, Chlorella sorokiniana
  unsure (1)..(372): unsure at all n locations; Clone ID: LIB3602-120-Q1-K1-H1
gcgggcttgggccaataaccttacggaccagcaaaggcggacaaccaacatggggcggcggccggcgcggtgctaccgccagatcaagggcaagccctaccccaagtcgcgcttctgccgcggcgtgcccgaccccaagatccgcattatgatgtgnggcgccaagaaggcgggcgtggacttcttccctcactgcgtccacctggtcagctgggagaaggagaacatctcgtccgaggcgctggaggcggcccgcatcgcggccaacaagtacatggtgaagaacgcgggcaaggacgccttccacctgcgcgtccgtgtgcaccccttccacgtgctgcgcatcaacaagatgctttcgtgcgccggcgc

SEQ ID NO: 5230 - DNA, 307 bp, Chlorella sorokiniana
  unsure (1)..(307): unsure at all n locations; Clone ID: LIB3602-120-Q1-K1-H10
gagacatactgctgcctccgcgcacagccatggctgctggcggcactatcgatgcatatctttatggcgacaaccttgtggattcgggcaccccttcaaacatgttcccaacacgggaccgcgtgcgcttccccttcaggtggttgctgttggcaacggctacatcgacattgaccgcccgctgcccatcgagctgcgccccgcctggacgcccgtcatcgtgccgttctcgagcagcacctcggacagcgggctggagcactntaccgttcgcttcaagtgggacacgtatgatgagcatctggat

SEQ ID NO: 5231 - DNA, 374 bp, Chlorella sorokiniana
  Clone ID: LIB3602-120-Q1-K1-H11
gtgcgcatcaccacttcaccacaatccccatttcccaaagctcgaccaaagccgtgacactcctcccccacctcggcccaaaccctagccacccccgccgatcccaatggccgccgcccaccaccggcccctcacgcctcctcggcggcggcgcagtcgccgacctgctcctctggaggcggaggaacgcctccgcggcggccgtcgcgggcgccacgctcgtctggttcctcttcgagcgcgccgggtacagcctcgcgtcggtcctctccaacgccctcctcctcctcgtcgtcatcctcttcttctgggccaagtccgcctcgctgctcaacagacctcttccaccactgcctaatctagaggtctcagat

SEQ ID NO: 5232 - DNA, 375 bp, Chlorella sorokiniana
  unsure (1)..(375): unsure at all n locations; Clone ID: LIB3602-120-Q1-K1-H12
tcgcttcaacatacctgaagtcctttcggcgcccgttcctcagcgcggcttaagatagccttccattccatttgatgaagtagtggtaatatgccaatgtagtagtggcagtcagtgatgtgtataagctgaccagcaatctctnttgtnaacctgtaagctagggaatgatctatgtnaggagaacatnggctgtaccaacttgacttacttanngctagcatcgatcaattgcnnttggcgaagttattagtttggtttataaaacggcttccgtcacaaattatttcttgacggggattgagtatgtatcaagagttggcaacatgtgtattaaattgagtatgtaacaaggaaagtgaagctcttttgtcc

SEQ ID NO: 5233 - DNA, 446 bp, Chlorella sorokiniana
  Clone ID: LIB3602-120-Q1-K1-H2
gctgaacggcacgtgccggggctgggcaagccccgcggtgtgttggaagggtcgccgccgccactggccttaaaacttcaattgcactttttgggcatgggctgggccagcctcccaggccggctgctgcttggcacgcagccgggccagatcaggctgcagccagcgcagcaccccatgccgccgttgtcgcccacccttgaacgaccgctcaccgccctcgccgcctcccactgcttcccctgcaggaccccaacgcgcccaagcgccccctgtccgcctacatgttcttcgcctccgacaagcggaaggagctcaaggagtcgcagccgggtctgagcctgggcgaggtgggcaaggccacgggcgaggcgtggaaggagctgtcggacaaggagaaagccccctacgtcaagaaggccgaggccgacaagaagcggtacgag

SEQ ID NO: 5234 - DNA, 297 bp, Chlorella sorokiniana
  Clone ID: LIB3602-120-Q1-K1-H3
gacctgtacttgtcccttgccaatggagagcctgccatgtacatcaactttgaggactacgtgtcctgagcaccggcaagcccaacgagcagtttgagcagattgcgcgcctgttccgcgagcgctgcggcgcgcgctggcactggggcaaggagggctggactcggcacgcccagtgctttgacggcgccaaggagtaccccaagtggtgccacttcggctgcgcagtgcaggagctggacccaaccggcaagtttgccagtgagtgggacggctggcggttcaacgccacacgcg

SEQ ID NO: 5235 - DNA, 157 bp, Chlorella sorokiniana
  unsure (1)..(157): unsure at all n locations; Clone ID: LIB3602-120-Q1-K1-H4
tcgggaaggttggccggccgtccgcgggcaagccccgcccaggactctgtgtatcgttagcgccagcggggcagccggcgccggcgcccggtgtgtaagaccacacgtgcgncaaaaaaatggagttactgggtaagctgttattaggctgctgcgt

SEQ ID NO: 5236 - DNA, 404 bp, Chlorella sorokiniana
  unsure (1)..(404): unsure at all n locations; Clone ID: LIB3602-120-Q1-K1-H6
gtccccatccagttcaccaatgggtttgtgcccgacagagcggccaaaaagatcggcacctgcagcggctgcggcccgaatgccttgactcaagttctgncacgctgcgcaccgcccagtactgctcccgtgcatgccaggctcagcactggcgggcggngcacaaggctgagtgcgtgccggtggcggtccgcaaggatggtggcagccgcagcagctgagggttagtaacgacggcagcagggcgcctgcagccggcgggccggacagaagcgggtgcgtcaggccgacgcgaaacagacagccggttgcaagcatgtctgctagcagcgggcagccgtgtaatgcaagttggcgcacaaacgtggccgttctgcggtcagcctggccaacaaactgatgtc

SEQ ID NO: 5237 - DNA, 216 bp, Chlorella sorokiniana
  unsure (1)..(216): unsure at all n locations; Clone ID: LIB3602-120-Q1-K1-H8
cggacgcgtgggttggctcggcatcttgttacggcgagagccatggcagcctcacatcttgctgctggacagcctggcacggcatgcacatttcgcggcctgccagcctgacgcaccgctgccgccactcattcttcttgctctgccattccctttgcgcctggcatctttctgttctttgttactgctaccgatttaacgctcctgcgcanaana

SEQ ID NO: 5238 - DNA, 612 bp, Chlorella sorokiniana
  unsure (1)..(612): unsure at all n locations; Clone ID: LIB3602-076-Q6-K6-A1
ggacctggcncagcctgacaagcgcaacgccgaagccaacttcaaggctgcgctcgacaacgtcagcaacaaggtcggcggcgtggcgggagcgcagggcggcgcagaggccacccgcctcgatcccttcagccgccgcgccacccggcccatcatttactggagcactggccgcaagcaggctgaggaggctgaagcagcagcagcgcagcagggggcggcggccaacggcgacgccaacggcgcagcggcaggcgcagcggatggcgatgaggatctctctccagaggagcagaagcggcgggcgcggcggggcggcctggatctggatgcgattgtggacctgagccagctggacctgtccatactgcagcggcccgcgcgcatgccgccgctggcgaggaagctgctgggtcccacgtggcggccagcgcagccgcccccaggcgcccgcatcgtttcgctggaagagttcaagcactcgcacggctgggcgtgatcaagcggggaccanngccttgagtaggccttgatcagccgtcaaaataagcttgccgagttgcgccgtcgtgccagtgcatttcatgcctgcatgcccaaatccgaatctga

SEQ ID NO: 5239 - DNA, 166 bp, Chlorella sorokiniana
  Clone ID: LIB3602-076-Q6-K6-A10
gcgtttcgcaaaccctcaccctaccctagctggcggcgtcaccatgcgccgctcccttgctttccgtttcactgtccctttcgttcctgcgttcgtttagtggaggaggcccgcctgtgtacctgacctggtggccgcgtttttggttgagcggccttgtagccgc

SEQ ID NO: 5240 - DNA, 385 bp, Chlorella sorokiniana
  Clone ID: LIB3602-076-Q6-K6-A11
agcaccttgagcgctggcatgtttgcctccctgctgctgtgcgcatccgtgtttcttacagctgtgcacagagtgtgcgtctctgtgcaatactgttcatgtcaaaaaaaaaaaaaaaaaaaaaaaaaaaaaaaaaaaaaaaaaaaaaaaaaaaaaaaaaaataacacaatcaaacttaataagaaataatgaacccctagactgagcaccgaacagattatgcatataaataagataaaccaattgcccttgaatgtttgctcaaatagaagattgctaaaaccaacctcctttcaacagttacagattgatcaccaaaagcatgctcagcacatgcagctgtgtaatgcagaaccactctaaaaaaaaaataaaatagcagca

SEQ ID NO: 5241 - DNA, 513 bp, Chlorella sorokiniana
  Clone ID: LIB3602-076-Q6-K6-A12
ggccaacaagtactggtgatagacgcgggcaaggacgccttccacctgcgcgtccgtgtgcaccccttccacgtgctgcgcatcaacaagatgctttcgtgcgccggcgcagacaggctgcagacaggcatgcgcggtgcgttcggcaagccatttggtgtgtgcgcgcgcgtgggcatcggtcagatcctgctgtccatccgctgcaaggacacgcacgctgcggtggcggaggaggccctccgtcgtgccaagttcaagttccccgggcgccagaagatcgtggctagcaggaactggggcttcactccctacctgcgcgacgattacttggagtggaagcgtgagggccgccttgtgaacgacggtgtgaatgccaagctgcttggcaaccacggcccgctggacgcacgggagcccggccagattttcgagggtcctgcccgtctgtggcgtgtgccggtgcatgcctaacatgttgcttgggttctaaagatgtaacgaacatctgag

SEQ ID NO: 5242 - DNA, 232 bp, Chlorella sorokiniana
  Clone ID: LIB3602-076-Q6-K6-A2
ggtcgacccagcgttcgtgcatacatgaaggacccccttaccgcctgtaccccaagacacccaacccagcgcgcctgtggcacctctcggccgttgtacgccgccgcgccgcccttttttcgcatctgcatgtgcagcgcccctcccccgcagtttgttgacattaattctaggcactgcagcatccgtgccatgtttgttcgtttctaatatgtgtaaccggttctttgtc

SEQ ID NO: 5243 - DNA, 557 bp, Chlorella sorokiniana
  Clone ID: LIB3602-076-Q6-K6-A3
cccggacgaggcgccgactgtggtgggcaacgcgtcctgctgggcgctgcacatggggctgagctccaacttccgctaccaggcgctcaacggcctggacatggtgctgcagccggtggtgccgtcgggcgtgttccgaatcctgacttcggtcatccgcggagcaaacaacatgattggcgggatttcctttgtcatgattgccaaggcgctgggcgtgcagaaggccggtggtgcaaaggaggcagcatcccctgcacccggcagcaccaaggacagcaagaagaagaagaagtacgcgcctctttttcccctataactctagaaggaggggaacaaaagtagactgcccaaacgtgcactgccttgcttgctctccgcccctgcttgccgcttgcggcgggagtgccgcccccacccactttgtacttgccaccccgctttacccaacctgttcccattctttccgagtgtctgattcccgcgttctgtcggctcccgtggcactgccaatcatccagctgctgatacttttgtgaaagccgtgtgccacacaa

SEQ ID NO: 5244 - DNA, 517 bp, Chlorella sorokiniana
  Clone ID: LIB3602-076-Q6-K6-A4
ccccaatcgtggaaatcaagtaggtgcccgcccgcaccctggtggccctgtcctggcacggcaacagcccgcgcgaacccgacgtggagcggcgcacgcagcagctgcggcagctgctggagcaggcgggcctgaagcctaagcagggcggcaagacgcacgtgtggcagtatgatccgcccttccagtggggcatgctccgcacaaacgaggtgctgattgaggttgacggcgacgcggcccagagctaaacggctgcacagcgtctgggctgctggacagatcacaagcatctcccgcttgcacagcagctgcatcggcgcgcggctggcggcttggagctgtttatgtttgccagggtccgcacctttctggcacggctttctatgtacgatccaccgtgtggccattgtatttacgggctgcatctttgttgtaaactcttggcaaggcgccgaatgaaatgcagcgacagctgctgcgacttctgcgaatcgtcaagtatgtgacaagcatg

SEQ ID NO: 5245 - DNA, 610 bp, Chlorella sorokiniana
  Clone ID: LIB3602-076-Q6-K6-A5
acctgaggtcggccttggcgaacttggacggggggcgcctggcggatgcggtggagcagctgcacggcattcgcagccggatccagccgacctgggaggctgtggtggctgcggcagccagccggcaggccagcgagcggcgacaaagggctgcgcccgctgctgatgcggcggcggcggctccagcggcggcattgctgcctgctcccgctgctgccgcccagccagtggcccagccagctgcggagatggcggcgcagcagccgccgcctctgatggcccagccagctgcggagatggcggcggagcagccgccgcctctgatggcccagccagctgcggagatggcggcggagcatctgcagcagcagcagccgcaccagtacaagcctccaacgcggcgcatcccattctttaggcctgtggcacggccggcgcaccagcagcaacaggctcaccaggctcaccaggcccagcaggcgcagcagcagcagcagcagcagcatgcgcctgtgggattgcagcagctggcggtcgaggaggcgagggcggcaatggccaagcagcgggctctgatgcggcggaggcaggtgtagcagcatgtgatgtg

SEQ ID NO: 5246 - DNA, 584 bp, Chlorella sorokiniana
  Clone ID: LIB3602-076-Q6-K6-A6
gggggacgccgacactgtggcggctgacgccgcacacgtgcaagcgacagcctgccggccccagcaggggacagaagggcccgaccttgcccatgaagtggttggagacgatagcgcacaggagcacaggcgatcgcctcctgctgtaaatggacagctgacagcatcgatgggctcattacgaccctcgttcacaaactactgcattgaccagacccctgcgagacctaaatcgcggacaccagcgaagatccccatgagcaagcggtacctcaagtacctcaccaagaagtacctgaagaagcacaacgtgcgcgactggctgcgcgtgatcgcctccaacaaggaccgctccgtgtacgagctccgctacttcaacattgcggaccaggctgaggaggaggaggacgaggagtaagctgcttgtctgcacaccagcaggcgagcgccctccccgcagcaacagcgcgcggggggcggagggggtgaatgcagagcgcgggtgccctctccgtccgcaccccgtccacccgtcttgcttgcggccgcccccgcggcggcagcttgtaaggcacacctagccc

SEQ ID NO: 5247 - DNA, 72 bp, Chlorella sorokiniana
  unsure (1)..(72): unsure at all n locations; Clone ID: LIB3602-076-Q6-K6-A7
nncgtccgaaaaaaaaaaaaaaaaaaaaaaagggcggcacgatctaaaagaataccaaacttacataacaga

SEQ ID NO: 5248 - DNA, 238 bp, Chlorella sorokiniana
  Clone ID: LIB3602-076-Q6-K6-A8
cgctctgcaacgttccaggattcaagactccctgttgcacaacctgtgtgccttctgcctgtgtttacaatacaaacctggctgtgaccgccggctggcctgcgtctctgtgcctgccctgcaactcgagccatgcctgtattacctcctctgttcctgttaaacctcctctgcaaaaaaaaaaaaaaaaaaaaaaaaaaaaaaaaaaaaaaaaaaaaaagggcgaacgaatataaaa

SEQ ID NO: 5249 - DNA, 545 bp, Chlorella sorokiniana
  unsure (1)..(545): unsure at all n locations; Clone ID: LIB3602-076-Q6-K6-A9
tcgccatctccaaggcattgtggccttctaccagaagtacgtggatgagcagagcaagaacgagatcaaggacatcctgctgacctacgaccgcacgctgctggtggccgaccctcgccgctgcgagcccaagaagttcggtggccacggtgcccgcgcgcggtttcagaaatcttacaggtgaaggctgccccgtgggacggttgggcgcctctggaggcttcttctgcgccgctggcgtggcggcagcggcgtctgcggcctaggcagctgccctggagcagcatgccctcagcgaaagcaccatgagtacaccttgcgtgtgtaacaaaacgccncaatggaaacctgaagcccaactaccagaaaggcgccaacacgctggtggaagacgccaacggcgacctggtgcccgcctacatgaaaggcggcatggctactgccaagaagggggggcccattttgaagacccaagtttacggccgggggcttgcaaagaatattttttttataggcgcacaaaaatctaatccaagggccgcggt

SEQ ID NO: 5250 - DNA, 525 bp, Chlorella sorokiniana
  unsure (1)..(525): unsure at all n locations; Clone ID: LIB3602-076-Q6-K6-B1
cacaagtacccactgacgcacactaggcgctcgccatgggtctcaaggagtgatttcgacaaggctgctgaggaggccaagggctctgcccgtacaacaccagtaacgacgacaagctggcgctgtacggcctgtttaatacaggcaaccgtgggcgacatcaccaccgaccgccccggcttctttgaccccagggcaaggccaagtgggacgcatggaagaaggaggagggcaagagcaaggagcatgccatgcatgattacattgagctggtggctcagcttaaggccaagtacgccgcatagatgggctgtcgagtgcggctatggtgtgcccagcagtcagccaattgcaatttggccaatgtcagttgggccacgcagcggctgcgccttccgatagtctaatgtgttttcctatgccgcttttgctctgatattcttacagttgctgcgctgtatagcttcccgcgtttgtgagaccgagacagtnnnnnnnnnnnnnnnnnnnnnannanntaanaaa

SEQ ID NO: 5251 - DNA, 247 bp, Chlorella sorokiniana
  Clone ID: LIB3602-076-Q6-K6-B10
ggcgcggccaatggccacgcatgaagacgccttgggctcgcattgggatgtgcacccgtgaagcatgtgtggcgcgggagggcatgctgtgctcccctgccgccgcacggttgatctaatctactgtggtcgtcttatcagtcagctgctttttctctctctctctctctctctctctgccccctgtgacctgcgttgtgcccattcatttgttttgttccaagtggctatgtcatgccgcacggcg

SEQ ID NO: 5252 - DNA, 613 bp, Chlorella sorokiniana
  Clone ID: LIB3602-076-Q6-K6-B11
ggcacgtacattcgcacactatgcgtgcacctgggccttctcctgggggtggggggccacatgcaggagctgcggcgtgtgcgcagcggcatcatggggtgaaaaggacaacatgaccaccatgcatgatgtgcttgatgcacagtgggcgctggacaacctgagtgacgaggcgtaccttcgtcgtgtcatcatgccacttgagacgctgctcaccaactacaagcgggttgtggtgaaggacagcgcggtgaatgcgctatgctacggtgccaagctgatgattccaggactgctacgctacgaaaatggcatcgagctggacgaggaagtggtgctgatgaccaccaagggagaggcgattgccgtgggtattgcgcagatgacaaccagcattatggctacttgcgatcatggttgtgttgcaaaggtcaagcgagtcatcatggagcgtgacacttacccgcgcaggtggggccttggccccatggctcagaagaaaaaacagctggtggctgctgggaaactggacaagtatggccgccccaccgaggccactcccaaggaatatttgcgggcgcttgtgcaggatggaggcccacaaagcacagca

SEQ ID NO: 5253 - DNA, 203 bp, Chlorella sorokiniana
  unsure (1)..(203): unsure at all n locations; Clone ID: LIB3602-076-Q6-K6-B12
ggggngnagtggagctgcgcacgtgacgtttgcgtacccgcagcgcccagaggtgaaggtgttccgccacttcagcctgcgcgtggagtgcgggcgcacggtggcgctggtgggtgagagcggcagcggcaagtccacggtcatcggcctgattgagcggttctacgacccgctggccggccaggtgctgctggacgggcgcg

SEQ ID NO: 5254 - DNA, 503 bp, Chlorella sorokiniana
  unsure (1)..(503): unsure at all n locations; Clone ID: LIB3602-076-Q6-K6-B2
cgacacgagctgctgtacctggtagacatccacctgttcgtggagatcctgggccactactttggcaacgtgtgcgagctggacctcgtgtttggcttccacaaggtgtactgcatactggacgagttcatcatcggtttctatatccaggagacgtccaagaaggtggttgtggggcgactcaaagagctggatgcgctggaaacatgatgcggcagagctgccgcagagagggggctgggagcggagcggccgtggccctgctgcggcaggccggccaccgcttggtctggcggacatgctacgccgagaggcagtctgcgttcgagggcgctgcgcgggctctcgcatgctgatgcaggaggagggtgccgtcctgatccctgtccttcccttgcgttcccgtctgcgatctatacgtgcttgctctgnnctgnctggctgcacttgangcttactctactctcgcttggctgcngcatctgcgcntctttttgttttgt

SEQ ID NO: 5255 - DNA, 182 bp, Chlorella sorokiniana
  Clone ID: LIB3602-076-Q6-K6-B3
cgcacatggcagcctgtcggccgccctccgcgcacccgggggctgcatgcttcatgccctcaacgctgctgtgtttgctcatactcactccccactgcaacggccacgggtagggggcatcttgagccttttgtctgtgcccttttgattactttccaacaccagcctgtgcttcacatgtc

SEQ ID NO: 5256 - DNA, 381 bp, Chlorella sorokiniana
  unsure (1)..(381): unsure at all n locations; Clone ID: LIB3602-076-Q6-K6-B4
tcggttctccagctgcgttcaatctgtgcgcgggttctgccgtcccgtctcacccctgccgaccgtgctgttgtggcctaacgctgtnccaagtctctgctggccgccgtcccctccggccgtgccccagcgcccctgctcacctcccctcttgtgactgctcctccgtgcttgcggtgagtgggctcctgtcgtttagaccgcccccatgcgttcccaccactgtgccctgttttcctgtgctctcgccggccgcggggcgctctcgcttgctcgctcggggtcccatcgaagccgtccgcccgccttgcgcacgcgctgttgtgttcctgctgcgcccacggtgtgagccctttttcccgtgcctgtgctcacctcttg

SEQ ID NO: 5257 - DNA, 435 bp, Chlorella sorokiniana
  Clone ID: LIB3602-076-Q6-K6-B5
tctggtagggatgctcagccacattgttgcggttggattgcggcaccctccagcaggcttggggggcatgtcagctgagcgaccaaatggggggaggcaaggtcatgtatgacatggctccgcagaagctgaggctcgctgtgatgagtctctgtctgggccggctggtgcgacttgatgggggcgcctgcgcaagctgaatgcgctcttgtgctatctggactgggtggcttgtgctggcatcagcgctgctgacagacgaggtttgggatgccgggtggtgccactgcatgtgcgcgctcattggaattgcgctgttacatttcaaagagtcattgtggcagctggtgtctggctggggattcaagtgtttctctcttgtgcacgcaaacgcatgaacgaacgttatgcattggctgccgctctccaggttcc

SEQ ID NO: 5258 - DNA, 592 bp, Chlorella sorokiniana
  unsure (1)..(592): unsure at all n locations; Clone ID: LIB3602-076-Q6-K6-B6
tgcagagcctgcagcccgtccctgtacccagtccaggcccacctagcaccactatgcaggctgtgacgatgaaggccgcccgaccggtggcagcccgccggtccgtggtggtgcacgcctaggaggccgctgcgccagctgccgccaccaagaagccggacgtcggacccaagcgcggtactcaagtgcgcattctgccgcctgagtcctactggttccacgagaccggcaaggctgtgtctagaggaccagagcggaattcgctaccctgcgtgggtagcacttgcagaaggacacactacgccggcgtgagcaccaacaactacgcgctaaacaatgataaggaggtgaaggcgtgagcagcccctgaaggcagccctatattggtgggagtgagcacgttacattgagtagtctatcaacaaagcgagcgcgcctctatgtggaaaaaagcgcacannaaaaaaaaaaaaaaaaaaaaaaaaaaaaaaaaaaaaanaaaaaaaaaaaaaaaaaaaaaaaaaaaaaaaaaaaaaaananaaaaaaaaaaaaaaaaaaaaaaanngggggggggggcgttttaaagaaccc

SEQ ID NO: 5259 - DNA, 575 bp, Chlorella sorokiniana
  unsure (1)..(575): unsure at all n locations; Clone ID: LIB3602-076-Q6-K6-B7
ncnnntccgcgccacgtacgcaacncatcgcagtgcgctgctttcactctccgtgtaagggctcttgctcgagcacccgctctggacggctccgccaccagcacgcagcggcgtgtgcacgggcccgacgcgctctcggtgctgctgtgtcagtgctcaatcgtcgtgccttacgcccccgctggctccgcagccgcgatgcggcgctgcggtcatgtagcgtagccccactgagcctcttgtaggctcgtgcttctctgtggctggtttcgcgccaccccaacatcaaggtgcccggtttcggcggcgagtcgctgttcggcgccttccatgcctccatgctggagaacctgggcaacttcccccagggccctgctctggactccaacttctgggtgctcatgatcacttggcacatggggctctttgcttgcctgttttggggcctcatcggcgtgaacgcccgccgccagggctacttctactgagcgctgccccatttggctcccagctcggattcattgctcaaacttgccgtgtacacgccatgtgccctgttgtaacgctctacgcat

SEQ ID NO: 5260 - DNA, 517 bp, Chlorella sorokiniana
  unsure (1)..(517): unsure at all n locations; Clone ID: LIB3602-076-Q6-K6-B8
gcttgcttgcttgggttacagaggctgggcctggtccacaggctgactggctctggaaacaacacaacgtgggcatgcaatgctggaatgaaacaacaacagcggaggtcgggtgtccgggtgaccccatcgttgagcaccaccaactgctgggagcagtgcacgagcaacgttgctgcaagcgggttgtggaagcaagaagggagcaaaaccgggtgcagggaggccaacgggcagctgctgtctagcctaagtgctcagccagcctgccagggggatgtgagctgcatggagcgccccatgaggcgggctggcggggcacggcaggcgacggacggcagcaatatgagggccaaggtgcagggtcggtgtggggaaggagcatggtgcgccgcagtgcggcagcgagcggggtcaaagcaaacagggccaagggcccaggtggggggttgtgcgactgggccagggcccaggaagggagggtgcgtaccgaggcaggcggngggttctagatcgc

SEQ ID NO: 5261 - DNA, 590 bp, Chlorella sorokiniana
  Clone ID: LIB3602-076-Q6-K6-B9
ctgtagaccgccttccaggcctcttgggagctcgctcagaatgctgcgcgccgttctgcgggctggcgtctcctgcagggcctcccgcaccgtcgccagcctggcgcagcgcactgcagcggcccgccccggcctgaccgccgccgtccctgccaccgcccggccgtttgcgggcagcatggccgccaacttccgtagcggcagtgtggctgccgcggctgagtatggcaacactgatgtgaagggggccagcgagctgatccagagcggcgcatccatctatgccgacgtcaggacgcccgaagagtttgctgctggccacccgccgggggccgtcaacgtgcccgtgttcctcaagcagaacggccagatggtgcccaacccgcagttccagcagcagtttgagaaggctttccctgacaaggatgcacagctgtgcgtgggctgcctgtctgggaagcgcagcgtggccgcatgcaacatcatgggggcggctggctactccaacctgaccaacgtggaaggcggctaccaagcatggacgggagccggcctgcctgtggaggcatgaaagcatcgatggcagatta

SEQ ID NO: 5262 - DNA, 162 bp, Chlorella sorokiniana
  Clone ID: LIB3602-076-Q6-K6-C1
taaaaaaaaaaaaaaaaaaaaaaaaaaaaaaaaaaaaaaaaaaaaaaaaaaaaaaaaaaaaaaaaaaaaaaaaaaaaaaaaaaaaaaaaaaagagggggaaaattttaaaggaaaaaaaatttatataggcgtggttagtaaaaaaataatttatttttttt

SEQ ID NO: 5263 - DNA, 611 bp, Chlorella sorokiniana
  Clone ID: LIB3602-076-Q6-K6-C11
gcagttctctcgagcggcgtgatcgggacgaccagtgctgccaggacctgaaccacggcgtgctggcggtgggctcgacaacagcggcgaccacccccactcattgtgaagaactcgtggggcgacagctggggcgagcagggctacttccgcctgtctgccaagtccaaggacgaccgcggcgcgtgcggcgtgctcaccaccgcctcctaccccaccaagaagggcaccaccaaccccgaggtcccctccttctgcggctactttggctggaccgagtgccccgtgcactccacctgcacctgcaactggaacctgtttggcctgctctgcctctcctggggctgcgacgccggcgcgcagtgagcaccacgcagctaggcggatgtggcacatgccacacgctctcgactgtgccgctgctgctggcgctgcagcatccacccatgtcccaccatgcacgcacagtcagctaaagcgcatggccgatgcacctttcctgttgcaacatgcaccccacctgccgtcgagcttgcctgacacttgctactaagaccgtcagcagcagtctgatatccctttggcgtgccccctttcatcctcagtgtcct

SEQ ID NO: 5264 - DNA, 586 bp, Chlorella sorokiniana
  Clone ID: LIB3602-076-Q6-K6-C12
cggccggcggcagcgcacccacagcctggcgaccaccaagtacaccaccagcatccccacgcacgtgcgcgaccctgcggcgcgcgtggtgcccacccgcagcggcgagacggtcagtgcacagctctacatgcggcagctggacatgcacattggcaacgctaggatgcgctctgctggcgcgagcgtggagcacatccagcgccgcctggcggacaactgcggcagcaccagctctgtggacgagttccgctcctccaagctgtgccccctgtgccatgcggtgatggtgcagccgctcatgcggatcaccgacaagcagcggcgcgacctggagcggcagcacggcaagaaggtgggcaagcacgcgcgcgtgaagatgtaccaggtgtggcgctgccccaaccccacctgccgcacctggtggcagcgcgacgtgttcggcgccatcaacatcagctacctgggctgtgtgcagcagctggagcagttttatgacaacggcgtggacctgcggggcaagttctcgcgctcctacaagcctagggaggcgcggcagcagaacggcgcgcctgctgccgacgca

SEQ ID NO: 5265 - DNA, 587 bp, Chlorella sorokiniana
  Clone ID: LIB3602-076-Q6-K6-C2
atgcagaagctgggtatgaagccggtgcccggcgtgatgcgcgtgcagatccgcaagagcaagaacatcctgtttgtgatcaacaagccggacgtgtacaagagcccctcttccgacacctacgtcatctttggcgaggccaagattgaggacctgtccgcccaggcggccggcgcagcagcagagcagttccgcatggcggaggccatgggcgcggcgggtgccggccccgcgcccgcgcgcgctgccgaggctgttgaggaggaggaggaggagggcgaggaggtggacgagagcggcgtggaggccaaggacattgagctggtgatgacgcaggcgggcgtcagccgcagcaaggcggtcaaggcgctcaaaaacgccgacggcgacatcgtcagcgccatcatggagctcacgatgtgagcggggcacccggaggtgcaggcgcgccgcacggcagggcatgcctggctcgtgcgtcgtgccggcggggcggcggcggcggcgatagcgctgcgcgccacggcccgccacccttgcttcctgctggcttgattcctatgctggctctgtgacaaacgtacacg

SEQ ID NO: 5266 - DNA, 593 bp, Chlorella sorokiniana
  Clone ID: LIB3602-076-Q6-K6-C3
ttcaagctgggcaaccaagattgcacagtgcagaaggacaaccacgaacggcgtagaacctcacactgcagtcccagcgaagggcaatgaggtccacggtagatgatgatctgctgatgttgtgtctggtctcgcacaggaccggacggccctacacacaaggctctgaacctgggaaggcgtgggacgttgccagccgacaagcgtggtctgtatcgttgctgacaagcacttccagacttaggtgccggacatccatgccattggcgacgtcatccctggtccaatgctggcccacaaagcagaggaagatggtgtggcttgcgtggagctgctgacaggccgcagcggccatgtgaactatcacactgtgccgttcattgtttacacttggtacggaggcggtcagtgttgtaaaaacatagatcaggccaaggctgacggcctatcatacaagagtggacgatacggaaggcatgttcaagttcattgttgatgccaagaccgaccaaatactgcgcatacacattatggggcccaatgcaagctagctgatcatcgactgtgtgctggccattgagtattgcgcctcc

SEQ ID NO: 5267 - DNA, 385 bp, Chlorella sorokiniana
  Clone ID: LIB3602-076-Q6-K6-C4
gcgacgtgaacgacgacatcgtcaccttcaccgattggaccgagaccgacttccgtaccggcgaggctccctggtggaactgagcgggtggcggcagcagcggctgatgaggcgcaatgttggacccccagcagcacaccccgccagcccgcagctccccactcgccgcccgttgagcggcggcggcttgtaaacccggcccagctccgcggctggctgtcctattctttgattgcagctttcgtccccttgtgggctgcgcgcggccggggcggcgggcagcgcggccccgccccctgctgcgctgcaccccgccaatcttatcatcccctaccgagaagaatcgctcaatattctaatgacactcctccgcgtgtgtaagcac

SEQ ID NO: 5268 - DNA, 563 bp, Chlorella sorokiniana
  Clone ID: LIB3602-076-Q6-K6-C5
taaaaaaaaaaaaaaaaaaaaaaaaaaaaaaaaaaaaaaaaaaaaaaaaaaaaaaaaaaaaaaaaaaaaaaaaaaaaaaaaaaaaaaaaaaaaaaaaaaaaaaaaaaaaaaaaaaaaaaaggggagaccaattttaaagaatggggggtcctttttgggggccccccctttccttccccttttttgcggggcgttgagtttttttttggggcccccagttttaattcccggggccggggttaaccccgtggggcccgggaaaacccggggtttccccctttttattttctttggcccgtttccctttttacaaggcgggcttttttgccctttcccccccccgttccccttttcactacatttggccccccccttggggattggcctcccccccttggggggcgttttacccccgcgggttgtgcgtttccctcccaggggccccggcccccttccctgtccctttttcccgttttttttggttttttccctttgtttttcccccagggtcccagttttcccccttcactttaagattcggggtttccttttggggccccttt

SEQ ID NO: 5269 - DNA, 389 bp, Chlorella sorokiniana
  Clone ID: LIB3602-076-Q6-K6-C6
ttttccttgttgttctgtgatactagcgttaccacgataccggtgggtgtggtccagggctgcacaagataggccctgctgacgatgatggctcacggtgcgatgcaccgtacagtggataagatggaaacaggtgggctgtaagcatgggcaatcggcacacagcatgctaaagggctagaggcacacaaaccataaaggtgatgcatgttgcactgaaaatggctgatagattggctggaaagattaagaggaggaaatgaaagatccagatgtcttgaagggattgaatcacagtgctgtcatggccaatgctcacgccatcacacagacagctcgccttcgcctgtctccgtgcgagcactggtattgcactgtgtgagctccga

SEQ ID NO: 5270 - DNA, 605 bp, Chlorella sorokiniana
  Clone ID: LIB3602-076-Q6-K6-C7
ggagccgctggcatcgacgcaacagagccttcaagagggctctctggtgggcagcgacaacttcacgcacattctgcgtgtgctgaacaccaacgtcgatggcaagcagaagatcatgtatgcgctgaccgccatcaagggtatcggccgccgcttctccaacatctgctgcaagaaggctgaggtggacctgagcaagcgcgccggcgagctgtctgccgaggagctggagagcatcatgaccatcgtggccaacccccgcgcctacaagatccccgactggttcctgaacaggcagaaggacgtcaaggacggccgctactcgcaggtgacctcctccgcgctggacaccaagctgcgcgatgacctggagcgcctgaagaagatccggaaccaccgcggtctgcgccactactggggcctcaccgtgcgcggccagcacaccaagaccactggccgccgcggcaagaccgtgggcgtggctggcaagaagaagtaagcagcttcttgcgggcgcggcctgcggcacgggcggatgctggcggctgggtgacggcggctggcgccgcccgcgcagcaaccccactggcagagccggcggcagc

SEQ ID NO: 5271 - DNA, 538 bp, Chlorella sorokiniana
  Clone ID: LIB3602-076-Q6-K6-C8
gcaccgatgcagtttaactacagtcacagagttgctgcatactgctctcatacgccagattctggaaggccgccaaatgtcgatgtagtcccgctacactgtcggggtctacagactttcgagcttcacgcgcagccgcgacatcaagtactaatgcgagcgatttgcataggctgaggctgaggagcgcgacgcccggacacggcgcgcactggcggagttcaccagatctcgtgacgccgaccgtgcattggaaaacatggttgggctgcgcatggatcgcgctcgctgtaaagtctactacgcaaccaaaaaggtctacttgtttttggcctggcaatggacagatggtgtttactaccttagtttcaggggaagccccagcagtccccgcgaaatgagctagaggagctgagcgttttccagtcggtccttaagccgtaaccgcagcccgtcgcggcccatcttcattgacggcattcgtcacgagcgggctgatctgactccctgagagggcttactcactgatccgacggat

SEQ ID NO: 5272 - DNA, 585 bp, Chlorella sorokiniana
  Clone ID: LIB3602-076-Q6-K6-C9
gccagctggtgctgcactgccccgcgctggagcggctgtccatgcaggcctgcaaggcggtcaacgagcgcgggctggtggcgctggtgggccgcctgccggcgctgagggagctggacctgcagtactgcccgcaagtcacgcccacggtggtgcaagcgctgcgccgctcctgcccctccctgcaaagcgtgctggtcacaccccctcgcacggtgtcgcccggaccgtgaccagccagttacggaaaactggcagtattcagcggcctgccaacggccagctcagcgcacctgtgcagagcgttgctcagcccgtggggagcagctgctgtagtgtggcagcagcggcggcgccatttgctgccccggcctgctgcaccggtttgttgaaggatgagattgctcctcacccatgcggttgcctcctgaatagcgagcctcgtgtattatttagtttgggtctgctgatgctgcagcaccgcccctgtacctttttgcccgcgacacgtccctccatgctgctgcttggcatgccttttacttttttggctgctgagctatcgactttggttattattgcctt

SEQ ID NO: 5273 - DNA, 666 bp, Chlorella sorokiniana
  unsure (1)..(666): unsure at all n locations; Clone ID: LIB3602-076-Q6-K6-D1
ccgggtctgacccacgccgtctcgtgttgnnacggtgccgtcagnncgcgtccagnatggtgtggagnaggnngcgctgccnnngtaagcggnngcgactgcagnnntaagcggnntgtggaggggcttgaccgctttgggggaaacnncagccagcagccatgnngcgttcttccagncgagtgnnatgaactacctcnnctgaacgaggtgctggtcaacagncctggccaacagccgcaccttccagcggtttgccatccgcagcaacgccatgatgcaggacatggccaagaagtcggcggagcagaaggcgcagctggggcagacggcggtggagaagggcggccacttctggaaggtcttcagcgaagagctgacaaaggggatgaaggacatcaacagcaaagtgaagtgacgctgagaacgatgtggcgttgagcctgggtggctgggcagtcgacaggcagagctgctgccgtcgcattcctcatcaccccaacttgccactgccgcctcgttcttatcgcgctgttgcccctctttgatcgtgcttgcttttgtctgctccagcctccccttgcgcctcttgctcaacaaccctcacttgctcgccatgcctttgttcctttacccagtggccccaggcattcacgccttgattgt

SEQ ID NO: 5274 - DNA, 391 bp, Chlorella sorokiniana
  Clone ID: LIB3602-076-Q6-K6-D10
ctcgtctttgcgctggcctccatgtacattgcgatgctgatgaccggctggggctcgcaggcgggagaggccaagtacctgatcaacgtgggctggacgagcgtgtgggtcaaagtcgcctcgcagtgggtcaccgtcgcgctctactgctggacgctggtcgcacccgtcctcttccctgaccgcgacttcagctagggcgtggccagctgatcgctcctgcgtaccgtgcctccgtactgcgcgcgagctgtaatatcagcctgacgacttgtaccaaccgacctgcacgctgcctcctctgtgtttcattgcgggctgtgccctctgcctactaccctactatgcgccccgcggctcttgccgatctgctgtaagccaagccagcata

SEQ ID NO: 5275 - DNA, 482 bp, Chlorella sorokiniana
  unsure (1)..(482): unsure at all n locations; Clone ID: LIB3602-076-Q6-K6-D11
cgcagcggacagagcagccggtcaccatggtgcagcgcctcacctaccgccggcgtcacagctacgccaccaagtccaacaagcagcggatcctgcggacccctggcggcaagctggtgtaccagctggccaagaagaagacctcccaccccacctgccccatctccggccagcggctcaatgggctgcccgcggtgcgccccaacagcctgcaccgcgtgaacaagagcaagaagacggtgcaccgcgcgtacggcggccacctggcggcgggcgtggtcaaggagcgcatcgtgcgcgccttcctggtggaggagcagaagatcgtgaagaaggtgctgaagctgcaggctgccaaggaggctgcgcaggccaaggccgcggcggcaggcagcaagggcaagaagaagtccaagaagtgagcggcgcacgcgagcggacagttgcgccccatgctcccgctgtaatgcaccctcgntgaa

SEQ ID NO: 5276 - DNA, 325 bp, Chlorella sorokiniana
  Clone ID: LIB3602-076-Q6-K6-D12
gcgaagcaacaggcaaccatgccgggcgagcagcgcttcggcatcaagaagaagctggccaagatgccaagcagaaccggtccattcctgcttggttccggtatctcgcaccaacaacaccatccgatacaacgccaagcgccgacactggcgccgcaccaagctgggcatttaaacgccttccacgatgagcaagttacggcaatagccacgaggcgggaagcagtgcgcttgccgaacttgtaaggaagcccaatagtgacatgaacacagcttaagcttgtaacaatggcctagcaggcagacaggcttacaaacagagtga

SEQ ID NO: 5277 - DNA, 611 bp, Chlorella sorokiniana
  unsure (1)..(611): unsure at all n locations; Clone ID: LIB3602-076-Q6-K6-D2
cggacgcgtgggcggcgctggacagcctgcccgccacatttgagtggtgccgcagccgtgggctgtcgggcgggcagacggcgcagctgctggacggcattgccaaaaccaggcgggagaatgtggtgcagtttgcggccctggtgcagccggtctggcagctgttggacagccacattgcggcgtacgttgagccgctgcggcaggcgggcggcaggctgcccaagcacaccagcctggctggtgtgctgcgtggcaatgaagcagcagcgcaggcactgtgcatgccgcccggccacgtggaggcctggctggcggcggtcagtgagcaattgccggctgcagcagttggcaggctgctgctcaatctgccaaacgcggttgcaggcagccctgccacagctgcggcggcagtcagctgggcggccgatgtgctgggtgtggcagaccctgcggccttctttgtccgggcttccggcctgctggctagtgaggtgcccaccctgcagcgcaacctggacagcctgcagcaggcgcttgccttgacagccggngcagcacggcagctggtgttgaagcagccccgcatactgacctccagcccaggcaca

SEQ ID NO: 5278 - DNA, 573 bp, Chlorella sorokiniana
  Clone ID: LIB3602-076-Q6-K6-D3
cccagcgtccgatggacacgatgttcacttcgagagcgccgatgccggtgcctcgctgacctacccccagcaggccggtaccgtgcgcaagaacgcgtacatcgtgatcaagggccgcccctgcaaggtggtggatgtgtccacctccaagaccggcaagcacggccacgccaagtgcgccttcgtcgccgtcgacatcttcaccggcaagaagatggaggacctgtccccctcctcgcacaacgtggatgtgccccacgtgagccgcaccgactacacgctgctggacgtgggagatgatggcttcgtgtccctcatgactgagggcggcgacaccaaggacgacctgcagctgccctccggcaccgatgaggccgagaagctggcggtgcagatcaaggccgacttcgacgcgggcaaggagctggtggtgtccgtcatgaaggccatgggtgaggagcagatctgcgccgtgaaggttaccggccaggcctaagtgcccggctggcagccccttagcggcgtaggcgctgcggccttccggccgcggccctcgcccgcagcagcagcggc

SEQ ID NO: 5279 - DNA, 605 bp, Chlorella sorokiniana
  Clone ID: LIB3602-076-Q6-K6-D4
ctactgggacgccgcaatgggcgtgcacatcagctcgatcgtggctgggctggcaggcatcgtcggcgcttcggcgtggggcctccgccacgtgctgccgctccccgtctccgtggtgctgtggcacgtggcgggcaccggcatgctcgtagctgccgccgccacggagacgatggctgggcgtaccaccgggctgctgggcaagagtgctgatggcaccatcagcccgctcagcttctcgctgctgtggccctaccacgccggcctgcgcgccaagctggccctgcagcgccgcgtgagcaccgagcccgccttcagccagatcaccgatgactactacattggcgcctggcccagcgagcagaagctggtgcccacggtgcaccccgcggtgctggacgtgacgtgcgagctgccgctgcaggtcacgccgccggcgtacctcaacctggctgtgtgggacacgcatgcgcccactgtagcgcagattgaccagggcgtcagctgggcgctggcacagcgggcggcgggacgcaaggtgctggtgcactgcgcgcacgggcacggccgcagcgccaccgtgctggcagccatactgattgctg

SEQ ID NO: 5280 - DNA, 509 bp, Chlorella sorokiniana
  Clone ID: LIB3602-076-Q6-K6-D5
gcgccgcagggtggtggcaagacgagccccgctctgctgggcacgcagctgtttgccatcatgggctgacctgggctgctgccgtgtatgcttgccccgtgtatctgttgccctgcagtccttgctctgctttgatggttgctcccgcttctctgctgctcccccaacctctggtgttcgctttttcgctgcgctcctttctctttctccgtctctgacaagccccatcaacctgcttcatatgctacgccgctgcctgtctcagcacacccctattgccaccgcttgtgctttgtttgctcctgcacgccccgtttgccttttgcaccacccaaccacgctcccccaccatctttcgcctctggggcaactaactattggcggcaggacttgaccgttcgagttgctcgcagccttctcctcgctgatctgtgtgccaatcatcccccagcgcaaatttgattgcgaacacgtccgctcctgtccacgggcgttgtaactgaagtcac

SEQ ID NO: 5281 - DNA, 594 bp, Chlorella sorokiniana
  Clone ID: LIB3602-076-Q6-K6-D6
ggtaggtcacatgctgaacatgctggcagtctgagtgctaggcctccacgactgaacctaagcgaggtgtccaaccacctgtgtaaggcagggagagctgtgcgcgccagaatgactagaacctgcacaaagtcacccacattgatgagctcaagctccaggctataaggtatgcagtacttcaagtgcaggagtatttccacctgcgctaccctgccgtgactattactatgtaataaatgtctctggcattgagtacctgcgcgagttcctgaacctgccctaacgagatcgtgcccgacaccctcaagatgagcacgcaccaactttagcgcgagggcgctcgcacgccccgcctcttactagtcccccccgctaattcaattacctggagggctacctataccagaaggagtgcgaaaaccgtgagtacccccaagagattcgcgttggattacatcgtggtttcgccacctagtaagcttccgattactgcagcaccgaccgctgttctcaacaggtcggcagccgttacggcgaacgggacgagccctatagtgtgcgttccagctgcatgcaggctactgttacctc

SEQ ID NO: 5282 - DNA, 511 bp, Chlorella sorokiniana
  Clone ID: LIB3602-076-Q6-K6-D7
cgctgctgcgcgcaaatctggctcgcgaggggcccgctgcaggcctggtggtgctgagcgagaagatggctctggagatgctggcgggcctgcctgaaactgagttcctgctggcctccgccacccggtaatcctccgggtttctgcttgatgcacgacaactgccctggcgcgtgcagcagcacagcacggcgcggcgcagtgcagcatgctgtgagcagtgaggcgcagcaaacagcgaacggcagcctagcgctgccgcgcccagccctgctggtctggcacattgcggtgaccagtgcggggtgtacctccaacactatctgatatggtccagtcaatcagccccttctgcgcactacaattcttgcaaaccaaaccaaatgagcgacgattttgaactcaatgctcggccgtgcgcccagtgcgcctgtaccaccctccccctcctgctgctacccagtcgatttgattgaatgccagccgtcaggccctgtaaacaagccgctgg

SEQ ID NO: 5283 - DNA, 149 bp, Chlorella sorokiniana
  Clone ID: LIB3602-076-Q6-K6-D9
ctccttcccttccctcctgcacaccaaaacaccctgctgcacacgtccctgccactcgcccggcgattgatcccgggagggttgaaccctccaacccgctgcgcggttttttcccttcaatttttgcagttgtaacatgtggcagcgcc

SEQ ID NO: 5284 - DNA, 581 bp, Chlorella sorokiniana
  Clone ID: LIB3602-076-Q6-K6-E1
ccgccagctgtcttcagtctattttggagttgtggcagaccccaacctccacctggcctgggccgcggggcgctccaatgcctctctgctggaccgtgcggagcagctgctggcgcaggcggccagcttcctgccgcgcctgcgcccctggatgcccagcctgcagatgcgggcgatggagacataccagcgccggtttgaggagtcatgtgcagatgcgcgccaaggccggccagtccgccaagagcaggctccattccacgaggtgctggcagctgcgcccaagtgcgcccagtgcggcacggtggcgccccacctgcgcctctgtgcccgttgcaagtctgtcaagtactgctcccgcgcgtgccagaagcctcattggaaaagccacaaggagcaatgtgcagccttggcgcagcagcgcacggcggggcgggcttcagaggggcgcggttgagccgccgccgctgctggctggctggcacagcggctgctttgcaagcggcatcgcacagccgctgaccctgtgtagcagcgcacgggccttgcgatgtcagtgcagctttgttgcatgattccat

SEQ ID NO: 5285 - DNA, 115 bp, Chlorella sorokiniana
  Clone ID: LIB3602-076-Q6-K6-E10
taaaaaaaaaaaaaaaaaaaaaaaaaaaaaaaaaaaaaaaaaaaaaaaaaaaaaaaaaaaaaaaaaaaaaaaaaaaaaaaaaaaaaaaaaaaaaaaaaaaaaaaaaaaaggggcg

SEQ ID NO: 5286 - DNA, 454 bp, Chlorella sorokiniana
  Clone ID: LIB3602-076-Q6-K6-E11
ggcagcttcctgggctttgagtcgtccttcagggcaccggcatcagcggctaccccggcggccccttcaaccccttcggcctgggcaacagcagcaaggaggccatggatgacctgaagtggcgcgagatccgcaacggccgccttgccatggtggccttcctgggcttcctgtcccagcacgccgccaccggcaagggccccattgacaacctgattgaccacgtgtcggacccgtgggcggcgaatttctgctccaacggcgtgagcctgccctccgccttcgccaacgtgttctgagctggctagcccgaccggcggcaaacaaccctgagaagagcttcgcccacaccccaagggcaccccgattgtgttttggttctctattctcctgctacgcgttctgcacttgcacctgccgagctccccccgactggcatgtaaccctcaccggc

SEQ ID NO: 5287 - DNA, 580 bp, Chlorella sorokiniana
  unsure (1)..(580): unsure at all n locations; Clone ID: LIB3602-076-Q6-K6-E12
cagnaaccaagtcgccaaatggagaccacctttgtgatgatcaagcctgacggcgtgcagcgcaacctgattgcgcccatcctggaccgcttcctggccaagggcttcaccctgcgcggcctgaagttcatgaacgtgaccaagcagcacgcggagacccactacgccgacctctcctccaagcccttcttcggcggcctggtggagtacatcatcagcggccccgtggtggccatcgctctggagggcaaggacgtggtggcccaggcccgcaagatcatcggcgccaccaaccccctggcctccgaccccggcaccatccgcggcgcgtacgccatcgacattggccgcaacgtgatccacggctccgactctgtggagaacgcgcagaaggagctggcgctctggttctccgagggcctggtggacaacacccccgtgctgcgcggccagatctacgagtgaaccgcgcacagcaggctgtgagggcgcccaagcactgggcgcctggcagctagcagcggcaggcttgcgcccgagactcggtccggctccaaaaattgaatcgaaaaagctgact

SEQ ID NO: 5288 - DNA, 268 bp, Chlorella sorokiniana
  Clone ID: LIB3602-076-Q6-K6-E2
gctggtggcagggcaccacaacagcgcagctcagcgccgcagcgcggcgcgctgctgcaggcgacttgccctgtagactatcagttgcagagcgctgtgctgctgcctgtcgcccacgacagccctccgtctcatccagcttggcatgcaactcacccattgcccctctccccctgtgctgtctgtttccctgctcgtttgtcccagctccctgctgccctctctctgttgcccacaccatacccattctttgcaacatggcagcgca

SEQ ID NO: 5289 - DNA, 122 bp, Chlorella sorokiniana
  Clone ID: LIB3602-076-Q6-K6-E3
gctaggccatcgttacaagcttaagctgtcatcatgccactgacgggctgccttgcaagcgcggccagcgcactgcctgccgtgccggggctgctgccgtcagctgctcctcgtgggaggcg

SEQ ID NO: 5290 - DNA, 143 bp, Chlorella sorokiniana
  Clone ID: LIB3602-076-Q6-K6-E4
taaaaaaaaaaaaaaaaaaaaaaaaaaaaaaaaaaaaaaaaaaaaaaaaaaaggaaaaaaaagataaaaaaaatcaaaaaggaccaaaacttatgcaggctttaaatgttgccgtcttgtttttgctgtggcggccctttttt

SEQ ID NO: 5291 - DNA, 580 bp, Chlorella sorokiniana
  Clone ID: LIB3602-076-Q6-K6-E6
cgcgacttcaagcacctggctgtggacatgttcctgactgaggaggagggcaagaaggtgctcaaggtggactgccactttggcaagcgcaagagcctggcgtccatccgcacctgcacctcgcacgtgcagaacatgatcaccggcgtgaccaagggctacgagtacaagatgcgcctggtgtacgcccatttccccatcaacatcaacatcgagaacaagggcggcaaggtggagatccgcaacttcctgggcgagaagattgtgcgcgtggtggacatgctgccgggcgtgacctgcgagcgcagcgccgccgtcaaggacgagctgatcctgaccggcaacgacatcgagctggtgtcccgcagcagcgcgctgatccaccagaagtgcctggtgaagaagaaggacatccgcaagttcctggacggcatctacctcagcgagcgcggcaccctggtgaagcccgagtaagcggagcccgcacgttgcagtagaggtggcggcacgagcgcagcagtgcgcagcgctcacgcccgcgccggcggagcatcggcggcggcagccggccccagctgcg

SEQ ID NO: 5292 - DNA, 494 bp, Chlorella sorokiniana
  Clone ID: LIB3602-076-Q6-K6-E7
gcgcgcaccgccccaccccttcttttgcctctcctcccttgctcgcatcttctcggttcttcggatgtgtgtgcgtgtgtgcgcggtgacccccgcggcacgacttgataaccaccaaagcacaatttaatcttgcctggcacaaaaaaaaaaaaaaaaaaaaaaaaaaaaaaaaaaaaaaaaaaaaaaaaaaaaaaaaaaaaaaaaaaaaaaaaaaaaaaaaaaaaaaaaaaaaaaaaaaaaaaaaaaaaaaaaaaaaaaaaaaaatatgtgcggcctttttaggggttccatttttacatccccttgcttgcgacgttttgtttttttttttgggtcccctaatttaattaaatggcccctttttttaaaactctttacctggaaaaaccctggttttcccaaccttaatgccttaacagaaaatcccctttacacaggttgtctctttttctatggggccctctctgttttcctttttatacttttttcgc

SEQ ID NO: 5293 - DNA, 451 bp, Chlorella sorokiniana
  Clone ID: LIB3602-076-Q6-K6-E8
ttaaaaaaaaaaaaaaaaaaaaaaaaaagaaaaaaaaaaaaaaaaaaaaaaaaaaaaaaaaaaaaaaaaaaaaaaaggattaaaagatatagaggatccattttttaggaccgcctattttgcaacctcttctatccgttttttctgtgcctctcttattttagtccgttaggtcgacatttctccgccgtgggggggggggggaacccttctcggttaccccctttttgttgcccttcccacctttccccttttgcccccttcttttataggctggcgtccttcccccttcgcccttccgaccgtcctgcctgccgattgggccgcgggctgggcccttgcgttgccccttatggggggggtttttccgcgcttcctgcccggttccctttccacttgcctgcccccttttccttcctcttttttccctttttttttgctttcttgcctc

SEQ ID NO: 5294 - DNA, 382 bp, Chlorella sorokiniana
  Clone ID: LIB3602-076-Q6-K6-E9
cagccgacggggccttgtgcctgctggggcgcgcttcactgctgccatctcggctgcgatcatctccacccacgcagatcacatcatcatcttgggcctcttgactgcaagcccttcctttactgcattcaccccatctcaactgctgcagtgcacagggctggaacaaggtggagctgcacttccgctactacccccagccagaccagcacccatgcaacctggccgactcgctggccgtctgagcgcggcgccacacaccagcgctgccccttgcgctgcaatcgccgccccgggccctgggtttgcaaggcggcatgcggtgcgctgtgctcatggctggcgctgcaacctgttagctgcggctgtaacatacaggcac

SEQ ID NO: 5295 - DNA, 609 bp, Chlorella sorokiniana
  Clone ID: LIB3602-076-Q6-K6-F1
cagaaggctcggcccatcaccttacgggacagcaaaggcggacgagcaacatggggcggcggccggcgcggtgctaccgccagatcaagggcaagccctaccccaagtcgcgcttctgccgcggcgtgcccgaccccaagatccgcatttatgatgtgggcgccaagaaggcgggcgtggacttcttccctcactgcgtccacctggtcagctgggagaaggagaacatctcgtccgaggcgctggaggcggcccgcatcgcggccaacaagtacatggtgaagaacgcgggcaaggacgccttccacctgcgcgtccgtgtgcaccccttccacgtgctgcgcatcaacaagatgctttcgtgcgccggcgcagacaggctgcagacaggcatgcgcggtgcgttcggcaagccatttggtgtgtgcgcgcgcgtgggcatcggtcagatcctgctgtccatccgctgcaaggacacgcacgctgcggtggcggaggaggccctccgtcgtgccaagttcaagttccccgggcgccagaagatcgtggctagcaggaactggggcttcactccctacctgcgcgacgattacttggagtggaagcgtg

SEQ ID NO: 5296 - DNA, 605 bp, Chlorella sorokiniana
  Clone ID: LIB3602-076-Q6-K6-F10
gtgccctctcccttcgagtacgccgatgtggtgaccaccaccacccacaagagcctgcgcggcccccgcggggccatgatcttctaccgcaagggccagaagggcgtggacaagaagggcaaccccgtcatgtacgacctggagggccccatcaacttctccgtcttccccggcctccagggcggcccccacaaccacaccattagcggcctggcgtgcgcgctgaagcaggcggccacccccgagttcaaggcgtaccaggagcaggtgctgcgcaactcgcaggcgctggccaagggcctgcagagccgcggcttctccctcgtgtccggcggcaccgacaaccacattgtgctgaccgacctgcggcccaagggcgtggacggctcccgcgtggagcgcgtgctggagctggcccacattgcggccaacaagaacacggtgcccggcgatgtgagcgccatggtgcccggcggcctgcgcatgggctcccccgccctcaccagacgcggctttgtggagtccgactttgagcaggtggcggagttcgtgaacagaggcgtgcagattgcggctgagctgaagaagtccaccggccccaagct

SEQ ID NO: 5297 - DNA, 582 bp, Chlorella sorokiniana
  Clone ID: LIB3602-076-Q6-K6-F11
tcttcgtgtacatcctctgggaccccctgaacttggggaccctccctgagcggtggccggcatgggcacaggtgagcactgtgcaggcacatggctgccggctgctcaactcactccacccagggcatgcggggttgccatgctctgctgcggcgcatgatgcctattaacacgagctgcccatgcctgctggctcactgtcctgcctagctgcccgacacgccggcgcctgacctgccgcgcagtgcaaccctttgagttgggccctcaggggctggcgctaagctgttagactagactagactagtgcaacccacgtctgggcggcgccatctcatcgccaagtggcggcgctgcgctgcaccacacccgtggcctgtggcgcaagctgtgagcgctaccgcagcgctgccgcctgccccatacgtgccagcgctctgggcctggctcgctgctcggcggcccctccgatcgagcctttggctagctctgcagcatgtacattgcctgtaatgtttgcattgctactcgactttgttttcccctttctatgatcgcgcattctagcatgtgtaaccatct

SEQ ID NO: 5298 - DNA, 608 bp, Chlorella sorokiniana
  unsure (1)..(608): unsure at all n locations; Clone ID: LIB3602-076-Q6-K6-F12
tagnaaaaaaaaaaaaaaaaaaaaaaaaaaaaaaaaaaaaaaaaaaaaaaaaaaaaaaaaaaaaaaaaaaaaaaaaaaaaaaaaaaaaaaaaaaaaaaaaaaaaaaaaaaaaaaaaaaaaaaaaggggccggccggttttaaagaggaacccaaagtttaacttcccgcgtccttcgcaacggtaataacctttttttttggggggcccctaaaattaaattaactgggcggcgttttaaaaacgtggggacgggaaaaaccttggggttcccaaattaaatcgctttgaaaaaaatccccttttcgccagttgggttaataccaaaaaggcccccaccgatcgcctttccaaacatttgcccaccctaaatggcaaatggaaccccccctgtaggggcccttaaagcgcggggggtggggggtttacccccagggtaaccgttacatttgccagccccttagcccccgttcttttcgtttttttcctttcttttttcgccactttcgccggttttccccgaaaagttttaaatggggggctccttttagggtcccaattaagggtttaacggcccctgaccccaaaaaaacttgtttaggggaatgg

SEQ ID NO: 5299 - DNA, 354 bp, Chlorella sorokiniana
  Clone ID: LIB3602-076-Q6-K6-F2
gaaaaaaaaaaaaaaaaaaaaaaaataaaaaaaaaaaaaggaaaaatataaaaaaaaaaataaaaaaaaaaaagggggcgctttttgtacaacttcttccggcgctgcaagaatatttttttttggggagctggtaaatacttggcggcttttttagggctgggtggaaaaaccttgcttgccgaccttaatagcgttgtggacatcctctttcttagccggcgtaatatcgacaggacgcactgtgagttttcctacaattggctgccttcatgggtgtgagtggcgccctgcttgggcgctttaacacggccggggtgtggtttccccccacgtggtctgctccttttccct

SEQ ID NO: 5300 - DNA, 401 bp, Chlorella sorokiniana
  Clone ID: LIB3602-076-Q6-K6-F3
tcgccccgcgtcaaaaaaaaaaaaaaaaaaaaaaaaagaagagagaaaaaaaaaaagaaaaaaaagaaaaaaaaaaaaaaatgaaaaaaaaggtgggcctctgagggccggtttggttgccttcttggcctgatatgtttttgtgtcgtctggttgattgctgcccgctttgtgctgtatgcctggaaaaccctgggtcccaactttagggcttgcggggtcctctttggcagggcgtgcccaaaagtccccacttctgtttcctctgttcccccctagtgctcttgagccggccctgtcggggtgtttggcgtagctgtttggttccctagcgcgccggtccattggccgcttctagcgccggtctttatttcttctttttttcgtgcgcttgagttttc

SEQ ID NO: 5301 - DNA, 572 bp, Chlorella sorokiniana
  unsure (1)..(572): unsure at all n locations; Clone ID: LIB3602-076-Q6-K6-F4
agcgcgacgaggactgggccgccaanaaggccgctgcggcagctgaggccaagcagaagggcaaggcgcagcgcaaggagatcttcaagcgggccgaggcttatgtgaaggagtaccgcgcgcaggagctggaccgcatccggctgaagcgcgaggccaaggccaagagcggcttctatgtcgagcccgaggccaagctggtgttcgtgatccgcatccgcggtgtgaacgacatcgaccccaagaccaagaagatcctgcaggtgctgcgcctgcgccagatcaacatgggcgtcttcctcaaggtgaacaaggcgaccatgaacatgctgcagcgggtggagccctacgtggcgtacggctaccccaacctgaagaccgtcaaggagctgatctacaagcgcggctttggcaaggtcaacaagcagcgcatcccgctcaccgacaactcggtgatcgagcaggtgctgggcgacaaggacatcatctgcgtggaggacctggtgcacgagatcttcaccgtgggccccaacttcaagcaggccaacaacttnctgtggcccttcaagctg

SEQ ID NO: 5302 - DNA, 525 bp, Chlorella sorokiniana
  Clone ID: LIB3602-076-Q6-K6-F5
gccacacattgctcgttcacagctgacgtgcccgcctgcctgcctgccactgtttattttgtgtgcaggcagtggggaatctggcggccagctcgctggggatgctgcagaagccgaatcagaacgacaacagctagcgctgtatggcgtggacgactgatgctacgtgggcacagcatgctgcggctcgtgccctggcagcattacgcacccttcacacccaccacagccactgctttgcctcctgggcgagcggcctgctgacaccaggctgctgcccctgccaaacccgagccagaacgtgccctgacccagtcagccatgaatgaatgcaccccacccaccatgtgccccacaagcaggcgctttgctcccccaacctccatgttacacccttgttgctctctcctcacaatgttccctttttgctgctatattcttgggctgcaccgtgtgccctacaggccctgaatctactgtaccctcggaccgtcctgagcacctgactgtaatctgctgagcggc

SEQ ID NO: 5303 - DNA, 558 bp, Chlorella sorokiniana
  Clone ID: LIB3602-076-Q6-K6-F6
ctgtccttgtgtaccaatgaatgagcagcacaccctccgcagaatgaattcacctgctgcatcccattgcaccattgcacataattctgccgccccagccaccccccaccccgcaactcaaaagcaccactcattgttggttcggtccttttcatcagcagtgcccattcgtgcgcctccctgccgcctgctgccgccacccacattccctcccggcggggcgccagcgagtttccggcccccgaccaggctgctgtaccactcaacaccccttgtgtgccgcggcagcgggagcggcggcgactgctcccgccgccgccatgcagagagtttttcctccccctctgcccgcctctgccctcttcagtcagttacgatgtgtccgcgctattaccactgtcttccctctttcagagcactgaccctctgatcccattcaggctgcaatccttactattgatggaccttgcctcgccttgcattgcctgctccgctgccgagcgcacccacggtctattttacaggcgccgcgcagcggactgtaaaacctcgcaacgc

SEQ ID NO: 5304 - DNA, 581 bp, Chlorella sorokiniana
  Clone ID: LIB3602-076-Q6-K6-F7
cagatctgcgtgtgggacgtcaagggcaccacgcagagcaaccggcaactggcggcgctgcacatcttccaggggcacctgggggtggttgaggacgtggcgtggcacccgcggcacgccgacctgtttggcagcgtgggagacgacaagaagctgattctgtgggacctgcgcaagccggcgggcgcggcgcaggacaaggaggtggaggcgcacacggccgaggtcaactgcctggccttcaaccccttcaacgagtacatcgtggccaccggctccgcagacaagacggtggcgctgtgggacctgcgcaacatgaccagcaagctgcacctgtttgagcggcacgacgaggaggtgttccaggtgggctggagcccgcacaacgagaccatcctggcgtcgtcgggcgcggaccggcggctcatggtgtgggacctgtcgcgcatcggcgaggagcagacacccgaggacgcagaggacggcccccccgagctgctgttcatccacggcggccacaccgccaagatctccgactttgcgtggaacgggcaggacgagtgggtggtggccagcgtggc

SEQ ID NO: 5305 - DNA, 437 bp, Chlorella sorokiniana
  Clone ID: LIB3602-076-Q6-K6-F8
cgtttcagccctcttgctagacttggagagtgttacttcttttgcgtatgcacagcgccttgcgccctggtgcgggacggacaggctgatcgtgccgtacccagcccttctgccccttgccgataaaactcgtgcgcgaatgagcgttttaccatccttaccgtaccgccctttaattcatgcttttccggcactatacggctgccccattttcacaccgtatgctgccctcagcccctcaccccctgccgcagcagctatcctgccattcgtataaatcgtgggatcggtcctttgattgcttttgtcaccccatgatcctgcgctgctcacgccacactgatgtaataatgcgtgggcaaaaaaatagacagaacctgaagattcggcttgcggacgtaaatgcaacaacgtgaatgatgcagggggcggtgctg

SEQ ID NO: 5306 - DNA, 457 bp, Chlorella sorokiniana
  Clone ID: LIB3602-076-Q6-K6-F9
caaccggcaaccgcaaccctccctcgccaaaccgcatgccccgcaagccacggccgcgccctgctgcgccagcctttgcacacaacccctagccgtcagttcatgcaaccccaaccatcagccgtcgcaccgtgatacccccgttgcaccaatcctccccgccagagagcgcgctgctctcacgcccacatttcaagctaacacttgaccctgcactttttgccgcccataatcccctccgtcaatgaaacgaatgttatactgcccttctgcacccttcattttgcgcactggcacagttttgccctgatgctctcaattcgcgagcgcttcgatccgtctgtcctttgttccgtgtgagtgttccttttttccccgctcctcctaccatgtgtattcttgggtcatatgttgtaacatagagttttcaaaaaaaaaaaaaaaaaagaaagaacga

SEQ ID NO: 5307 - DNA, 595 bp, Chlorella sorokiniana
  Clone ID: LIB3602-076-Q6-K6-G1
cgggtcgcccagcgtccgctctgctggtactgtggcacagcccgcacagcagcagcagcagcacggtcggcgcagagaggagcgggacgtgctgcaagatttcgaccgggccggacaacatgcacgaggagccggtgcttgtggcccactggcggcactgagcttggcccacctgctcccgcaggcggacgaaccagcagcagccgcaactcaagcctgggcagccgcggccctgcgccaactgcagcaggcggcggcggcggtttcagaggacggcggcatgctgcatgatccagactgctttgccgacctgtatcgctgctggctggcgctgtgggcggctgcccacctgcctgcgggcgacccaagctgggcagcagacatggcagcagccgtgcagcagcttgcggcagcagccgaggcggcggcgcagggcacggtgccgcagctggcggcagcagcaacggcaacggcggcagcgtggcagctgcgcgtggacggcgatgcagcggcagcaacagacaatgcttcagccggcttgtgcttccttgtctgatctgatacgtggcctgggatgtgaatgcttggaagcaaa

SEQ ID NO: 5308 - DNA, 583 bp, Chlorella sorokiniana
  Clone ID: LIB3602-076-Q6-K6-G10
ggccgtggacgagaacaagctggagtggagcgaccccaaggccgatgtgggcctgaaggagctgcccgtcacctggtgaactcgcggctggagcagcgccaccgccatgctggctgtgcagccaccaccagacgtctcgcatgtgctgccctcccggacccgtggtgcaccggccgtgccccgggtgcatgccagctgagagcccctagcgcgcccaggcacgctgggggcagctactaaactaaacccaagccttggagcagcatagctgcccttagaccttgctggcccgctgcgttgaaactcacgggctcagtcacaatcgagcgtgttccttgcatgtcctgcaccctgcgtttgcacggtgcctggcctacgttttaactgcctctgcaccaccaaatgagcaccgcataccgcctcaagaaaatcccagccctatcagtgcactgcctctgtggcccttttgatgcattgtgagcgcccgactgtcacaacctgccgccctggctcatgaatgggcccgtgctctgtctgcccctggcggccggttcccgcaatttgatcaagaccaagcgcatgt

SEQ ID NO: 5309 - DNA, 65 bp, Chlorella sorokiniana
  Clone ID: LIB3602-076-Q6-K6-G11
aaaaaaaaaaaaaaaaaaaagaaaaaaaaaaaaactaacaaaaaaaaaaaaaaaaacaacataaa

SEQ ID NO: 5310 - DNA, 579 bp, Chlorella sorokiniana
  Clone ID: LIB3602-076-Q6-K6-G12
ttctgaaaaaaaaaaaaaaaaaaaaaaaaattaaaaaaaaaaaaaaaaaaaaaaaaaaaaaaaaaaaaaaaaaaaaaaaaaaaaaaaaaaaaaaaaaaaaaaaaaaaaaaataaaaaaaattaaaaatttatttaataaaaaataaaataaaataaaataaacatttgttggcccccctttttggtgttttggtggggggggcgccccctttccatttcttttctttttttttttgtctccgtggggcatttcctttgccctgcgtctccccctgtcggcctgggtaaccccctggctctcccccttttattttggttccccccttttcccttttttttttcccggtttagtgccatttgccccccccccttgcccttttcccctctcgggggcctttttgctggaatttgccctccccttccctcctttttttaaacgttgttttttttttttcccccccctcgggttcctcttcccttttttgggcccaggggcccctttttttttctttttttctctcctttaggggccttgggcgccgtttttccgcttaggttttttgtcgggggctttttttt

SEQ ID NO: 5311 - DNA, 217 bp, Chlorella sorokiniana
  Clone ID: LIB3602-076-Q6-K6-G2
ggcgtgcaaagtgcagacagttggcagacaccggcacaatgagcatggctggtcaacatggcgcctaactaccgcacaactgcaagtgcatttttggtcgtcccacctacatagcgtggagttctgtttccctttttgagttttggtttacttgagcagcgctgtgtagataactttggcaagctcgttggccgtctcaagatgtaacatgtcgcgc

SEQ ID NO: 5312 - DNA, 577 bp, Chlorella sorokiniana
  Clone ID: LIB3602-076-Q6-K6-G3
gtgctggactacgagcactggccctacgcccccctgcccctggttcagggcggccaggccacctacttcggtgcctctgtgcccttcgacctgggcaccctggctgccattgagttcgctgccatggccggcgctgagtccttccgcggcgctgctgagcccgagaagcgcgtctaccccggcggcgccttcgaccccatgggcatgtccaagggcaacctggatgagctgaagaccaaggagatcaagaacggccgcctcgccatgctggcctgcctgggcttcgctgcccagcacgccgccaccggcgccagcccgctggaggccctggcctcccacctggccaaccccatggccgtcaactttgccaccaacggcgtgtccctgcccctggcgtaagcgcgcccctgtagcagcggctgtacccagcacccgcggcgcatcagcagacgggtggcccatgtgtggcctggttgactctgcccgtgtggtctgtacgcttgatcctataagctctcctgttgctcattgctcctgactgcacacccgagaagattcaatcaacccctcctgctac

SEQ ID NO: 5313 - DNA, 550 bp, Chlorella sorokiniana
  Clone ID: LIB3602-076-Q6-K6-G4
ggccggcaaaagcttcagcggtcagtaaccatggctgcacgaccgctcccaagacgagaaggacgtccctgcggacaagttcatcgaggccttctccgcctacctgaagcagaccaacaaggtccagctgccgcagtatgtggactacgtgaagaccggctctttcaaggagctgtcttccctggaccccgactggtactacgtccgcgccgccgcaattgcgcgccgcgtgtacatcaaccagggcatggttgtgggcgcgttccgccgcgccttcggcggccgctccaacgccaacggctcggtgacccctgagcaccacgccaaggtggtgatggggcatcatccgtcacgcactgcagcagctggaggcgatgggcctggtggagaagaaccccgctgtccagggctgccgtcgtatcattcccgagggccagcgccagatggacctggtggccggcggtgtgaccgtgacccgcttccactacctgggctgagcagcgcgccgatggcgggccgccgcacagtcgaagcgcgcggtctgagcgcg

SEQ ID NO: 5314 - DNA, 590 bp, Chlorella sorokiniana
  Clone ID: LIB3602-076-Q6-K6-G5
ggagttcaggggggcgccaagcgcatcctggtggccaccgacctggtggggcgcggcatcgacattgagcgcgtcaacatcgtcatcaactacgacatgcccgagacggacgagaagcacggcaatggcgcagacacatacctgcatcgcgtcggccgcgccggccgcttcggcaccaagggcctggccatcacgtttgtggcctcccccgccgactcggaggtgctcaaccaggtccaggagcggtttgacgtggacatcaagcctctgccagagcacattgacgccagcacctacatgaacgcggcatgaggcggcgccgcaaacctgcggctggtctggccgcctaggccacgcacgccctgctccgctcgcccaccggcggagcgtagccagccgagatgtacccggcgctgttttgaccgcgagcgggcccgcctgccctgccctgcatgacctctgctttctgttttatcatccccccgctcctcctttgctgcttgcttggctttgtctcctcgctctcgtcctcccgtcgccttccatacgttgcatgaccatcgcccgtccctccagggcgccccactccc

SEQ ID NO: 5315 - DNA, 579 bp, Chlorella sorokiniana
  Clone ID: LIB3602-076-Q6-K6-G6
cggacgcgtggggcgccagctgctgcgcctgcggcaccggcctccgggcagttctgtcaccagccgcagcacagtcagcaggctcagcaagcccaggcctcctcccagcccacaggcgcccgggccagctcgcaaggcacccctgccccactggcggagccgcagcagctagttctgctgcagcagctgcagcagcttgagcagcaactcaacccattgcagcagcaacaacagccgcagcaagatgtgccgcagcagcaggcagcaagccctggttcgcttccgctccagcggcacccaaccgctatgcaggactggtctggcaggcaggctgggcgcaagcggcagcacagcgagctggcgcgtgaggcagaggcagcggaagcagcagcggccacggcagcagcggtggtgccaccggatgaagagctcctagcggaggggcaagccgggccggcggcggcagcgcagcagttgggacaggcaggtccactggcagttgagcaggatgaggtgccgccgtcgacgccgcagcagcagcctgatgcactcgcgccttgaccgcgtgtgccaatcccc

SEQ ID NO: 5316 - DNA, 595 bp, Chlorella sorokiniana
  Clone ID: LIB3602-076-Q6-K6-G7
ggccaacgcgccctgtggctaccaccgccgcaggcagacacgagccaccgacattcctggtatctgtgtagctgcgcagcgctgtagctataggcctacgcactacaaagatctcaaggtgaagcgcatcacaccgctgcattggtagctggtcatccgcatctaatacacagctggaccctcgtgatagaggccatgatatgcggcgtcgggcggagcctgcacatacagggttatctcatgaacaccgattgcttgatggatgattgcccgttgttgcttcctttgttaggacctcgcctatgattagagcggccatgcttagccgctggtactgtagttgcccgtcggtggcactgaaacagcaatgccgcactgaatgaaacctgcaactgatgcggccttgctggttttccaagtgcgatgagtggacttaatccacagcgggaaagctaaagttagttgaaccgaaacgagtcttgtctgaacatgatgtgtctctgctctcaagaccaaacctctttgtaaattgtgtaggcatcgccgttaattgcgcagcttcttaacttgccccagcctatgctactcagccctt

SEQ ID NO: 5317 - DNA, 545 bp, Chlorella sorokiniana
  Clone ID: LIB3602-076-Q6-K6-G9
gcaagcggcttccatcgcttgagtaggcggcaaagggcaccaagatgccgtcgattgcgtactaccgcaactacggcaagaccttcaagaagccgcggcgccccttcgagaaggagcggctggatgcggagctgaagattgtgggcgagtttggcctgcgcaacaagcgcgagctgtggcgcgtgcagatggtgctgtccaagctgcgcgcccgtgcccgtgacctgctgaccctggacgagaaggaccccaagcgcctgtttgagggtgaggccctgctgcgccgcatgtaccgctacggcttcctggacgagagccagaacaagctggattacgtgctggcgctgacgccccaggacgtgctggagcgccgcctgcagaccctggtgttcaagctgggcctggccaagagcatccaccacgcgcgcgtgctgatccgccagcgccacatccgcgtgggcaagcagattgtgaacatcccctccttcatggtccgcgtggacagccagaagcacattgactttgcgctcaactcgcccttcggc

SEQ ID NO: 5318 - DNA, 412 bp, Chlorella sorokiniana
  Clone ID: LIB3602-076-Q6-K6-H1
cacgtttgtggcctcccccgccgactcggaggtgctcaaccaggtccaggagcggtttgacgtggacatcaagcctctgccagagcacattgacgccagcacctacatgaacgcggcatgaggcggcgccgcaaacctgcggctggtctggccgcctaggccacgcacgccctgctccgctcgcccaccggcggagcgtagccagccgagatgtacccggcgctgttttgaccgtgagcgggcccgcctgccctgccctgcatgacctctgctttctgttttatcatccccccgctcctcctttgctgcttgcttggctttgtctcctcgctctcgtcctcccgtcgccttccatacgttgcatgaccatcgcccgtccctccagggcgccccactccctttcctcgaatgt

SEQ ID NO: 5319 - DNA, 508 bp, Chlorella sorokiniana
  unsure (1)..(508): unsure at all n locations; Clone ID: LIB3602-076-Q6-K6-H10
tcgcggncgcgtggggtacggcatcaaccacatcacgcagctggtggagagcggcaaggcgcattgcgtggtgattgcgcacgacgtggaccccattgagattgtggtgtggctgcccgcgctgtgcaagaagatgggcgtgccctactgcatcgtcaagggcaaggcgcggctgggcgcggtggtgcacaagaagacggccaccgcgctggcgctgacggcggtgaagaacgaggaccagcgcgagttcgccaagctggttgagtccttcaagaccatgtacaacgacggcccccgcgtcagctgtggcggcggcatcatgggccccaagagcaggcggcccagaagaagaacgagcgggctctggccaaggacgccggcctccgcttgtaatcggtcagctcccttctgccgctcaccgcgcgcctgtccgggacagcccgtacagcagggtctgcgtgccgcgcgtgggctcgggcgcctgccgggtgttgaccgccgattgctc

SEQ ID NO: 5320 - DNA, 582 bp, Chlorella sorokiniana
  Clone ID: LIB3602-076-Q6-K6-H11
ctgctcagtaacgacagccggcacagccgccctttacgctcgcccagaggcgtcacagctgattgcggtcgacggcaggcagcgggagggctcgcaagcggagtgatccaccatgcaggacagcctgcccttcctggcggcgccgcacgatgcgctgcggcaggggctggtgacgctcaaggacggcgcggcagtgagccaccccgtggagcagatacagcagctggcggggccggcgggggagcagtcgcgggcggagatgctgcgcaacgtgtacggctccgccctgccggcgcgcatgcagatcgagaagcaaattctggacaggcacgagcggctgccgggcctgccctcctccaagctgggcctggaggcgatgacgggcgcgctggaggactttggctttgagagctacctgggcctgccgcaggacagcgagacgccgcagccagacctgcactcgcagatggagcagcggctgggcctggccagcggcaccaagcccatggcgcgcggcctgcccatgtgaagcagccacgctgtgccatgccctgtacattacttagctcagcctgctctgta

SEQ ID NO: 5321 - DNA, 242 bp, Chlorella sorokiniana
  unsure (1)..(242): unsure at all n locations; Clone ID: LIB3602-076-Q6-K6-H12
tccggctggnccgcaggnctggctcgcgctgtgcgctgtgcacagcgacgcctggctctactccctcgccttcttctacgccgcccgctttgacgccgacggccgcgccgagctgttctcgctcctcaaccagcaccccacggtgtacgaggtggtgaccgggcgcgtggcgcgcaacaagagtacaagcgcaaggtgcccaagcagcagaccgcggcggcgcaggcgggcatcgccaacca

SEQ ID NO: 5322 - DNA, 551 bp, Chlorella sorokiniana
  unsure (1)..(551): unsure at all n locations; Clone ID: LIB3602-076-Q6-K6-H2
canccgtggccccgccgccaaccctcgagaaggagacatcatcgatgtgcccctggcctggaagctgctgtgggagggctttggctggcccctgcgcgccttcgccgagtacaagaacggcagcctgatggaggacgacgccaagatcaccgtctccccccggtaaattggcagcccttgtagcggcgccgcgcccatttgtgcgcgcgccagcagcagcagcagcagcagcttgtatcatgactgcggccgtgggaggaggccgcggcgggcaaaggcctgagagctaaccaaccaagctccctggttaaggcctggggagcgccggggtcggcgccgcgcagcaccccgccgctcgaacctggcggccgagcagcggagcacaanggggcgccgtcccgccgttccctagcaggccctgcctcccttccgggggcggcgggccggcgcatgtgtgtgtgtcaaacctgtgttacctagttcaaccctgagaagattcaaacacccctcacgaatcacatatgcttttttgtgtgtaaacgcaagccgcc

SEQ ID NO: 5323 - DNA, 348 bp, Chlorella sorokiniana
  unsure (1)..(348): unsure at all n locations; Clone ID: LIB3602-076-Q6-K6-H4
gcgttcgtgaagccaaaaccaccaanaagatgtgctgcgtctggcctgcaccgtgtgcaaggcccagcacatgcacgccatcaagcgctgcaagcacttcgagatcggcggcgacaagaaggtcaaggggctatactagtaaaaaaaaggagagcggcaggcggagagcatgaccgagaaatggaggcagcggcgcccgctcaccctgggcggcctgctccccgcccggcgcctcgctttggccgcctctggccactcgtacgcctccttgtccatgcccttgtgcttcctgagctgcccaacctggcatgcaagcagcctggccgtctgtaatgccattggcgtgtg

SEQ ID NO: 5324 - DNA, 574 bp, Chlorella sorokiniana
  Clone ID: LIB3602-076-Q6-K6-H5
gctatgcaatcaagctggtacagcgaactgcggtgtccgttgcttactttggggagggagccgcctcagagggagacttccatgccgccgtcaactttgcaggcacgctgacggtgcccatcatcttcatctgccgcaacaacgggtgggccatatacacccctgccaccgaccagtaccgacgcgacagcattgctggccgccgccccggctacggcataaccagactgctggtggacggcggcgatgctcgggcggtctactgcgcaaccaaggaggcacggcgagtggccaccgaacagcaggcacctgtgctcatcgatgccatgagctaccgtatcggtcaccattcaacctcagacgacagctcgtggtaccgcgccgctgaggaaatgaaggcgtggcgggcgcgcgacccggtcacccgcttccagctctggctggtgcagcagggctggtggagcgacgagcaggataaggaggcccgggcagcagcacgcagtgaggtggttctggccctagcggcggcccagaaggagcccaagccgcccctgtctgccatgttcaccgatgt

SEQ ID NO: 5325 - DNA, 470 bp, Chlorella sorokiniana
  Clone ID: LIB3602-076-Q6-K6-H6
ggtgcacgtgggggacgacgtggcggccagcaacgagtctgacgcggtgtggattgggcgcgtggaagccttcttgtccttcaagggccacggcaactgggcctttgtgcggtggtttgaggaggcgccgcagagccagcgcacagcgccgctggggctgatgcgcctgcgctggtgctaccacgaacgcaccgtgcccggcaccagccgccgcgggcaggtcccattctatgacttggtgcagctgtcgcacgtggtcgagccggtgtttgtgcaggaggaccgcagcctgcgcggcgaagcctaggcccactttttttacaaccaccgtgtgcgctgaggctgcatgtagctgccggcttggtgcctggcatgctggttgtaaccacgccgtcccaaaacaaataaaccgactttccccatcaaactttaaatcggaggctccctttaaggttacgatttattgctta

SEQ ID NO: 5326 - DNA, 599 bp, Chlorella sorokiniana
  Clone ID: LIB3602-076-Q6-K6-H7
cattaatgttacagttggcaggatacaacggcggcgcgcacaattggcacgcccctgaggagtgcagacaaaagcggacgtgatgaggatcaagtcgaggcggggccgattggaagaggggccgacaaccaaccaatgggcgatccgaaaggagcgagcagtggcttggcgttatgcttagctttcagatggtactctgaagggcagctgagagggtggcggtgcaaccaaatgcgtttgtgggccgcgtggcttgtgggttgggtgaggatgggggcaggaaaaaacgggtcggcaggggggctgaaggggtacacagatgggcaggaaacagggaaaacaggtgcagcttgggggcgcgtggctggccagcagcctagggagtcatgcaaaatgggcggcgagccctcggcaggcatcgtaccgcgcgcgaggccgggccaggcagcgtggcggaaaaggttcgttttgcaaaaagggcaactgtacagcatcattgtgggtgggtcaacattatctcatctttggcatcttctcaagggggtgttgagcgttggggcgccccgcggcggtccataagtaagtagggcgttgatcgc

SEQ ID NO: 5327 - DNA, 577 bp, Chlorella sorokiniana
  Clone ID: LIB3602-076-Q6-K6-H8
gtgaccgacatcgtgatccaaaacctgcaacggcaagccctgcaacaccaagttcctgacggtcaagcgcgcgctcgcccccacccccttctaaactgattggcgagcgctgcagccgttgagacgcagccctccccgaggccgtgcgaccgaccagaggcggccccggcatcagcaatgctttctacccaggacccctcggcaaaactgaatcaataacggccggcggggcactccacgcaggcgccgctgcctcgaggcacgcggcgcagcagcggcggctggggcaccgcgcgggcagcatgcgcccgcgctcagttgagcccatgcacggccgccaggaatacccgcctcgccggccggatcctcttttgcatgccttcctgcaccggggcgcgcgcccctctgcggcgccgcccccgctttccttttgttttttccaccgctaccccggtcgttgcatctcaatgcatctcaccccctctaccacctcccgtaccgcggcgctaccaaccccgcctgaattgccttcgtcccgcatacacccgcatacaccgtcgtcgtgcctccctctctc

SEQ ID NO: 5328 - DNA, 483 bp, Chlorella sorokiniana
  unsure (1)..(483): unsure at all n locations; Clone ID: LIB3602-076-Q6-K6-H9
gccgagcagtaacagaagaagcagagcgaggagggcttctttgccgagaagaccgagaaggcgccgctgcccgctgagtatgtggccaaccagaaggcggtggacgcggcgctgctgggcaagctgagcgacgagctcaagggctacctgtccagccgcttcacgctgcgctctggcgaccggccgcacctcatgaagttctgaggtgccagcctggcagctcgctcgcccagcaagcggcccggcggccgggcttgcttggcggcagcccgcgcggcacgcggcgggtccgtagtgcacggcccgacgagcgctgtgcggggcggctggcggtcgcatgtccatatttgttgcggcgctgcatggacacgtgtacccttttcatggtctatttcattccagtcctggctctggtgttgtgccctgctcctcattgcaagatctggagcctaagaccccanaggggcttgtaacaggggcggc

SEQ ID NO: 5329 - DNA, 433 bp, Chlorella sorokiniana
  unsure (1)..(433): unsure at all n locations; Clone ID: LIB3602-077-Q6-K6-A1
ccggtgtcgacccacgccgtccgtctagttctagnacgcgagcnnggccgctccgatctagnacccacnngcgtccgcccacgcgtccgcccacgcgtcncgctccgcgcggnccggccttcggcagccggcggccgtgccagccacgccacacacaccgcaccccttccagcccttcagccagcacccgctcacttgtatccgtttgcatgaatcccttgcccccttcccggccgccctctggccctgagaagagcccgtcatgcctgctccctgccaccgcagttttgttgtttccgagcactggcacccgccccgctcctcgcacacctccaaatacatctgatgcgctcatggctgaagctgatgctgctccggttctttttattcgttcgattctgccatgccccctgcctgtgtaatgaatccacat

SEQ ID NO: 5330 - DNA, 354 bp, Chlorella sorokiniana
  unsure (1)..(354): unsure at all n locations; Clone ID: LIB3602-077-Q6-K6-A10
ttgtggtgaagaccggccgcaccatgattggcgccaccaacccgcttgcctcgccgcccggcaccatccgcgccgactatggcatcgatgtggggcgcaacatcattcatggctccgactcggtggactcggccatgcgggagattgcgttgtggttccgcgccgatgagctggcaaactacacccccgtggcaaccgcttggatttacgagtgaatggccgctcatcagtgcacagcagggtgggctggtgcattgagcgccactgcatgaccttgatggccctggttggttgggctgtagcagctgatgtgtgagtgttgatcactctttgtaagaagctgcttgnntnnna

SEQ ID NO: 5331 - DNA, 51 bp, Chlorella sorokiniana
  Clone ID: LIB3602-077-Q6-K6-A11
cccacgcgtccggccactcgttcggttctagaccgtgggcggcctccatgc

SEQ ID NO: 5332 - DNA, 385 bp, Chlorella sorokiniana
  Clone ID: LIB3602-077-Q6-K6-A12
attttgcttgcctaggcgttttcattgccgtgccttgtgtcctaacgttgtgcctgccttttccctctttcttgagtttcatccagtcttttccgtctttgatgccttttcatctgccagcgccctgttcttcaaccctgcggacacgcgtgtgccgtttgttgtaccccgtcaacctccaagccttatttgcatgggctgccccagttcctggctcttgcctggcagccctccgtatctgtttatgccggttgagcccaacggcaccggcaactgggcctcctggcctggaatcacgactttcgaacgtcccctttgctgcgaacccttttatgcatcccaagcctcctaacctttgcgcttcatcaatgtgagctcgccagct

SEQ ID NO: 5333 - DNA, 283 bp, Chlorella sorokiniana
  Clone ID: LIB3602-077-Q6-K6-A3
gccgttctgcttgtgttgtgcatccttcccttttcatttggtattaatgggcatgtgacccttttgacctgctgcaccttcgctttgtgtttgcacctgtggagccaggcttccacagtatttacgaatgcagctgtgcttcctccaatcttatggcttgtctttgcgtgacgttcctcatgcatcacttcatgattttgcagcttttacagctacgcgcatagcgctgctacatacaacacaagttaaaagagcagcgtgtggattgcaacacagaatcagg

SEQ ID NO: 5334 - DNA, 379 bp, Chlorella sorokiniana
  Clone ID: LIB3602-077-Q6-K6-A4
cgtgcccaacgacggctgcctcaacttcatcgaggagaacgacgaggtgctcatcgccggtttcggccgccgcggccacgccgtgggtgatatccccggcgtgcgcttcaaggtggtgaaggtgtccggtgtgtccctgctggcgctcttccgcggcaagaaggagaagccccggaactaaacggcccgcgcccagcagcggcagcagcggcgcgcctcggcaacggggggcgccgcgtccgccagcactgcacctgcctggcggcggcttgggagggcgtgcagcgcatgcagcgtgcaccgccgcggccctcccgatagtttaggaccccacaaccagctccctctgctcccactactgatgtaacacgcaactgcc

SEQ ID NO: 5335 - DNA, 510 bp, Chlorella sorokiniana
  unsure (1)..(510): unsure at all n locations; Clone ID: LIB3602-077-Q6-K6-A5
ngaacattgccgcccgccagacgcccgcacgtgcgacagcgggttagtagaacaacagcagcgcaacaccggcgcagcagcagcagcagcagcagcagagatgtcggaggttgtgctcaaggtggccatggcctgcgagggctgcgtgggcgcggtgcggcgagtggctgagaagctggagggcgtgcaggcggttgacatcgacctgccctcgcaaaaggtcactgtcaagggccagaacctggaccgggaggcggtcaaggcgggcgtggccaaggcgggcaaggcaaccgagttctggcagtgagcactgctggctgtgacacaaagtttttatgcacctgtggcttcccggcagcccggccccatacgttcgatgcagcctagcattctctctctagtcccttgtccctaccgtcttgagcaggcgttacagccgttgaactggtcccatttctgttgtaaagcagtcctagcatacatagcaggaggagctaagctatctatctc

SEQ ID NO: 5336 - DNA, 379 bp, Chlorella sorokiniana
  unsure (1)..(379): unsure at all n locations; Clone ID: LIB3602-077-Q6-K6-A6
cttgcctgntagtgaggtaaagtctcaccatgggcaagtgcggcaagggcacgggcagctttggcctgcgccacaccaagacgcacacgctgtgccgccgctgcggccgccgctccttccacatccagaagagcacctgcggctcgtgcggctaccccgcggccaagatccggaagtacaactggagcgtgaaggccatcggccgcaagaccaccggcaccggccgcatgcgccacctgaagaacgtgcagcgccgcttccgcaacggcttccgcgagggctctgctgccaagaagatcgctgcctaaacagctggtgtctgcagctacgcggcagcacgttgagccagctgtgtagcaggatgtaacaccgcgacaca

SEQ ID NO: 5337 - DNA, 608 bp, Chlorella sorokiniana
  unsure (1)..(608): unsure at all n locations; Clone ID: LIB3602-077-Q6-K6-A7
ccggngtcgacccacgccgtccgcacccttctctcgcgctcggcgtgccagccgcgccacgatcgccacccgcgccaccagcgaggattctgtcgtcgagaaggccaagggagccctcaactctgccaaggaagccgtgggcgacatgactcagaaggttaaggagagcctgtcccctgctgccgaccatgtcaaggaggctgcccgcgaggtgggcactgccgtgaaggaggacgccaccaccgccaaggacaaggtggctgatgccgccaccgccgccggcgattccgcaaaggccaaggcagaggccgccaagcagcgcatgtcggaggctgcggagggagctaaggacggcgccgccgacatgatggagcgcgccaaagagaagggcaaggacatggccaacaccgccgccgacaaggcggaggacatgattgaaaagatccggccctaaaccaagggctataccttgctggctgtggcggcaacaaaaccgagcccaccaaacagccagcggcctatgccggcagccctcgtggccgtgccggcggccggcactgccgcagctagccgtcggcgccagcagcccagctgaacgactcatctgt

SEQ ID NO: 5338 - DNA, 449 bp, Chlorella sorokiniana
  Clone ID: LIB3602-077-Q6-K6-A8
gggccgggggggtttaaacccggggggcccaacggaagggaaggtcaaaaaaaaaaaaaagggggggggcccaaaggcccaaattattggcccccaatttggtgggcccggtggtggcccccgggaagggccccccaaatggttttaaggaaaaaaccaaggaccccccccccggttgggtgggcccccggtccttgttctggcgcttgtgttggaaggaaaaatggcccaaacaatgggggtgaaccaaacggggggggtggcggttcttggcccccccctggggggggccggttttggtggtggtgggcccggtggtggtgggggaaaacccccaccccctttttttttgccccttggaatttttgggggttgggcaaaaaatgggcctttttctttggaaaccgcgcttaaaaaaaaaaggcccggggggacaaatttgctttttg

SEQ ID NO: 5339 - DNA, 554 bp, Chlorella sorokiniana
  Clone ID: LIB3602-077-Q6-K6-A9
tcgggccggcgcatgtgtgtgtgtcaaacctgtgttacctagttcaaccctgagaagattcaaacacccctcacgaatcacatatgcttttttgtgtgtaaacgcaagccgccaaaaaaaaaaaaaaaaaaaaaaaaaaaaaaaaaaaaaaaaaaaaaaaaaaaaaaaaaaaaaaaaaaaaaaaaaaaaaaaaaaaaaaaaaaaaaaaaaaaaaaaaaaaaaaaaaaaaaaaaaaaaaaaaaaaaaaaaaaaaaaaaaaaaaaaaaaaaggggggggggcttttaaaaaaaaaaaaattttaatccccttttttaaaaaataaaatttttttttttggggaaaaaaaaaaaaattaaagggcccctttttaaaaaacgggggaagggaaaaaacctgggggaaccaaaataaatgcctttgaaaaaaaaccccttttttcggattggggaaaaaaaaaaaaggcccccaccctttccctttccaaaaaatttccaaaactaaaagggaaaaggaaccccccctttaagggccaattaaaggggggggggggggg

SEQ ID NO: 5340 - DNA, 451 bp, Chlorella sorokiniana
  Clone ID: LIB3602-077-Q6-K6-B1
gcgctcgctttgttgatagactactcaatgtaacgtgctcacgtgaagcatagaaaggccatgcataggtggcagggggggggcactgggtgcgtgtcattcattaagggagcacttcacatgaagcacacggctgatgcgtttgtggcatcatctcgccagtagttggatgcagctgggcacggcggcttcctaacagggcgcgctccaactgctgccgtcttgttgtgagtggctcgctccaagttgctgtatgttggcggggttcaattaacattggcatggtgtggcacaaaggcggggggctgccatctgccaccccaaacgcacgtacgccgttgtaccacctggcgcccccttaccctgacccatctttcacccggcaccttttctgtcggttaccggcgtacattctacctcccacaccttactccatgtgcaccctttaccc

SEQ ID NO: 5341 - DNA, 583 bp, Chlorella sorokiniana
  Clone ID: LIB3602-077-Q6-K6-B11
ccacaagccagtatggttgcgacccgctcccagctgcccacacgcctgctgcaggccgcaggtgcgcattccggactgcagtgattgcgcgtcgtgctgctgggccgtaacgcccttgcgcccaccgcctgctccagtgccgctccgccgtcgccctacttctccgacgcgacgctcctccaacgccccgctgtgcaggcgggcgagggctgctggcagcccttggctctcgcctggcccactcggctgcagcaagcagcagcactgctgtcagcagcggaggcatggaggaggagggcaagcaggcacaccctgccgtgccgtcctcgttgcccgaggtccctccgcgctggcggccctccccacagcagcagctgtccctggcatccatcaacgaccccgaagcctggggtctggccagcgccccggcgccctacgagcagcagcagcctggagaggcggctggctacttctggctggggagcagcctcagcaaccccaaggagcccagcgcagcgcagacccgcccatcctcgccccagggcttccgcactggcatggcgggccaggcaccgcagcgcaa

SEQ ID NO: 5342 - DNA, 321 bp, Chlorella sorokiniana
  unsure (1)..(321): unsure at all n locations; Clone ID: LIB3602-077-Q6-K6-B12
gagcgagcaaanaggaggggcatgaagccaccatgaccaagttcttccttcagcaaatggaagacacgcccggcgctgatgccctgatcctgaggtatgatcgagactgcaaaaatcctcagttgaaagaatctatggcccggctgcttggcggcaacgatgcctggcaggacctgcagaccaaggagactggtggctgcaaggctggttactttcaggatgcactaagggcccgctgcaaagcccttaagccaaagccagaaaataagcgcgagcagcgcactcggggctcttgacaatcagatgtaacgcatgcngaac

SEQ ID NO: 5343 - DNA, 240 bp, Chlorella sorokiniana
  Clone ID: LIB3602-077-Q6-K6-B2
gtgtcgtgcagccgcggactcgccgcggcaatccatgcataccatctcatctcattgcgctaccgcatctccttttccctctggcatgttcccggacacaccacagctaatcaagtgtgggagtgcttttggcagccgtcccaactggctgtcctgtcccacttttgtgttctgcgcaccgactgtgtccttgtctgccacaaccagtgcctcgaaccacccctgtaatccgcagcttgt

SEQ ID NO: 5344 - DNA, 548 bp, Chlorella sorokiniana
  unsure (1)..(548): unsure at all n locations; Clone ID: LIB3602-077-Q6-K6-B3
cccctagcaaggctgagaggcgaggcccgcgggccgtgaaggccgcccccaattggggcgcctgaccgcgcgcttgccaagctctcacgccccctcccctccccagcagcagcagcaacaatggcagcccgaggcaacatgcacgcctgtagccgggcgccggcgccttccgaccgctggcgcccccaccccacctgtgcgacagccccaccccacgcatccccagaattcctcccaggattcctcccagcacccccctccgtgtctgcttgcagcccctgcgttccccgtcattgttgagtgtacccctaaccgcgagccgcttttcccttccgctgcgccgtcgctgctcaccgcatcccaaactcaatcgacgacgaccatgcactgttccccaccctccccccctctttccgttccggcccagtctgctacgcttcctctgcctcgtcacgtgacgcgtgagcgctattgtatgcctctgcccatgtaaacgcttccgccaaaaaaaaaaaaaaaaaaaaaaaaaaaaaaaannnggggcgggc

SEQ ID NO: 5345 - DNA, 602 bp, Chlorella sorokiniana
  unsure (1)..(602): unsure at all n locations; Clone ID: LIB3602-077-Q6-K6-B4
ctgnnctgttgatttgggggccagcctttgncctgccgctctcccnacttgctgcggcatgncggcaccacctggcntgcttgtctctgtccccgccccccctcctctgcgccgcctctcccctcaccagtaccgcttccgcactgccttggtcctgcctgcagagcagtacatccaggacgaggtgagcggcgtgagcgagcggcggcgcgctgtggccgctgcgctcatcatctttgcgctgctcgtcctgttccccatggcgcctgatgtcgtgagcgacatgggatccatgagcagccccggcaacttcatctgagcgtgcttttccacgggcacggctgcgtacactccccctcagccaccgccaaaccagcgccgctgctgtccctccacggctgcgccccctgccgcgcttgcggagctgcctgctcggcagcggctgcggcagggctgcggctgcggctgcgggcggcttttgtccggctgcctgcctgctgctgttcccaccttcgagcgtctcagtatgcccctcttcccctgccctctgggctcaacgcaccctatcctatgagtgagctaacgatccgctgaattgcacc

SEQ ID NO: 5346 - DNA, 232 bp, Chlorella sorokiniana
  Clone ID: LIB3602-077-Q6-K6-B5
tcccacgcgtccgaaaaaaaaaaaaaaaaaaaaaaaaaaaaaaaaaaaaaaaaaaaaaaaaaaaaaaaaaaaaaaaaaaaaaaaaaaaaaaaaaaaaaaaaaaaaaaaggggcgggccgtttataaaggatccaggctttccgtccgcgtgcttggcgacgtcttagccttttttttacgggtcccttaaatttcaggttcctggcccgtggatttaacaccgctggggccg

SEQ ID NO: 5347 - DNA, 587 bp, Chlorella sorokiniana
  unsure (1)..(587): unsure at all n locations; Clone ID: LIB3602-077-Q6-K6-B6
cactccccttccgacccgtcccttctcccgtctcccttccactaaccctcgccctgccctcgccttgtcctgacaacttggttgcgcacccctgacccccttgaccgcttctttccctttgattgcatcccatgcatcccatgcatcttgagaccaaccatctctgctgctcccctgtcgccgctcgcatctcccctgctgcccatccgcgcttccatgcaccagacattagccaagccacaagcagcatgcagcacaacacccaggctgtaactgctgcctcatgcaaaaaaaaaaaaaaaaaaaaaaaaaaaaaaaaaaaaaaaaaaaaaaaaaaaaaaaaaaaaaaaaaaaaaaaaaaaaaaaaaaaaaaaaaaaaaaaaaaaaaaaaaaaaaaaaaaaaaaaaaaaaaaaaaaaaaaaaaaaaaaaaaanggggcgcgccgtttaaaaaaaccaaattttggtaaacccttggggaaaccaaaatttttttttttggggcacaaaaaattaattcacggggccggtttttaaaaagaggcggaatgggaaaaaaccttggcaaacccaaataaaatccttttg

SEQ ID NO: 5348 - DNA, 599 bp, Chlorella sorokiniana
  unsure (1)..(599): unsure at all n locations; Clone ID: LIB3602-077-Q6-K6-B7
cggcttttgacccgctgcgcctgggctccaagnacaaggacgtgctcaagtactaccgcgagggcgagctgaccaacggccgctgggccatggctgccgtggcgggcatcctgttcaccgacctggtgggcctgggcccctggtgggaggctggcgccaaggtggagtcctccttcgacctgaagaccctcatcatcattgaggtggtgaccttcgccatcctggagggcttccgtgtcaaggcgtacgagaagaccggcgagactggcctgggcccctttgcgccctttgaccccctgaacatgcgcagcgacgagacccgcctgaaggagctgaagaacggccgcctcgccatgctggcgttcctgggcttcagcagccaggcggcggtgcagggcaagggccccatcgagtgcctgcaggcgcacctggccgaccccggccacaacaacatcttcacctcgtctgtgggcaacgaggccctggctgccgtgctggtgctgtccatcaccccctgcctgatcgaggccaagaaccgcctgcagggcaccgacgaggaggagttccgccccctgccctggtaagcgtctggcactgcg

SEQ ID NO: 5349 - DNA, 462 bp, Chlorella sorokiniana
  Clone ID: LIB3602-077-Q6-K6-B8
cagccaggcagcagcatgaacccttacagcggcacgtcctcgctagccaaggtgctgcggttctcggccgtgggtgtgggccttgtgtacggtgcggtgaagatgagctactacaagggccaggcagcaaaggcagccaagaaggggcaccactgaggcgcctgccgcggcaggggatgggcggctggcggcgcgcagcatgccggctgggttggcctccctctcaggcaaaactagtctttgatggaccgttgccagagggtcggccgctcagtggcagctggctgcaagcttggtacacactgccggcactgcaggcccagccctactcccctctgctcccttccctacccgctgctgcttcctgtttctctgcgctccaaatctcccgctcccctccgattgccatctgcacatgcgaacccaccgcagcaccatcgcagctgtaacgcccaactggtg

SEQ ID NO: 5350 - DNA, 591 bp, Chlorella sorokiniana
  Clone ID: LIB3602-077-Q6-K6-B9
ggcggcggtcacttccaccgagggctccttccagtgcgacaagttcttccggtttgactggttcctgtggaccttccaggtggtctggctcatgattgtgggcctctgctggtaccggcgcaccctgcgcaagtaccagtctgcgctgtgggccatgggcgccactgtgaccgcctggcacttcttcaagatcaactacatcatcagcatggaccagtggaccatgggcgagctgcacacccagggcatcatcactgccggcggcctcatcttctgctgcatcggcaacttcttcatgttcctgtcgggcgccaactacgcgctgaccatgccccgccgcaatgagctgtcgggcgtggcgttccccggcatgaacggcaactcggctgacggcaagagcttcaaccagcccgacagcccgcacgtgcccagcgacatggcttgagcctccgcctcaaagctgcatggctgagctccaaacctccgcctgacagcacacctgcgccggcggcacgagggctgctgctgtgcacccgccaaggcgggaagtgcaccatgccgccgcctgtgccgtttgccggccagtgactg

SEQ ID NO: 5351 - DNA, 614 bp, Chlorella sorokiniana
  unsure (1)..(614): unsure at all n locations; Clone ID: LIB3602-077-Q6-K6-C1
gcggtgagaggaggggagtgcaaccaggcgcacttctgtgtgtgtgtgggaggtggctggctggctggcagcatttggcatggtgtgggctgccattactgcctcgcgcactgcaggtggattgcccggtcccaaactgcatagcaaacatcgttccactgcctgactatgcgctgtctcttgcacgatgcagggcgggtgcttacggcgctccagaaggcgcgtgcggtgcgctgctgcatgagcgacgcaggcagcagcggccagcgcaccaccgtctatccagacctggttgccatcactagggagattctgtaccaccacagcctgctggagccagaggagtgacctgcacctgctgagtacggtacctgcacagcctgctggagactacgtagcgaaatgcttcaagtttagtaccaccgcaaatgctttccctgtagcaggagcagtgacgtgttttcacacgccggctgctgcactgtttgatgtttcacccaacttgctctttgccctggcttgagcagccaacgcatggttntactgcttttcctttttgcctggcttaagcagccaacacataaatgtactgctttccctttttgcctggctcc

SEQ ID NO: 5352 - DNA, 603 bp, Chlorella sorokiniana
  Clone ID: LIB3602-077-Q6-K6-C11
ggcacgtcgggctgcctgcctgagcgcccagcttgctggcagggcgctggccagtgagcccgcgctgcactgcgcgcgtggggcgcacggcggcaggccggaccaggatgtgcacgctaccacggtgctgtgtgtgcggaaggacggccaggtggtcctggtggcggatggccaggtgaccatgggtggcacggtggtgaagcccaacgtgcgcaagacgcgcaagattggggagcacgtgatcggcggctttgcaggcgccacggctgatgcactcacgctgtttgagcggctggagacgaagctggaggagcactcggggcagctgacacggagctgcgtagagctcagcaagatgtggcggctggacaagtacctgcggcgactggacgctgcgctggttgtggccgaccgcaaccagagcctgcaaatcacgggcaatggcgatgtgctggaaccccatgatggcatcattgccatcggcagcggcagcccgtatgcgttggcagcggcacgtgcgctcatcgaccagcccaacatggatgcactgaccattgcacgcaaggcgatgcagattgcctctgacgcctgcatctacacaaa

SEQ ID NO: 5353 - DNA, 620 bp, Chlorella sorokiniana
  Clone ID: LIB3602-077-Q6-K6-C12
gtcgacccagcgttcgctgcagcatttggaggcagcccagggaggtcaacttctacgccctgtacgccaactccctggcgtaagcagcttgtttggagcacctgcggcggccgaggcggcagcgctgagctggcgcaaagcgcggctggcgaccgccacctgctcacgctggtgaccttgaccatgttcctttgacgcgcttgcatgcgttcccgactccactacatgttgcactgtgctgtgcagattgtgacatcagtgcaaacagaaacgcataacaaaactccacccaaacaccattttgcctgttgtaccatactgcacgaaaaggaggctggagtggcgtaaagacactgatgctgaaggaagcggaggcgcgcgaggctggccaggaggttgagaagaagaagcctgtggtggtcaagtacggcatcaaccacatcacgcagctggtggagagcggcaaggcgcagtgcgtggtgattgcgcacgacgtggaccccattgagattgtggtgtggctgcccgcgctgtgcaagaagatgggcgtgccctactgcatcgtcaagggcaaggcgcggctgggcaccgtggtgcacaagaagactgccaccgcgctg

SEQ ID NO: 5354 - DNA, 58 bp, Chlorella sorokiniana
  Clone ID: LIB3602-077-Q6-K6-C2
aaaaaaaaaaaaaaaaaaaaaaaaaaaaaaaaaaaaaaaaaaaaaagacaacgattaa

SEQ ID NO: 5355 - DNA, 564 bp, Chlorella sorokiniana
  unsure (1)..(564): unsure at all n locations; Clone ID: LIB3602-077-Q6-K6-C3
ggcgccgnggggnanagcacgatgcagatcttcgtgaagaccctcacgggcaagaccatcaccctcgaggtggagtcttcggacaccatcgagaatgtgaaggccaagatccaggacaaggagggcatcccccctgaccagcagcgcctgatcttcgccggcaagcagctggaggacggccgcaccctggcagactacaacatccagaaggagtcgacgctgcacctggtgctgcgcctgcgcggcggcatcattgagccgtccctgcagatcctggcccgcaagtacaaccaggacaagatgatctgccgcaagtgctacgcccgcctgcacccccgcgctgtgaactgccgcaagaagaagtgcggccacacctcgcagctgcgccccaagaagaaactcaagtaaactactcgcttcggcacgagcggaagcggcatgagcggcagcaaccgctgccccccccccgccccgccagccgggatgccatgacagcaccggctgctcagctgctgatgtgctgcatgtcaattgctgctgcggaaatgtaacggtggtagcgat

SEQ ID NO: 5356 - DNA, 612 bp, Chlorella sorokiniana
  Clone ID: LIB3602-077-Q6-K6-C4
cggggagcgggttccagggcatgtggtggtgctgagcccggactgcgcacgcacggtcgcgtgtgttgaaggccagccgctgcacttgggccaagacacggcaccgcatgcgctctgtctcgcccccaacgcctccgacggagccgggtcgtgtgctggtgtgccgatgagctgcagcggtcccaagtacgatgctcgctcgccaagccttttggagcgccgcctggatggctctgcgcgtgtacttcgcctcgagtggaaggatggcacgtgctttgttgcaaggtttgacctgctgaggtaccgcgaccaacccgcctcgcgcgcccacaagcgcctcaatgtgcagatgtggcaggcggttgaggcgcacgtgcgcctgctggagcggtccggccactgcacatttgttctggagaggggggatgtgaacgccccggcgggcgccaccaggagcggcctacaaaaggacaagaacagggcggagctctagctgcgccagcgtgtgcagactgatgccaagagtgcggttcacagctttcagctgacggcagcggcggagcgccagcgcgcccgctagtgtcctcggctgccgccacgcattgcatgcct

SEQ ID NO: 5357 - DNA, 272 bp, Chlorella sorokiniana
  Clone ID: LIB3602-077-Q6-K6-C5
cggctgcacccacgaccttgcccatctggcttgcgcccacctcgtttttgcgcctaccttttcccccggactgcacaccgctcggaccgtcttctgtgtatcactgccggtgctgttggcacactgttttgcccgcacatgctgcatgcgttttgatttgaggcaccgccccgtggtgcgtttatgtttcgctattcagcaattggccagtacattggttggcatgcttacatactacgttgtgatcaaccgattgtaatgaaacactggag

SEQ ID NO: 5358 - DNA, 594 bp, Chlorella sorokiniana
  unsure (1)..(594): unsure at all n locations; Clone ID: LIB3602-077-Q6-K6-C6
cgtatgacgcgctggntgcagccctcaccgacaccgtgtcgcgcttcccggtgcacatccagcccttcagggacatgattggtggcatgcgcatggacctggtcaagtcacggtaccagacgtatgatgagctgtatgattactgctaccgcgtggcaggcacggtggctctcatgagcgtgccggtcatgggcgtcgacaaggcgtacaaggggcccctggatcgtgtgtaccgcgcagcgctggcactcggcacggccaaccagctcaccaacatcctgcgggatgtgggcgaggacgcagcgcagcgcaaccgcatctatgtgccgctagacgagctcgcagccttcaagatccgcgaggaagaggtgctgaatggcacactgtttgctgcaagcacgggccgcatcgacgaccgctggcgcgcattcatgcagttccagatagcgcgcgcgcggcaggtgtttgctgatgcggaagcgggcgtcaaccttctggatgccgaggcacgatggcctgtctggaccgcgctggtgctgtaccgccaaatcctcgatgcaatcgaggcgaacgactacaacaacttcacccagc

SEQ ID NO: 5359 - DNA, 191 bp, Chlorella sorokiniana
  Clone ID: LIB3602-077-Q6-K6-C7
cggacgcgtgggcggacgcgtgggcggacgcgtgggccccgatcccgctcccgccctattgcctcccctcactgcctagttttggcgcccgccgccgcacagctaccctcagacgtggcggcgcggcctccctctccccccgctcgtctgccccgtgtacccgccagccggcatgtaactcagcgagtggg

SEQ ID NO: 5360 - DNA, 569 bp, Chlorella sorokiniana
  Clone ID: LIB3602-077-Q6-K6-C8
gggcggcgtgaccgtgacccgcttccactactctgggctgagcagcgcgccggtggcgggccgccgcacagccgatagcgcgcgtgctgagcgcggacgatcgccgcatgcgccgtggccgagccctgacggtacgcatgccctgatgtgttggcagcctgatgacgtgtaattaggtactttgtggttacacaaaaccgattgcaaaaacgttgaatagtgcactagataccaaaaattggtggtgctcaacgatggggtaacacaggacacggcgggctgcattgaaaggttcaatccttaattgcatgcccatgcaacgttatttccatagtctgggagcccgtaaatcaaattccagtgctctgtaattctaaacacgtcgggattggaaaaaccttggcgttaccaaatttaatcgctttgaaaaaggtccccctttctaaaggtgccaaaattacgaaagaggccctgccagatcgtctttcctaaatagtgccaactcaaaatagttaatgggacgcccctttataaggtccataatgggaaaagggtggggtggttaaact

SEQ ID NO: 5361 - DNA, 591 bp, Chlorella sorokiniana
  Clone ID: LIB3602-077-Q6-K6-C9
gcgcgtggtgcccgtgtccctggagctgggcggcaagtcgccgctgattgtggacaagaacgtggacgttgacaaggcggtggaggacacccacttcgcgctcttcttcaaccacggccagtgctgcgccgccggctcccgcacctttgtgcacgccgacatctacgacgagtttgtggagaaggcggccaagcgcgccgcgcagcgcaaggtgggcgaccccttcaccgacgtggagcagggcccgcaggtggacgaggaccagctgaagaagatcctgggctacatcgacattgcgcagcgcgagggcgcgcgcctgctcaccggcggcaagcagcacggacagaagggctacttcgtggagcccaccgtgtttgctgatgtgaccgacgagatgaccatcgctcaggaggagatctttggccccgtgcagtccatcctcaagtaccacaccactgaggaggtgattgagcgcgccaacaacaacgtctacggcctggcatcgggcatcatcagcaacgacgtcaacttcatcaacaccgtgtcccgctccctcaaggccggcactgtctgggtcaactgctacaacgt

SEQ ID NO: 5362 - DNA, 583 bp, Chlorella sorokiniana
  unsure (1)..(583): unsure at all n locations; Clone ID: LIB3602-077-Q6-K6-D1
cgccttccggcccgagtactggggcggcgagctgtactacgaccaggacaaggccttctacgcggtggtgcatggcggcaagccggcccgcgcctccctgctgcagctgctgagccccacggtgtggcgggcgggcaagcgcgccaaggagagcggcttggtcaaggactccaactacaagggcgacggcctgaccctgggcggcctgctgatcatcaagaagggcggcgacattgcgtacagctatgctgagaagtcgtttggggaccatgcgcccatggaggaggtgctggccgcagcccgggcggcggctggcaagcagtgaggcgccgatccgggcgcctcttggctgcgctgtacactttgtgagcacccatcatgtacccccatccagagttcactccttgcttctcctgtactgctctgtgtctccatccatagattctgattcactcgacgacctgaaccgccagcatcaccctgcctcgcgttgaggcccaccgcctgcatccaccatgccatgtctagcgcctgcaagacctactggtcaaaaaaaaaaaaaaaaaanaaaaannnnnnnnaa

SEQ ID NO: 5363 - DNA, 406 bp, Chlorella sorokiniana
  Clone ID: LIB3602-077-Q6-K6-D10
gagcccttctccttccgcctcggccagggcatggtgatcaagggctgggacaagggcgtgaagggcatgtgcgtgggcgagaagcgcaagctggtcatcccgccccacctgggctacggcgaccgcggcgctggcggcctcatccccggcggcgccaccctgatcttcgaggtggagctgctgggtgtcaagggcaagtcggcatgaggcggtcggcgcacagtagcactggggagcacaggtcagcctgatgcacgacagcagcagattcagcttggtgggcgtagcgcagccgctgcgtgtttgccgtgtgcggcagccggaccatgtccctttacctttggcggcagcattcctttgccgctgggctgcttgtgattacagggtgtaaacaagcagcagtgca

SEQ ID NO: 5364 - DNA, 574 bp, Chlorella sorokiniana
  Clone ID: LIB3602-077-Q6-K6-D11
ctggctgctgcacgggcagtcactcattgcacatgagttcgtagcgtgaccgacaggcagtggccctacgggatcaaccggagcgacatacgccactcggctgccgtgtgcgcgactgaggctaggcgaccgtgtccaacgagcactaccgagggcaagactacgacacaggcactgaattagcaagcagatacaggccgcctgtccaagtactggacaagctgggcgctggccatgaacctaagggctgtgatcttggtattctcggtggcagccatgctccgcccatggggcctgacaccccacaacagctgatacttacgtccaagataacaacgaacagcacgctcacccctgcagcacgagccatcgtgacatacaacatcacgctcactttgcatggcctacatgcatgctgctggctgatgaacgattagcgacacatatgaacaacccatggctgtggccctatgtggccgcctggccgcacatgatgctgagctctaatagcgcagtgctcgacatggcacgtgctaacatgtgcgtcatgtcattaataatttggaaactcatg

SEQ ID NO: 5365 - DNA, 589 bp, Chlorella sorokiniana
  Clone ID: LIB3602-077-Q6-K6-D12
cttgcaacccttttgtttctgcccacaggtctgcacctcgtgctcctccaacgacaccgtgagcctgggcaccgacaaggccaccggtggctgcgcgccttgcaaggacgccaactgccagacctgcaccgccaccgacgcgtgcaacttctgcaaggacggctttggcctggatgagaaggccggcagctgcaagccctgcccagagaaggccaccagctgcaccttcaacgccaccggcacatttgtggacgcgtgcgccaacggctacggcccagacaaggccggcaaggagtgcaaggcctgcggcgttgacaagtgcgaccgctgcgacaagctgggcgccggcttctgcgatgtctacggctggtgagcgcggttggggcaggcattgtatggtgccacagttggcgtcgacgcacagctgcttggcatctgagtgggccgcgcaccttgcgtctcctcccaccctcgtgctggcgccgacccacctatgcttgctcccgccttatcacgctcttgttaccactttatcctgcagcgccgagggctacgggtacagcgaccaggagaacgtgtgctttgcctg

SEQ ID NO: 5366 - DNA, 386 bp, Chlorella sorokiniana
  unsure (1)..(386): unsure at all n locations; Clone ID: LIB3602-077-Q6-K6-D2
gncgacaagacggcatacgcgcagtgcacgttcgcatactgcgagggcccggggcacgagccagtggtgtttgtggggcgcaccgacgggcgcatagtgccggcccgcggcccgcctgactttggctgggaccccatcttcgaagctgagggcttcggtcagacctacgccgagatggacaaagagatcaagaacggcatctcccaccgctacaggtcgttggacaagcttcgggcgtacctgctggacggccacgccgctgcggcggcagctgatggggcggcgggcggccagcaatgacggcgctgacgaggctgtagttatgtttaaatgtgctgcgcacgtgtgaattaagtaccgtctgtgtatgtagcacctcacactgc

SEQ ID NO: 5367 - DNA, 350 bp, Chlorella sorokiniana
  Clone ID: LIB3602-077-Q6-K6-D3
cctacatctgcggcgactgcggcgccgagaacacgctcaagccgggcgatgtgattcgctgccgcgagtgcggctaccggatactgtacaagaagcgcaccaagcgcgtggtgcagtacgaggcgcgctgaggtatcatccaggtgcagcagcagcagcagcagcagccaagccgcatagcgagagcgagagacaagcgagcgagtgatgcatagggagctagcagccatgagcgaagcaagcataaaacagctaggcacgccagcaaggatcagcagtgactgtacagtagatgacgcatttgcctttttcaaacatgcacccccacgccggtgtaaacacagcatgtc

SEQ ID NO: 5368 - DNA, 298 bp, Chlorella sorokiniana
  Clone ID: LIB3602-077-Q6-K6-D4
ggctgatcccaccctgcagatgcctgggcgctacatgcacctgtctgctgaggatctgcgcttgcgggaggtgccagacgtgctggcagactaccaaatgctgtatgccacacacgcttcaatggccgagcaggcgggcgcggcggcggcggctgcaggcggcagcagcggcagcggcgcgcggcctgttacgcccgcgctgtgaggttggcggctgttgattgttatgcgcctgtgcagttggcgtgattgcgctgtatcctaatcatccatgcagtgcccatgtaagtgcgcaagc

SEQ ID NO: 5369 - DNA, 529 bp, Chlorella sorokiniana
  Clone ID: LIB3602-077-Q6-K6-D5
caggtgctggtgcgctccttctacaagtgctggtcagttcctctggatcatgatgaagcacgggtacatgcgcacagtttgagtttgtggtcaaccaccgttcgggcaagatagtggtggagctgaacggacgcctgaacaagtgcggcgcgatctcgccccactacaacattgtggccaaagacattgatgcgtgggtgggccgtctgatgccctaccgccagttcggtcacattatcctgaccacctgccagggcataatggaccacgacgaggccatgcggaagaaggtgggaggcaaggtcctcggcttcttctactgagcggacttgttggatgcgccgcagcatacacggtggaccacaggcttggtggatgcagtacgtccggcgcgcccgggcgtggtgtttgctgcatcaccggcggcagctctgtgtgctgcccccctcttagattgctgcaccgcacggctgtaacagacgttacatgagaaaaaaaaaacaaaaaagaaaaagtcggcctgatatac

SEQ ID NO: 5370 - DNA, 603 bp, Chlorella sorokiniana
  Clone ID: LIB3602-077-Q6-K6-D7
ccggcgatggtgcccgccgcgacgaggacggctactactggattctgggccgtgtggacgatgtgatcaacgtgagcggccaccgcatcggcaccgccgaggtggagagcgcgctggtgggccaccacctgtgcgccgaggcggccgtggtgcccgtggaccaccccatcaagggccaggccatctacgcctttgtgacgctcatgaacggcattgagtacccgcccgatgagactgtgcgcaaggagctggtggcccaggtgcgcaaggccattggccccattgccacccccgatgtcatccactgggcgcctggcctccccaagacccgctccggcaagatcatgcgccgcgtgctgcgcaagattgccagcaaggaggaggaccagctgggcgacacgtccaccctggccgaccccggcgtggtgcaggtgctgctggagctgcgcggcaagtaaactgcgatagtatgcacttacgcgagtgacaccggcagcccggctgcccgcccgcccaacagcgatacacagagccggccccccacgaacgggcggcggttgaacgagccacccctaacctcatgcaccctgaacccaatgcctt

SEQ ID NO: 5371 - DNA, 572 bp, Chlorella sorokiniana
  Clone ID: LIB3602-077-Q6-K6-D8
ggcggccattgtggcgctgctgctggcggcgcagcggcagcagccctcgctggccctggcggcggagctctggttccgcccgggagtggactttgtgcacgcgtggctgccgctgtggtatattccggcgattgtgggcatcccactcgccgtgcagccgctgtcaggtgccgccctagccaaggcggcggccctggtgctgctgggcatccccctggtggtgtggttcacagctggggtggcgctgctggttcgcaaggcggtcaagacggagccgggcacgttcaccttccacgccgccaagctggaggtcacatggctgcactgggcggcctggggcgggctggctgccgcgtcccttctactggcggcggtgctccccggcatcaccggccgctacacagccttccctttcctgctggcagcggcggtgctgggctacatggctggcatggcgctgccggccagggtgcagctggtggtgcaccccattctggtgtgcggcgcggcacccaatgcgggcgcagcgctgcacgggctgctcacgggagccggctactgggccaccctgc

SEQ ID NO: 5372 - DNA, 418 bp, Chlorella sorokiniana
  Clone ID: LIB3602-077-Q6-K6-D9
gagcagcgcaggccaagctcaaggccaagctggccgagctggcggccgacgagtaagcgcctcccctttggggcgcttgccagttggagcaggcgggcgctgcgcccgccgtgcccgctgcgccagcacagcgctcggcgctgccgcccgcgctgcggcaggtgggcgggcgctccacaccacaccacacctcaccacaccatgcctcccggtggaaagagagcggttgcggcgctgctagtggcgccgcgccgccgcgcgacggtttcaggcggctagatccacaaaaagccgccggcagtagctggccggccggcgccgcggccggggggccggcgcggcggcggcggccacgcgcaaggcctttgcaggcccccgcgtgagacgcacacccttaccgtgtaaggaacctactcgc

SEQ ID NO: 5373 - DNA, 308 bp, Chlorella sorokiniana
  Clone ID: LIB3602-077-Q6-K6-E1
ggcgtccactgcgatttgttttcaccccccaaatgcatgtgcccctgttcccaatctgctgccggcctgcgccactcgtgccgccagcgtgttaccctacatttccgcagtcgtgtgtttttttctgccctggtgcaccacattccctgcgccgcttttcccctggatctctacccttgtggattcattccccagttgcactgcgtgctgctttgcctgatctgcaccttgcgcctccccttctgcatgcctttcatgtgcctctctgccggcaccgccgagtcattctggaatgtaacatcgctcag

SEQ ID NO: 5374 - DNA, 606 bp, Chlorella sorokiniana
  Clone ID: LIB3602-077-Q6-K6-E10
gtaacaacctggcgccctccgccggcagccgcgtgaacaccggcttcttcaaatccggtgcctggctgatccaccccggcatgttccccgagcggctgcgcacctggctgaccgccgacgccgggctggccaacaccagcaaccgcggcctgggcatcaagggccccgcccgctgcatgccaaacgggtccgtgacgtcctgcgtgttcaccgaggtgaacaacttcgacattatcagcctcagccaccctagcaagagcgacatcgattcgtggagcgaggcaaaggccgacaagtacacgttcttcaccatccaccaggtcgtgctgctggcgtgcgacgagctggagctgtacctgctctacaagctctcggcgctactcaaccccgaccggcccgacctgtggctgcaagtcagccacctatgccacgaccacggatgcatccgccgcacccacttcgttgtggagacggcgatcgagaacctccgccgcaacccgtgcaagctggccaagaagtgccgcggcgacggctgccctggcgagcaccgctgcttcagctgctgaggtggtcctggcctgtgccttctgtcaacgctctcgtgct

SEQ ID NO: 5375 - DNA, 606 bp, Chlorella sorokiniana
  Clone ID: LIB3602-077-Q6-K6-E11
gcgttctttggctggtgcaggggcaggcagcccttgcagatgagtttgagtgtgacccacaggcagcgccgagcggcatcaagtggtgcgacattgccaccggcttcggcatgccggctgaggcaggcgaccgtgttcgtgtgcactaccagggcaaacttgcagacggcactgtgtttgcaagcaggtacagcccgcctgcccccctcttggtcaagttgggcgctggcgaggcacccaagggctgggagctgggcatcctcggcggcagcggcgtcccgcccatggtgcctggcacccgccgccgcctggtgctgccgcccgagcttgccaggggcagcggcatcacccctccagcaggagccaccgtcacctacgacatcacgctgctgggcaaggcgacatgatgccgctggctggtgtcggagtagcggcacatggggccaacccattgcggcggcccgttctggccgtggtgttgcacatcagcggtagcgcgaagagcgcagtattggacatggcagttgttaagatgtgtttgatgtcattaatatgtttgaaactcatggttctgatgagtggtggcatgtaatgtgcatagtgatt

SEQ ID NO: 5376 - DNA, 590 bp, Chlorella sorokiniana
  unsure (1)..(590): unsure at all n locations; Clone ID: LIB3602-077-Q6-K6-E12
gggcaccagntcagcggccaacagctggcaactcctgctgctgagcactgggtgtgcggcggcggcggtgtgacgaacgggcggccgtgtggctgcggccagcccttcaaagagagcgacattgtgtacgtggcggtcgacaggggctccgcccactattattttaagcacctcacgccgccgctggaagccaccgttgagtgcggcgtgggagagcagcaacggcgtgccatactggagcgtgtgccacaggctgccaacaatcaaaaagtttttgacttcacggatgtgctgggctggagcttactgacttgtgcccagcaggtggagatgctgagggcgctgggtgcaagcaacgagcccttcatctcgccgcggcagagccaacgccaccacaagcagaaggagagcgaggatgaggaggaggaggagggctggaccaccggccaggaggaggagctgcagaccgctgctgttgcggcggcggcggcccacggcttgccagacgccgatgctgtgcatgagtacaagctgcagacagcagctgctgcggcggcggcaacggcctcacccatcaaaaccgaggtaga

SEQ ID NO: 5377 - DNA, 193 bp, Chlorella sorokiniana
  Clone ID: LIB3602-077-Q6-K6-E2
taaaaaaaaaaaaaaaaaaaaaaaaaaaaaaaaaaaaaaaaaaaaaaaaaaaaaaaaaaaaaaaaaaaaaaaaaaaaaaaaaaaaaaaaaaaaaaaaaaaaaaaaaaaaaaaaaaggggcgggccggttttaggaggttccaagctttccgtcccgtgtgcttgcgaaggtattagctttttttttggggccc

SEQ ID NO: 5378 - DNA, 574 bp, Chlorella sorokiniana
  Clone ID: LIB3602-077-Q6-K6-E3
gcggccagcaagcgggtgagccttctgtggggaagcacagccagcatgttgggcgcaagctggcggctgggaggaaaaccagcgcattgggtattgggtaccataccagcagtgctggtggagcatgggttgcctgagcaagcagggggcgttggcacagcattgtggcagccctcctgacccccacacctctccctgccctcttcaccgctgttgcagggagatcactcactgatgctgctgggacccgtgctgtttgtcgtgtttgacgtctttctgctcatctcggtggcagccctggccattgcacaggccagccaagtggcgcgcaacgtgaccaccaacgagctggccaactggcacaggtacaagtacatgcacggcccagacggcgacttccacaacccctttgaccgcggctggcgccgcaactgcttcgacacgtgcaagccgaccgcggcaccctcgttggccttcgtgctgcggggtgacgaggcgagtgagacgatggcgctgcttgccatggagcagggtggatgaccagattgctgtcggttgcgcatagtgccgtgta

SEQ ID NO: 5379 - DNA, 453 bp, Chlorella sorokiniana
  Clone ID: LIB3602-077-Q6-K6-E4
cagaagctggagggagagtaccgcattgccaacaactgagcaggaccatgacgacgtcctgcagtactaggcactgcaccattgttttggcacccccagccgccaaacccaagcctcagcgcgtgccattgcagcagcggcggcggcccgcctgctgaccgctgcgcgcgattgtcttgttcaccgcccgctgagcagccattccttgacgcctgtgtcattttgtcccctcacccataaacatgcccgagaattgaactgccccgccgctatcacagcctgtccctcttctccccgatttcatcgccccacgccgcgccgtgggcgagttttccgatgccctttgcctttcatgctaccacatccgccactggcagccctacctatatgaatgacgccggtccgtcctactgtacaacatgccgcaacatcccgtgtaaccaggcatgcaac

SEQ ID NO: 5380 - DNA, 587 bp, Chlorella sorokiniana
  Clone ID: LIB3602-077-Q6-K6-E5
gcctgcagaagccgccaagtgctggagcagctgactggccagcagccggtgtttggcaaggcgcgctacaccgtgcgccagtggaccattcgccgtaacgagaagatctcggcccacgtgaccgtgcgcggcgagaaggcgatgcagctgctggaggcgggcctgaaggtgaaggagtacgagctcatccgccgcaacttctccgactcgggcaactttggctttggcatcaacgagcacatcgacctgggcatcaagtacgacccctccaccggcatctacggcatggacttctacgtggtgctggagcgccccggctaccgcgtggcgcgccgccgcaagcagctggccaaggtgggcgtgcagcaccgcgtgacgaaggaggacgcaattaagtggttccagcagaagttcgagggtgtggtgctcaacaaggcccacgccgcctaagcggcaggacggccaccgcctcggcgcgccggcacctctcagacgacaggcagacagcacaccccctgcaccacggcgctgcgctgtactgccccgctggcttgttgctgcccatcggatgtaatagcggacaagtg

SEQ ID NO: 5381 - DNA, 574 bp, Chlorella sorokiniana
  Clone ID: LIB3602-077-Q6-K6-E6
gcgcatggagcggcagctgctggcggccaaggcctgatcgcggcgccggagcggccgcctgatgaggacggccctggcggcagcctgcctcccgcgggcaaggcgggcggctgggtgccgcccagcctgcgcaatcgcgttggcggcgctggcggcgagggcgagatgatgcagaagcggcgggacgagaacagcgtgcgcgtgtccaacctgagcgaggacgtgacggaggacgacctggccgacctgtttggcccctttggccccatccagcgcatctttgtggccaaggaccgcgagacgggcgagagccgcggctttgccttcatcaacttcatccaccgcgaggacgcgctgcgcgccatctccaagctggacggcttcggctacgacaacctcattctgtctgtgtccatggctgcgccgcgcccggagcgccagtgagcgccggcgccgggatgcgctgcttgaagtggcggcagtggccccgtgtgaggcacagcccacgcctccaccgcggctggcgtgcctgtttttgatgtgcatgcccctgcgtgactgtgcctgttgcatg

SEQ ID NO: 5382 - DNA, 584 bp, Chlorella sorokiniana
  Clone ID: LIB3602-077-Q6-K6-E7
tggtacgacgcccccctgcccctggttcagggcggccaggccacctacttcggtgcctctgtgcccttcgacctgggcaccctggctgccattgagttcgctgccatggccggcgctgagtccttccgcggcgctgctgagcccgagaagcgcgtctaccccggcggcgccttcgaccccatgggcatgtccaagggcaacctggatgagctgaagaccaaggagatcaagaacggccgcctcgccatgctggcctgcctgggcttcgctgcccagcacgccgccaccggcgccagcccgctggaggccctggcctcccacctggccaaccccatggccgtcaactttgccaccaacggcgtgtccctgcccctggcgtaagcgcgcccctgtagcagcggctgtacccagcacccgcggcgcagcagcagacgggtggcccatgtgtggcctggttgtctctgcccgtgtggtctgtacgcttgttcctatttgctctcctgttgctcattgctcctgactgcacacccgagaagattcaatcaacccctcctgctaccatgtggctgtaaggcacagctaac

SEQ ID NO: 5383 - DNA, 571 bp, Chlorella sorokiniana
  unsure (1)..(571): unsure at all n locations; Clone ID: LIB3602-077-Q6-K6-E8
ggagcaccatgngtgaagtacgcgaggaggtggcggagccgaaggccgccaaggcccgcgggtccgacctgcgcgtccacttcaagaacacgcgtgaggccgccttcgctctgcgcaacatggacctgaccaaggccaaggcgtacatgcaggcggtgattgaccacaagcgctgcgtgcctttcctgcgctacaacggcggcgtgggccgcacctcccaggccaagaacgagggcaactcgattggccagggccggtggcccaagaagtcggccgagttcctgctgggcctgctgaccaacgcggagagcaacgccgagagcaagggcctggacgtggatgcgctgtacgtgagccacatccaggtcaacaaggcgcagaagggccgccgccggacttaccgcgcgcacggccgcatcaacgcctacatgtccagcccctgccacattgagctgatcctggcggagcgcgggcaggcggtgaaggccgaggcggaggacaagcgccgcaagctgagcaagaaggagctggccaagaagctgcgcagcggcaccaccagcaagagcagcta

SEQ ID NO: 5384 - DNA, 574 bp, Chlorella sorokiniana
  unsure (1)..(574): unsure at all n locations; Clone ID: LIB3602-077-Q6-K6-E9
gccatgctggnacagnatgccattgctgctgtcagggtgtgaagcaggccgacccgtctgccgccgagttcttgaccttcacctgggacggctccgagggctccttcagcacccaggccgaggccaaggccgccttcctggacgcgctgaagaaggcggatgtgatcatcgacgagacgtacgctgagaaccccaccacctacgactcggccgcactgctcaaggagtggggcctgaccgaggcggaggccgccgccctgcccgcctgggccaacaagaaggtgttccgccccgacggcctgctgtcgctgcagcgcacgcccgacttcaccgacccctccaagaccgtggacacctacggctccgactggtttgagggcgccatcgcccgccccggcaaggtgctcaaggacatcgtgcgcgcggtgcagggccagggccagggcttcacctgggtgcgcaacctgttcaccgagcagccgatggtgaccgacggcaagtcgtgcaacgcagcgcagccctgcgccgcgcagccccgcaccatctgccccttcgtcaaggagtgccccgtggg

SEQ ID NO: 5385 - DNA, 595 bp, Chlorella sorokiniana
  unsure (1)..(595): unsure at all n locations; Clone ID: LIB3602-077-Q6-K6-F1
cctaccccaagtcgcgcttctgccgcggcgtgcccgaccccaanatccgcatttatgatgtgggcgccaagaaggcgggcgtggacttcttccctcactgcgtccacctggtcagctgggagaaggagaacatctcgtccgaggcgctggaggcggcccgcatcgcggccaacaagtacatggtgaagaacgcgggcaaggacgccttccacctgcgcgtccgtgtgcaccccttccacgtgctgcgcatcaacaagatgctttcgtgcgccggcgcagacaggctgcagacaggcatgcgcggtgcgttcggcaagccatttggtgtgtgcgcgcgcgtgggcatcggtcagatcctgctgtccatccgctgcaaggacacgcacgctgcggtggcggaggaggccctccgtcgtgccaagttcaagttccccgggcgccagaagatcgtggctagcaggaactggggcttcactccctacctgcgcgacgattacttggagtggaagcgtgagggccgccttgtgaacgacggtgtgaatgccaagctgcttggcaaccacggcccgctggacgcacgggagcccggccagat

SEQ ID NO: 5386 - DNA, 598 bp, Chlorella sorokiniana
  Clone ID: LIB3602-077-Q6-K6-F10
cccacgcgtccgccgcagccaaggcggcagcgaagcagcaggtggcattgaagatgccggctggtaagcgccagtcagcagtcagctaggcagcagcgccgcagcatcagtacgccataaaaacagcccagcccgagcagccgcttcacgcgcagcagcaagcagtctcccacgtagtaacccacggctcgcagtgctgcacctccaaggtgcaccattcactattgccgccgcaacagaaggcagcaggccccgcaagcgcgcccgcagcagcggcggcagcacagcagcaacagcagcagctgctctctccctcttgaataaggcagtctctgcggccagccgcttgcaccatccccacccgccccaccatttccttgtacaggagggcagtgcccgggcgccgcgcctgtttggacatgtccccaccaccgtacccaatgcatgcgcacgccctttcgtttggtttgtttcttccacgctctgccgttgcattcagttgcctctccttttgttgtgtgcagcactgcatgccagcccggcactctttgggcactcccatttcagatctgctttttccaatgcttgccataaggcg

SEQ ID NO: 5387 - DNA, 454 bp, Chlorella sorokiniana
  unsure (1)..(454): unsure at all n locations; Clone ID: LIB3602-077-Q6-K6-F11
ggcggccgcagaacggcgggcagccgccgcgccaggggcagcagcaggagggcggcgagcagcagaagcagcccaagaagaccgcagaggagcggcggctggaatcgtttgccaagccaaccctcaagaagcggcaggaccaagagcagcagggcggcggcggcggcggcgccaagaagcgcaagcgcgagcagcaggccgagggcggcggcggcaagccgaagcagcagcagcagcagcagcagccggatcccaaccagccgcagctgagcaaggcggccaagaagaacatgaagcgagcggagaagcgggcggccaagcggtcaaagggggagggcggcgaggcggcggcgtgaacgctgcccgcccgccggccagctgcaataggcaacctgcctgcttgcaacatgtaatttcagccatcctgcaccgcatgatgtaatcaaccaanggc

SEQ ID NO: 5388 - DNA, 391 bp, Chlorella sorokiniana
  unsure (1)..(391): unsure at all n locations; Clone ID: LIB3602-077-Q6-K6-F12
tcganaaaaaaaaaaaaaaaaaaaaaaaagggaaggaagaaaaaaaaaaaaaaaaaaaaaaagaaacgagagcataaaaaaaaaaaaaaatgttatggtgcgggttcaccttaaagtgattctcactttaccgttcggtttccaacgaacgagacttggggtttgctttggcggacacccaaatttaatggcctgggccggggggtcgcctttctccggactggggaaaaccctgaaccggccctaaactgatgggctttcaaaacagttgcccctttctgaatgtgggttggaacaggccctgccccggcgtattaaccttcgcgcgtgtggtggttacgcatagtgagaggggtccgctcgtgagacgtctattaagcgctggtttggt

SEQ ID NO: 5389 - DNA, 588 bp, Chlorella sorokiniana
  Clone ID: LIB3602-077-Q6-K6-F2
gcaacaaaaccgagcccaccaaacagccagcggcctatgccggcagccctcgtggccgtgccggcggccggcactgccgcagctagccgtcggcgccagcagcccagctgaacgactcatctgtgcggccgctgggccgctgtgattcatttgcatcggcccatgagcggctgccttgcacgcatggtgcggcacggcctgctctgcggcccttcatacctttgtacctttctgtatcatcttgcagcaatggcagccggctgcatctttctaacatcgtcaccggcccactcgtttgtgccatgcccacctgcctccaacgtcacccttcatcaaccctcacccaacccatccacctgccacccatccactcaccttccctccgccacaacctctgccacccactcaccacccatcacccgctcaacgccctccatgcaccatcctccccatccaccaaatctgccaccccaaacgcacgtccgccgctgcaccacctgccgccccctcacccgcacccatcttccacccgccacctttcctgccgctcaccgccgcacatcctacctcccacacctcactccatgt

SEQ ID NO: 5390 - DNA, 589 bp, Chlorella sorokiniana
  Clone ID: LIB3602-077-Q6-K6-F3
ccgcatttgttgctctgcttgtatcacaatttgctgctgaacccccatgcctacagtacgcctgctgcaagtcgtgtgctcctgcatctttcaatgtgttgccaaccctttgcatcctggccatgctttccgacaagcgcagaaggaccgcgtgctgggtggcacagcgtgcgcctggggcgagtacatcgacgcagtcaactccatcaaccgcatctggtgagcggctttgtttgttgtgtgtgtcggatcgtgctgttcctagcctgtgtggcctatgccgccgtgcaccctgtcctttactcccatgcaggccacgtgcggcggcggttgctgagaggctgtggtccaaggacgccactgatgtggacacagcggcggaccggctggctgacctgcgctgccgcatgctgtcgcgtggcattgccgcccagtccatggggcccggtttctgccccggagagctgaccacgcgcatgtgagacggcacgccgcgaacatgccggttgtgccagcatgcagtgcccattccgctgattgtgttgctgagttgaagtgagtgagcgctgtaataagcctgaggcaaaaa

SEQ ID NO: 5391 - DNA, 599 bp, Chlorella sorokiniana
  unsure (1)..(599): unsure at all n locations; Clone ID: LIB3602-077-Q6-K6-F4
ccagnatggacatccgcgtgggccgcatcgtcagctgcgagcggcaccccgacgcggacagcctgtacgtggagcagattgatgtgggcgaggcggagggcccccgcaccattgtgtcggggctggtcaagtacgtgccgctggaggagatgcagaaccggtcggtggtgatcatcgccaacctcaagccccgcaacatgcgcggcatcaagagcaacggcatggtgctgtgcgccagcaacgaggagcacaccattgtggagccgctgacgccgcccgagggcgcggctgtgggcgagcgcgtgtggtttggggaggaggcggagcagggcgagccggccaagcccaaccaggtagacaaaaagaagatgtgggaggaggtgcagccgctgctgcgcaccgatgccggccgcgtggctggctttgatggacagcccatgatgacgagcgctggagcagtcaccacggccaccctcgagggcgcccgcatctcctaaaccggctgcaccaaccacattgccagagccgctccgtactggatgcttgtttcgttacttgtagtttacatcacatgatcttattatcatcacaaaggcatg

SEQ ID NO: 5392 - DNA, 589 bp, Chlorella sorokiniana
  unsure (1)..(589): unsure at all n locations; Clone ID: LIB3602-077-Q6-K6-F5
ccttcagnagtaccatctgaaactaagcataacgccaagccactgctcgctcctttcggatcgcccatttggttggttgtcggcccctcttccaatcggccccgcctcgacttgatcctcatcacgtccgcttttgtctgcactcctcaggggcgtgccaattgtgcgcgccgccgttgtatcctgccaactgtaacattaatgactaccaaaaaaaaaaaaaaaaaaaaaaaaaaaaaaaaaaaaaaaaaaaaaaaaaaaaaaaaaaaaaaaaaaaaaaaaaaaaaaaaaaaaaaaaaaaaaaaaaaaaaaaaaaaaaaaaaaaaaaaaaaaaaaaaaaaaaaaaaaaaaaaaaggggggggcctttttaaaaaatcaaatttaaatgcccgggccttgcaaattaaattttttttttttgggccccaaaaaaaaaattcctgccccgggtttaaaaaacgggggaagggaaaaaacccgggtttccccaaattaaaacccttgaaaaaaaacccctttttcccaaggggggtaaaaaaaaaaagggccccacccatcccctttcccaaaaatttccccaccctaatg

SEQ ID NO: 5393 - DNA, 591 bp, Chlorella sorokiniana
  Clone ID: LIB3602-077-Q6-K6-F6
ccgagggcggcagcagtagcagcggcagcgcggctggtggcagtggtgcagcaggcggcggcagcggtgtcatcagtgcggcagctgcggagcagctgcgccatgctgaggccgctgtgcctggcgtgatactcgcgctgcgctctgcattcagcatgatgcagcagcagcagatacaggaccggccagatgggccgcgcctcatggcaatgacgctgcagcagctctggacagaggaggaggaggttccgcagcgcctggaagctcttgcggctgcactgcaggccgcctgggccgagccagccagcctggagcgagagcagctggaggttgcagaggtggcggcgaccggcagatgcgcctacctgcgctgcgccaacctgggcggcgagggcgggctggcggcggggcagggcgagggcagcaagcggtgcagcgcctgccgttccgtgtggtactgcggcaccgcctgctcgcacgccgactggcggcagggcgggcacaagcggacctgcaaggcgttggcagcgctgcggcagcaggccaagcagcagagggagaaagagggcgatgcatgaagcaaagcacctg

SEQ ID NO: 5394 - DNA, 526 bp, Chlorella sorokiniana
  Clone ID: LIB3602-077-Q6-K6-F7
gcaagggtgattgcattacatgtctggccgccaggcagggctgcggccgtgtgtcaattcagagcatgaaattcaggaagcgcaaaagcgaagcaagcaaaacacggggggtgctgcgctgagcgccgctcgggcggcaggctgggcagccgtcgtcctcgcaggttggatgccggtgtgccctggtcgccacgactgtttgtgggtgctggtcagcagcttgttgggtgctgcccggatcaaaagcggaagtcgggctccacatccatggcccacaggaacttggtcagcaggctcttgttgaacaccttctccatcggcacctcgttgcgcttgcaccaggccactgtgatgcgcgggtcgaggtagttgatcttggaggtgcccagcgccaccgtcttcaggtcctccttgttcttggcctggatctccgtcttggacatctgctcgcgcttgcggtccagcttggcgcgcaccgagtccgcgctcttcacctttccgtccttgccgggcttgccggccttgg

SEQ ID NO: 5395 - DNA, 589 bp, Chlorella sorokiniana
  Clone ID: LIB3602-077-Q6-K6-F8
acgccgcgcagtggtgaaccacaccttcttctgggagtccatgagccccacggcggcggcaagcccagcggcaaggtggctgaggccattgaccgcgacctgggcggctacgacaagttcgtggaggccttcaaggccgcgggcgccacccagttcggcagcggctgggcgtggctgagcgtgaacaagcagggcaagctggaggtcaccaagacccccaacgctgagaacccctgggtgcacggctccacccccatcctcaccatggacgtgtgggagcacgcctactacctggatgtgcagaaccgccgccccgattttatctccaacttcatcgagaacctgatcgactggcagcgcgtggagcagcgctacctggccgccaccaagcagtgagcagccgctgcccccagcagcgggctcgccctgccatgccgagcggcggcgccgcctcattgcggcggcccgccgcccgggagaacgcacactcccacacttgcgcacacaaacgatacgccgcccccacgcacttgttgtctgattgttctgaagcatttcattttgcacccaccgagtgtaagccctccaa

SEQ ID NO: 5396 - DNA, 407 bp, Chlorella sorokiniana
  unsure (1)..(407): unsure at all n locations; Clone ID: LIB3602-077-Q6-K6-F9
agcaagaggccccntagnagcagaagtcgaaggaggcgaaggcgcttgccgccgccaactccagcaagggcaagaagaagaaatggtccaagggcaagctgaaggagaaggtgaacaacctggtcctcttcgacaaggccacctatgagaagctgctcactgaggtgcccaagtacaagatgatcactccctcggtgctgtccgaccgcctgcggatcaacggcagcctggcgcgcgccgccatcaaggagctgctgggcaaggggctgattaaggaggtggccaagagccgcgcgcagcagatttacacccgcgcgacggcagccgccagctaagcagccacccagcagtttggcagcatgctagtgcactcgttgtgcttgccaatctggtaacaggtccctcgc

SEQ ID NO: 5397 - DNA, 374 bp, Chlorella sorokiniana
  Clone ID: LIB3602-077-Q6-K6-G1
taaaaaaaaaaaaaaaaaaaaaaaaaaaaaaaaaaaaaaaaaaaaaaaaaaaaaaaaaaaaaaaaaaaaggggcgggccggttcttagaggaatccaagctttacgttaccgcgtcgcatgcggacggtcattagcttctttcttataggggtcaccctaaaattacatattcactgggcccggtggtttttacaaccgttcgtggactggggagaaaacccttggcggttcacccaactttatatcgcctttgcaagcacaatccccctttttggccagcttggcggtaatacgcgaagaagcgcccgccaccgtatcgccctttcccaacaagttgccgcagcctgaaatggcggaatgggaaccgccccct

SEQ ID NO: 5398 - DNA, 560 bp, Chlorella sorokiniana
  Clone ID: LIB3602-077-Q6-K6-G10
tcgatccacggcgacaaatcgcagcacgagcgcgactgggtgctggctgagttcaaggcgggcaagcaccccatcatgattgccacagatgtggctgcacgcggcctagatgtgaaggacatcaagctggtcattaactatgacatgccctcttgtgcggaagactacgtgcaccgcatcggccgcacgggccgtgcgggcgcttcgggcatggcctattcgttcttcaccgccaacaacggccgcatggccaagcagctggtgtcgattctggaggaggcgcaacaggtggtgccgcctgagctgcgctcctttgcgcagaccagcggcgggcccgcctcgttccgccagcgcggatgctgccgcggcggcggcggctcccgcggcggctactgctgcggcagcagccccagcgggagcaatgtgtcgccgatggctgccccaggttgctgcagcagctacaggtcatatagcaggaccagggctggctggtactactgaagcccttgatgctgactgcctgaatcgtcgtgctgagcttcgtcctggtctgctgatct

SEQ ID NO: 5399 - DNA, 539 bp, Chlorella sorokiniana
  unsure (1)..(539): unsure at all n locations; Clone ID: LIB3602-077-Q6-K6-G11
gaagagccaaanatgagaaatgttgacccacccacaatgatgctgtacagttgccctttttgcaaaacgaaccttttccgccacgctgcctggcccggcctcgcgcgcggtacgatgcctgccgagggctcgccgcccattttgcatgactccctaggctgctggccagccacgcgcccccaagctgcacctgttttccctgtttcctgcccatctgtgtaccccttcagcccccctgccgacccgttttttcctgcccccatcctcacccaacccacaagccacgcggcccacaaacgcatttggttgcaccgccaccctctcagctgcccttcagagtaccatctgaaagctaagcataacgccaagccactgctcgctcctttcggatcgcccatttggttggttgtcggcccctcttccaatcggccccgcctcgacttgatcctcatcacgtccgcttttgtctgcactcctcaggggcgtgccaattgtgcgcgccgccgttgtatcctgccaactgtaacattaatgactta

SEQ ID NO: 5400 - DNA, 583 bp, Chlorella sorokiniana
  Clone ID: LIB3602-077-Q6-K6-G12
tgtagcctaacaaccagcaggcagcggcgaacaatcatcccagccaaagcccgaaaccaccccgcacactgtgcagcaccccagccgcttgcagcaacctccaggcagttcggaggaggccatcatgcagggcatggcagcgcacgatctgattgagcatgaggaccagtacctgccgcacggcgagctgcgtgcagcggccctggtgggctcgccgccacgtgctcgcctgctggcccggccccgccagcccgagccccacctgccctccctgtcggagaaggagctggggaaggggctgcatgtggacccaactgagcgggcgggccacccgggcgtgccctgcgatgctctgcccaccggccatgcgcacaggctgcccgcctacaaagatgcccgggacatgcagcacccagaagaggctgatgctcccctgctggtggatgtgactgctgagggcggcgcacagcaggcccaggagcagcagggggaacagcagtagttttttccagccctgtaggcgctgcgcctgccggcagcgctgccgccagctgttgcagctggcaagcgtatgcaggggggc

SEQ ID NO: 5401 - DNA, 368 bp, Chlorella sorokiniana
  Clone ID: LIB3602-077-Q6-K6-G2
gccgcgccttcggcggccgctccacgccaaggctcggtgacccctgagcaccacgccaaggcggcgggcggcatcatccgccacgcactgcagcagctggaggcgatgggcctggtggagaagaaccccgcggcccagggcggccgccgcatcactcccgagggccagcgccagatggacctggtggcgggcggcgtgaccgtgacccgcttccactacctgggctgagcagcgcgccgctggcgggccgccgcacagccgcagcgcgcgggctgagcgcggcgccgccgcatgcgccgcggccgtcccccgccggcacgcatgccctcatgtgttggcagccgcaggacgtgtaagaggacttcgcg

SEQ ID NO: 5402 - DNA, 558 bp, Chlorella sorokiniana
  unsure (1)..(558): unsure at all n locations; Clone ID: LIB3602-077-Q6-K6-G3
cccacgcgtccgcccacgcgtccgcgggcgcgtgggcgctgtgtcggaggggctggacggcaaggaggaagcgctgtttgaggagatgggcgttgacagcgacaagacggtgggcgccgactttgagggggccaaggcgctgctgcagccgcccaagaagctgcggcggtagggtggcgaccatgtaccaagcagcagcctgcagcaagcagccagggcggccttcagcagcaggcgggggtgcccttgttctgcagctgcccaagaagctgcgacggccgtagggtgacctgactactacactgcactgctacgctagcaggcagatgcgcgactctcagacagatgataatgcatgacatgactccctttttcgctcacacctttccgtgctctatgtctccacagccgcacaattttgttctgcctgttctcgttcctgcccacacggtgctgtaagcagcgatgcttgncnnaaaaaaaaaaaaaaaaaaaaaaaaaaaacaaaaaaaaaaaaaaaaaaaaaggccgnacaataaaaaaaaaaaaaggggcggc

SEQ ID NO: 5403 - DNA, 506 bp, Chlorella sorokiniana
  unsure (1)..(506): unsure at all n locations; Clone ID: LIB3602-077-Q6-K6-G4
tcctgtcgggcaagggtgaaaagcaccaanatgaaccgcacgattgtggtgcgccgcgactacctgcactacatcaagaagtaccagcggtacgagaagcgccacaccaacatctcggcgcacatctcgccctgcttccgctgccacgagggcgacaccgtggtcatcggccagtgccggcccctgtccaagacggtgcgcttcaacgtgctgcgcgtcatccccgcgggctctggcgccaagaagggcttcggctccttctaagcaggctggactaagggcctcttgccttgctggctgaagccctcgacagcagcagcagcagccccagcacggcatgcaagcgctgcagacgccctgctgccctgagtaagcgccgccatgtgccggcggtggcagcagcaccgcccgccttgcatacacctggcccctaggatgccggccacggggtgcccagtagtcgccagacggcggggcgcagcgcatgtaaccgtgtgcatgaagtg

SEQ ID NO: 5404 - DNA, 587 bp, Chlorella sorokiniana
  Clone ID: LIB3602-077-Q6-K6-G5
gcccgcagctgctgcacactcgtgcccaaggcgcccaaagcccccgacacttccctgcggttgcacaacactccgcaatggcgctctcgttcccgcgcggctttgccaccgacgacttctttgcgcccttcttcacgggcttcccggacatgagccgcgagttcactcgcgcactggcgccgctggagggccaggccggcacccagctggccacccgtggcgtgccgatcgacgtggtggagaaggacaacgccttcgaggtgaaggcggacctgccgggcgtgaagaaggaggacatcaaggtcacggtggacaaggacgtgctgcgcatcaacgtggagcgcagcgaggagaagaaggaggagcaggaggggcagggcctgaagtggcaccgctacgagcgcagctcccagtttgtgggccgtgcgctgcgcatgcctgagaacgccaacctggacggcattcgggcgcgctacgagaacggcgtgctcatgctggacgtgcccaagaaggagcaggctaaggaggagaccaagcgcatcaccatcggctgaaccgctgctgccgccgcagcggccggcgatggc

SEQ ID NO: 5405 - DNA, 582 bp, Chlorella sorokiniana
  Clone ID: LIB3602-077-Q6-K6-G6
gttctagtacgcgagcgggcgccctttttttttttttctttttttttgtttgtacacgccatggctcccaaggtttccaggtggaacttccccggcgcttacgccgtgcagttcatgaccgtggagtagtgcaccgcctgcgtgtacacttgttaccacttactggtcaagaacccggatgtgcactttgtcaaggagctgaagcaggacgagctggcggagagcgcgcggtggtcccagcaggccaaggccgtccagggcaacgtgttccgctggctggcgcagacgcgcgacaccgccgcgggcgagcagaaggacacccgcatcttccgcgtttgagcgcccgtcaggctgctgcgctaaatcggcgcgcaataccagccgctcaccgccactcgccgccgctgcgcccccctgtgcttgctctcagggcctgaggccctctgtcagtcaggcacctggggccggcacccccttgccgttatgatatgcgtccccaaagctggagtgaggcattgcggaacccaatgctgtttttccaccgccctgcttttaatatatctgcctcgaagcacggctgac

SEQ ID NO: 5406 - DNA, 615 bp, Chlorella sorokiniana
  Clone ID: LIB3602-077-Q6-K6-G7
gaacaaacaaaacgccacctgaaagacggagccacaccaaaaataaacacaaaaactgaaacaatacaaacacagaacatgaaagagaatagccggatacaccaaagactcaaagcacaaccagggacgccatacgcaaagcaagctaaagccatcgctggcgtggacctgctggcagtaaacgccatgtcgcctttctgccgcgagcttgacacagacttccgctgcgctgcgtgtgcttactggacgcccagtgtggcgcgcggctacggccctgtccctacgtcagacccaaataaaatcgactgccagcccaatgatggctttgtggtcaaggacgccaaaaccggcgggcgcgtaaacagcagcacagctcagcccgttggccgcaatgggtgctacatgaagcgggcctacatgcaatactgcctcaagtgctcggacgatgggctcaagtgcttggctaccaaggatggaaagaagtacgggtgcacgggcgggcgctccatcgacatctatggcatgtgctccaacaactgcaaggggatgtttggcatcgcctgcaaggcctgtaactcccagtcctgctgtgagctcgacacggcgtacgcaagc

SEQ ID NO: 5407 - DNA, 548 bp, Chlorella sorokiniana
  Clone ID: LIB3602-077-Q6-K6-G8
cggccgcgtgggctttgcgcaggttgctaaggaggagacaagatggtgactcctctggtgcgcgtgaagagcatcaagaagcgcaccaagcgcttccagcgccaccagagcgaccgtaggatcacggtcaaggagagctggcgccggcccagggtattgactcgcgtgtgcgccggaagttcaagggatgcggcatcatcatgcccaacattggctacggcaccaacaagaagacccgccacgtgctgcccaacggcttcctcaagtttgtggtgaacaacgtgaaggaccttgagctgctgctgatgcacaaccgcaagtactgcgccgagatcgcgcacaacgtgtccaccctcaagcgcaaggcgattgtggagcgcgcggcggagctgaacattgccctgaccaacggcaacagccggctgcgcagccaggaggacgagtaagctgctcgcccccctgcgtcaccagcagcggcgccagtaccttgggagcatagcagcggcttacattggggtgctactgctcccatgtaaggcaccccaatc

SEQ ID NO: 5408 - DNA, 598 bp, Chlorella sorokiniana
  unsure (1)..(598): unsure at all n locations; Clone ID: LIB3602-077-Q6-K6-G9
ggcagcacactgtcagacacgagtactaccaccacgagctgaacggcatgctgaagcagagcagcctcgcgaagtcgcggcaccatgcatctgatcagagacgcagcacgcagtagccagctagctggtggggagtagcatccactggctccggctctgcaggctatacctgcatcaaccagtcaaccatgtcattgtagtgaagtgcccgagtactggagaccgcactcagactacactaccacagcacccacacctgtacataacgtgccaccaaccatctgccaaactgtgttacatatcacctgcacagacccaaccgttggagacactggggtgcagcaaaactacatgacccctctgtgagcactcatgttgatgaccaacgcggctcaatgctttgatgctgccacaagacacctgcacctgacatgacatcgctctcaccgaaaaactgaaaaccacatggagcgcctttaaggatgccgcacccctgctggtcttccccggcaaggctgtggtggccttcccgctgatctatcactacatgggcaggcgtgcgccacatgtactgngaccatgccaagtacggcaacca

SEQ ID NO: 5409 - DNA, 530 bp, Chlorella sorokiniana
  unsure (1)..(530): unsure at all n locations; Clone ID: LIB3602-077-Q6-K6-H1
gcctactacgctccgttttccccgtctgcttgcgctcctgttcccccgaacagcatccagctcaaacgaacgaatccccatggcactgccatatctccccccatctcacctggttgcaagcagccgcggcgcgcggcgcggctggctccccacccccgcctgccgcccgcccccagcccctacccatgctactacggctgctgcacgcactactggggcgccacccctgtcaccccttcacttggcgccccgccccccccatttgtcctagcccttcaatcctcaagaccctagcccaccctgtcttgctgcactgcttacttactaatcgatctctaagggggccagggcctaacgccgcagcgctcaaacctccccagctgcctccctgccccacgtctctaagggtgtaactaagcgtctacaaaacaagctcaggcgctgagaggcggcggagcggtgcagcctgtatgcacggcgctggcggcaggcacagcaggcacagcaggcggnggacataagctcacctg

SEQ ID NO: 5410 - DNA, 499 bp, Chlorella sorokiniana
  Clone ID: LIB3602-077-Q6-K6-H10
aaaaaaaaaaaaaaaaaaaaaggggagagggaggggaaaaaaaaaaaaaaaaaaaaaaaaaaaaaaaaaaaaaaaaaaaaaaaaaaaaaaaaaaaaaaaaaaaaaaaaaaaaaaaaagaaaaaaaaaaaaaaaaggggggggcggtttttggggttatttttttttacccaccggggcttatggaagggggggggggtgtttttttattgtaacgcaaaattaaattaatgggggccggggttttgaaaaggtggagtgttgggaaaaatcttgtggtttggccaaatttttatggttttggggggattttcctttttggaatggggggttggtagggaaggggctttgcctgttgctttttccaaagtgtggggcatttgtgtgtggtagggggctcccttttgtggggggtttttgagggggggggggtgggggtttatcgggtgggggcgttttaatttgtgtggttctttaggggctgttttttggtgttttttc

SEQ ID NO: 5411 - DNA, 582 bp, Chlorella sorokiniana
  Clone ID: LIB3602-077-Q6-K6-H11
cgtagcaatgggcatggtgaactgccagtgcacagcttccggagcttggaaaagttggccctgccactcaacgagtgtttgctttgattgacagcacaccagggattgatgttcacaaggcaggagctgagccccttattgacggcgacgtcgagttgaagagtgtgacttttgcgtatcctacgcgaccaggcaggcttatattcaagcaattcaacttgaaagtccaagctgggtcctcttgtgcactggttggcgaaagtgggcatggcaagtccacaatcattggccttctggagagattttatgacccagtcgatggacagattttgattgacgggcttgacttgcaaactgtgagcattaaatatctcaggagccaaattggtctcgtgggtcaagagcctatcatgttcagtgccaccattttggaaaatataaaaattgggaacccaaatgcaactatgtctcaggtagtggaggcagcacgcatttcaaatgctttgtcttatattgaaaaacttccggaagcttacgacactcgacttggagaaggcggtgtacaattgagcggtggacaaa

SEQ ID NO: 5412 - DNA, 559 bp, Chlorella sorokiniana
  Clone ID: LIB3602-077-Q6-K6-H12
gggaggccgacgagcggcggcgccaggaattctgggcagaggtgcttggcggggaggggcgcgcgcccgcctcgtgcactccggccgtgctggagcacatcctgcagcagcacatggactcgccctccatgctggccatcttccccatgcaggacctgctgccgctgtcgtcgcgcctgccagacgtgcccgcagcgatgcagcaagtgaacgagccgtccaacccggagcactactggcgctaccgcctgcacgtcagcctggagcagatccgggaggacagcgacctgcggcacctgctgtcagacatgctccaagcggcgcagcggtaccacggcgaggcgccacgcatgggctgatgcatggacgccttggctgccgggcagctgacaacccatgcgtgcgccctgcctgcaagcttgccagtgtgcaaatatgcacaataggctgagcttgcatgctgaatgtgtgtgatagagagaggcactgctgtttatacaacgtgacgaaacgtgatgtgttgatgtgtgacagattggcattgttacagccagaaggg

SEQ ID NO: 5413 - DNA, 167 bp, Chlorella sorokiniana
  Clone ID: LIB3602-077-Q6-K6-H2
caggttcccgcccgagctgctgtgctgtgctggcttgctgtatcgacccaccaacccaaccacgccgtgcataccctaccccctctccctttgccgctgctgccgctggccgcgcagattttgcatgtgattcctcacaccccgtgtccctgtaaatcttccactgc

SEQ ID NO: 5414 - DNA, 548 bp, Chlorella sorokiniana
  Clone ID: LIB3602-077-Q6-K6-H3
ctgtggggtctcaggagcaggatggtgaagttcctgaagcccgggaaggtggtcatccttctgtccggccgctatgccggcaagaaggcggtcatcgtgaagaactacgatgatggcaccagcagccgcccctacggccacgcgctcgtgtgcggcctgtctaaggagccccggaaggtgatcaagcggtcgtccctcaagacccaggcgcgccgctccagcctgaagaccttcatcaaggtggtcaactaccagcacatgatgcccacccgctacacgctggaggtggacctcaagggcgtggtgaccgccgagtgcgtggacaacagcaccaagaaggtggaggccaacaaggaggccaaggcgctgctggaggagaagttcaagagcggcaagaaccggtggttcttcaccaagctccgcttctgagggagtttcttggagagcctaggttgcagcagccgtgacgtgacgtgctccttgccccgagacgccatgtaacgtcacaccccgcagaaaaaaaagaaaaaaaaataaaattaaaatgt

SEQ ID NO: 5415 - DNA, 490 bp, Chlorella sorokiniana
  Clone ID: LIB3602-077-Q6-K6-H5
agcagtgctgctgcgcccctcctccaggtgctgatcaagttcctctcgctcatgatgaagcacggctacatcggcgagtttgagtttgtggacaaccaccgctcgggcaagattgtggtggagctgaacggccgcctgaacaagtgcggcgcgatctcgccccgctacgacattgcggccaaggacattgaggcgtgggtgggccgcctgctgccctcccgccagttcggccacatcatcctgaccacctcccagggcatcatggaccacgaggaggccaggcggaagaaggtgggaggcaaggtcctcggcttcttctactgagcggccttgttggatgcgccgcagcagccacggtggaccacagccgtggcggatgcagcacggccggcgcgcccggccgcggtgtttgctgcagcaccggcggcagccctgggtgctgcccccctcttagattgctgcaccgcacggttgtaacagaggttacatg

SEQ ID NO: 5416 - DNA, 575 bp, Chlorella sorokiniana
  Clone ID: LIB3602-077-Q6-K6-H6
cctgccctcaaccgcttcacccgcacgctggacaagaacatggccgagagcctgttcaagctgctgatgaagtaccggcccgaggacaaggcggccaagaaggagcggctgctgaaggaggcggaggcgcgcgaggctggccaggaggttgagaagaagaagcctgtggtggtcaagtacggcatcaaccacatcacgcagctggtggagagcggcaaggcgcagtgcgtggtgattgcgcacgacgtggaccccattgagattgtggtgtggctgcccgcgctgtgcaagaagatgggcgtgccctactgcatcgtcaagggcaaggcgcggctgggcaccgtggtgcacaagaagacggccaccgcgctggcgctgacggcggtgaagaacgaggaccagcgcgagttcgccaagctggtcgagtccttcaagaccatgtacaacgacggcccccgcgtcagctggggcggcggcatcatgggccccaagagccaggcggcgcataagaagaaggagcgggctctggccaaggacgccggcctccgcgtgtaagcgggcagcacccaactgcc

SEQ ID NO: 5417 - DNA, 291 bp, Chlorella sorokiniana
  Clone ID: LIB3602-077-Q6-K6-H7
cggacgcgtgggtgataacatcaagtcggccggcgcaatgaagggccaggcagtgttctccattgccaaggtggatgctgccaccggcgagattgctggcgtgtttgagtctgtgcagccttccgacactgacctgggagccaaggcccccaaggacgtcaagatcactggcctctggtatgctcagctttcgtaagcgctgccagcgcccgtcgtttggagaagagaattacagctttgtcgctcgacctgtttgtcagacgtagaactgctcatgtaacataagcgcgc

SEQ ID NO: 5418 - DNA, 593 bp, Chlorella sorokiniana
  Clone ID: LIB3602-077-Q6-K6-H8
gcctccgtcaacgacatgacccgcggcaacgactggttcctgctggccaacgactttgcgagctacatggacgcgcaggacgaggtggacaagctgtacaaggaccaggaggagtggacgcgccgctccatcctgtacaccgcgggcaacggcttcttctcctccgaccgcaccatcgaccagtacgccaaggagatctggaacgtgcaggcctgccgccaggcgtgagccaagcaccaagcggcttccatgccagcctgaggcgccgcgctgtgctgtcccacgccgccgccgcccgcccccagccctcacattgtggagcggtggcgtggcagcacatcccgatgtccccccaccagcactgcagctgcaaatgcgacccctgggccccattctctgcccctgatatgaaatgaatccctcctttgggcacacgattcgaatcgggatcgcccagggggcgaagctttagttgtattagaaatcattttgttgcgtcgtttcggcccttcctgactctacctgccttctgagtagtcgaacagtctctgcccaacagccaccgccctggctctctgctgtctgtttacagt

SEQ ID NO: 5419 - DNA, 375 bp, Chlorella sorokiniana
  unsure (1)..(375): unsure at all n locations; Clone ID: LIB3602-077-Q6-K6-H9
caggtccgctactcgcagctgttccccgccatcaccccgcccggctcgtacacagtcaccctgaacggccactcgggcgcggagcagctgttctgcgtgacggtgcccttccaggtggtgcncgccgcaggctgccgaggtggcggcaggctgggaggctgccctgggtgaggcggcgcggcagcaggcccttaccactcaccgcaagcgcctggcagcgtgagagcaccgctggtgtaagcaacaggatagccaacaacccatcggctgctgcctgccgcatgccggcactctagtgcacgcaccacgatagcaacagctggncggcgcatgccggcaggccgtaacctttgtatgcttacccccctacgttct

SEQ ID NO: 5420 - DNA, 291 bp, Chlorella sorokiniana
  unsure (1)..(291): unsure at all n locations; Clone ID: LIB3602-078-Q6-K6-A1
gggnnaatgcttgttccccgcctttcctgcaagcgagagcgactgcccactttaccttcctgccttgccgccgcctggccatccacctgcagtgttctgcgctttccacggagccgtgggcttcatggtcctgggcattggcttcatgtttgtcaccatgacgtgggccaactgggtgggcttcatggcttatggtcaagtcctggccagcacgctcttcctcatttctgggctggcaggaatgctggagcagggcaaccccggccacttgtgaggctggggatgcgcatg

SEQ ID NO: 5421 - DNA, 387 bp, Chlorella sorokiniana
  unsure (1)..(387): unsure at all n locations; Clone ID: LIB3602-078-Q6-K6-A10
tcccgggttcgaacccacgcgttttcggctgggnagcagnngccgccaagtacgagtaataagaaaggcggcagaggagcgcaaggcggcggagcaggcggcaaaggcggccaaggaggcggccgaaatgggtctgcagaacgcgatcggcaagatgtaccagcacaagaagatggagaaggcagtggccgccacgcccaacctgactgctgccaccgccgcgcccgccggtgccggcggcaaggcggcggccacagctgcggcggactccaaggcaaagggtggcaaggcggcgggcggcaagaagcactaacgggtggctgggcagcagtctgatccaccgtgcgcgtgccacttgctgcgcttggtgactgcatctgcccaaag

SEQ ID NO: 5422 - DNA, 579 bp, Chlorella sorokiniana
  Clone ID: LIB3602-078-Q6-K6-A11
ctcgcccgcctcaagcggtgcagcgctgagcggctgacccaaatccacagcacccaggggactgcgctgcctccgccaactggagtcccgcccgcctgctgctgagcggcaggcaggtggtggcggtgccgcgctgtgccccatccaatccatcctatcgatgccgtccaggacttgccctgccttcggacttttctcagcagactgcatgctgatcgccaccctccggcctgccttccccctcttctctgggcttgctgcctccctggcaacagggctgcggctgcccgcctcagtttctcccaatgcgattgccccctcacagcctccgcagctccccacctgcctagcctcactatgtttcattgccacccgctctgccccccacacgagccgctccttcatctcaatgcatgtagctgtattgtatcctcccccacacatacccgctctcggacaagaagcccaacacacgccttgccccctcccgatctgtcccccaccggcgatccctttgccttttcatattcattgcgcgcagcgtgcgccttccgcagctcatgtaatgctggctgtttg

SEQ ID NO: 5423 - DNA, 329 bp, Chlorella sorokiniana
  Clone ID: LIB3602-078-Q6-K6-A12
cagccctcacattgtggagcggtggcgtggcagcacatcccgatgtccccccaccagcactgcagctgcaaatgcgacccctgggccccattctctgcccctgatatgaaatgaatccctcctttgggcacacgattcgaatcgggatcgcccagggggcgaagctttagttgtattagaaatcattttgttgcgtcgtttcggcccttcctgactctacctgccttctgagtagtcgaacagtctctgcccaacagccaccgccctggctctctgctgtctgtttacagtgcagtgccttttgtcgcctgtgtaaagtgaacatgttg

SEQ ID NO: 5424 - DNA, 325 bp, Chlorella sorokiniana
  unsure (1)..(325): unsure at all n locations; Clone ID: LIB3602-078-Q6-K6-A2
tcgcaccaacaacaccacacatcatgcttgctcacccggccccgcgcaagcgggactgcgccgtccctcaaacttccccctgccaatacttancccttttccggatgccgagacgatcacaacgcaacaatgtgtgaacagagctgatcaaaaaaaaaaaaaaaaaaaaaaaaaaaaaaaaaaaaaaaaaaaaaaaaaaaaaaaaaaaaaaaaaaaaaaaaaaaaaaaaaaaaaaaaaaaaaaaaaaaaaaaaaaaaaaaaaaaaataaaaaaaaaaaaaaaaaagaaaaaaaatgggaaaaaaattaaagaaaaaaaaaattaa

SEQ ID NO: 5425 - DNA, 250 bp, Chlorella sorokiniana
  Clone ID: LIB3602-078-Q6-K6-A3
tcgaaaaaaaaaaaaaaaaaaaaaaaaaaaaaaaaaaaaaaaaaaaaaaaaaaaaaaaaaaaaaaaaaaaaaaaaaaaaaaaaaaaaaaaaaaaaaaaaaaaaaaaaaaaaaaaaaagggggcggccggttttaaggggaaccacaagtttcacgtccgccgttgcttggcgaacgtcttaagttcttttttatggggccccctaaaattaaattacacgggcccggggttttaacaacgtgggggcctg

SEQ ID NO: 5426 - DNA, 193 bp, Chlorella sorokiniana
  Clone ID: LIB3602-078-Q6-K6-A4
ttcggaaaaaaaaacaaaagaatgaagcaagggggggggcgctaaaaaaaaaaaaaaaaaaaaaaagagaaaaaaaaacaaaaataaaaggacgcgcggggccgctccctgtaggggcccgaggtctaggccgtcgtgggcgtgcgcctgccctttttttgtggggccccgttcaacgttttggggggggggg

SEQ ID NO: 5427 - DNA, 520 bp, Chlorella sorokiniana
  unsure (1)..(520): unsure at all n locations; Clone ID: LIB3602-078-Q6-K6-A5
ccgggttcgaccccacgcgttcganaaaaaaaaaaaaaaaaaaaaaaaaaagaaaaaaaaaaaaaaaaaaaaaaaaaaaaaaaaaaaaaaaaagggaaagacaaaaataaaagaacgggcgcttcacttacacagggcctgcgatttcttacctttgctttcggggcccctaatttcatttgggtggccctcatttcacaacgttgggcggggggagaccctggcgtgaccgaaaaaacccggctggtaccacaatctccttttcctccccctgctttcctatttagcaggccggcgccgttcggccttggcccgagctgctcagcccttcctggcaattgggcccccccctgggggggcgcatcacgccctgtgggggtgctttttacgcgcagggtgtcgggttctacttgccaggggcctagctccctttccttccccttacttccctttctttctggtcactttccgtcgcttttccccgacattctctaattttcccctccttttatggttccgg

SEQ ID NO: 5428 - DNA, 375 bp, Chlorella sorokiniana
  Clone ID: LIB3602-078-Q6-K6-A6
gcggcagccatgcggcctgcaccggccagtagcttggcagacccattcgccggcctgcagctgcgtggagccactggcaacgcaccgcggcgagcggctgtcccgcagcagcaacagcagcagcagcaggtgtttgatccatttgcgcttggcagtgcggccccaggcggcagcagcagcagccctcagtggccagcccgggtgcagcagcaggccgctatgcagccaccggcaggcggctttgcagcaggtgcggatggttcgcttatctgatgtgcacaagccttccgcccttcctattatctgatgcaatgcgcttgacgcaccatatcccattgtgggctttttgcttctgctgtgtggaagacgctctat

SEQ ID NO: 5429 - DNA, 262 bp, Chlorella sorokiniana
  unsure (1)..(262): unsure at all n locations; Clone ID: LIB3602-078-Q6-K6-A7
cgcagggcggctgccgcccatcaaggtcaagtttgagatcccctactatagtgtcagcggcatccaggtcaggtacctgaaggtgattgagcggagcggctaccaggcgctgccctgggtgcgatacctcacacaggccggcagctatgaaattcggatgggatgaagtcattttttccctccctctccctgccccgtgtcgccgtcaggagatcctacccatgtaacattaatgctgtcaaannaaaanaaaanaanaaaa

SEQ ID NO: 5430 - DNA, 564 bp, Chlorella sorokiniana
  Clone ID: LIB3602-078-Q6-K6-A8
agcaggcgtacatgcatcgcacgactgagggctgccatccgcgcctgcgccacttgcggccgtattctttgacaactctggcccgccgcgccgccctccccgggggcggctgccccggcgcgcgacccaaagactctgcacagctgctgggcccgtctgcgtgccctacgcatatacacacccggtttttccagaccatttggtttttccacggcctagcgccgtgcctcctgagatgagggcccgtgccgccccccttgtgtacccgcttttgtagaagcctggcgcggcgccgggggtgctcgccgcctggcgtgcccccggtgccccctctccgccggcccccgcctgtaccctagcgaattcccaccccacactggatcgcacgcagttttggatgcgctggactagaatccatagcgtctctatcccctttgccgctctggcgccctttttgtgcatcccacccccatcaaatctcatccgacattgataccgccctgattttgtgagtgatcgaatgacgaagaatggggttgcatggtgtaatcggatagcgtcgcc

SEQ ID NO: 5431 - DNA, 481 bp, Chlorella sorokiniana
  Clone ID: LIB3602-078-Q6-K6-A9
tcggcatctctgtatagcagcggcagcgcattactgcttgccttgctcctgcccctgcccgtccaggtgtctgctcgactccaacccgttcttcgacccgcggcgccagcgctttgttctgcagctgttcgaaggccaggagcccacagcggatgactttggagtggtcgagagttgcgtggtggagatgcggcgagaacgaagcgtggagcagattgtgggctggtgccaatccatgagcggctgggcggcgtacgaggcagcccactccggtgcagctcagcggctagcagccgacttgcaggcagcgcttggtgtggatgcatgcacgccagtgcccatggtgtggccgctcacaatgctgctggctaaacagccgcgtccgctgcgataacgctgggaggcatgctctgggcctgccacacatttggcaatacttgcatcaccttgctgtcaacaaaaccacgtaatgaacggacac

SEQ ID NO: 5432 - DNA, 621 bp, Chlorella sorokiniana
  unsure (1)..(621): unsure at all n locations; Clone ID: LIB3602-078-Q6-K6-B1
ccgtccggcacgagctggnggcacnnaaccttcaagtgggccacnngcgagcggcccctctgctgccatccccggcaccatcgatgaatacggcgacgactcgtgcgccatgggctcctgctgcttcaaccgctgcttcaacacgccccacgccttccagctgggctggatcagcgcgcaacagcgggcagccctggcccccgggcagagcgtcagcctgcagctgcccagccagtcggttagcgcggccggctcggcgctgcgagtggtccccacctgggcgcccggtgtaccagacctgtggctgggataccgcacaaaggcgggcggcgatgcggaactgtttgatgccttcgccggcaagctcagcgcctacacgctgcagcccgccaccgacttctctcacccccaggcgtcgctgctgctcgccaccctgccagctgggaaaggctgggcatggcagcctgccggcctctccgtctgcatgcacagcgccacaagccagtacgctttggtcacgctgtgccggccagccgctgggcaggcgtgtgcctgcacagtggaggttgctcccagcatcagaatagttgtggccacgccccgcaagaaatgaggcgcccg

SEQ ID NO: 5433 - DNA, 601 bp, Chlorella sorokiniana
  Clone ID: LIB3602-078-Q6-K6-B10
gccatgattacggagttctgcggcaagggcagcctgacagacgtgctcaaggcgggacgctcctcgcccgccaaggccgcgcagctgccctggacgcgacgcctcaacatggcactggatgcggcaaagggcatgctgtatctgcacaagcgcggcatcatccacagggatctcaagagccctaacctgctcatcgactctcagtggcgctgcaaagtggccgacttcaacctgtccaagctggttgagggcaccgagagcagcaactccaaaacgggcacgatggcgggcgccaaccccaagtggctggcgcccgaggtgattggcggctactcggccacagagaagggcgatgtgtggagctacggcgtggtgatgtgggagctgctgacctgggacattccgtggaacaaggtctcgccctggacggtcgtggcaaccgtcatgaacggcggctgcctctccatgccgcccctggacgaccccgcacagccgctgcccggcactgcagcagacaatgctgcctttgcgccgcatctgccggcctacatagcgctgatcaagcgctgctgggcgcagatagcttacgaccggcccacgt

SEQ ID NO: 5434 - DNA, 571 bp, Chlorella sorokiniana
  Clone ID: LIB3602-078-Q6-K6-B11
ccgcgcccagcaaggaggtggacgaggcggatgatgtgccggacgatgctgaggaggctggcgaggatgcggatcttgagctggagggcagccgcagcatcgcagagcagcagcatgcagacgcgccgccgcagtgagggtatggtatgggcggtgtagagcagccctcactgcggcgagagcccagcactattgagcagtagcatgcagacgcgccgccgcactgagggcccatgtgcggcttgcatggtgtgcccagtgtcctgccatggaacggcagcgcagacaggagaggctcaatctctgcatcgtcgagcttctctcggggttctctcacgttcccagtggtgccgcacgcagaggctgtgcgcctgatgtttgttttgttctcgactcccccgtgctcctcccgctgtgcttcattttgacttttgtttgtgtattgacagccatcgtgttcttcccccatttgctggtgcactgggtcgatagatgcccctagcaacacacgtgttcgcgtgcatctcaactcatttgtgttgcaacattttgcattgtgacaatcaatgtg

SEQ ID NO: 5435 - DNA, 548 bp, Chlorella sorokiniana
  unsure (1)..(548): unsure at all n locations; Clone ID: LIB3602-078-Q6-K6-B12
cagnagaagagagctgggaggaggggctgcgcaagacggtggactggtacctgcagaatgccaaccgcgagtactggagccacggcgacatggagctggcgctggacgcgcaccccacgctgcagcagcccgtgtttggcagcgccaacctggcggtgcacctggcgtagtgtcgtcggccggccagcgcggcaaggcgtgccccattcagtacgccgcacctgctcggggcgctgagcgcctctgtttctgtactcccctctctgttcatgttctccctgattggctctctccaacttgctctttccacccgtctctttttttcgcttgtgccggtgcccccagtgtcgcttgcttgcaataaacaactcagcttgactgatctttggccaggctctgccacttcatgcggcaggtggcagccagggcgacagcgatgacgaggttgcccgctgctgctgctgctgcttgggctcagtggaacacaccactggcagaccattacacgccatcggcagatcagcctttggtgttatcatactaagatc

SEQ ID NO: 5436 - DNA, 514 bp, Chlorella sorokiniana
  unsure (1)..(514): unsure at all n locations; Clone ID: LIB3602-078-Q6-K6-B2
gnacaggtggcacagcagcagcagccgcagcagcagcatccgggtgccgccgcccttgctgcccagccagcgttcccgagtgctgcgcctttggacgacgcctggcagcacgccttccagccgcagtggccagtggagcaggcacagcaggcgcagcaggcggagcagccgcggcaggcgcgggcgggacggcggcgcgcggcggcagtcgaggaggatgctgactggatggatgatgaggacgaggagatttcggaggattcccagggctctgcaggcgaggacagctaccagccggaggaggcgggcagcagcagtgcggaggagggcagtgagtccgattcagaggggtcgggcggctggggcggcggccggcggagggcgtctggcagggcgcccgcacgcacatcgcagcgtgcacggcggcggtgacacgttgatatgctgctgcctgggtgctgttgcttgttgtcgagtagaaaagttggggcgctgcctgtaatgcatgagcagc

SEQ ID NO: 5437 - DNA, 588 bp, Chlorella sorokiniana
  Clone ID: LIB3602-078-Q6-K6-B3
cgacaaccgtccagagaggaagatcgtgcacatcgacctgaccgccgcggtgctggacaactcgtacgtgccggctgtggaagtggtgggcggcattgccaactccgtcaagtcgctgactgcgctgctcaaggaccgcgacattgatgatgagagcgagctttacaaggagatccagaaggcgcgggatgacctagcacaggcgcgctcggcgcatgccaatgacaagggcagcccggtgcacccgctgcgcctggtgcatgacatccagacgctgctggatcggcgggacggccacaagttcttgctgttcctggacatgggcagccaccacatctaccacgcacgctacttgcaagtgcaccacccgcgccaggtcagcttctccaatgggcagcagacaatgggcgtgtccatgccatgggccatctccgctgccctggatgcgcgggaccccggcagctcgctgcaccgccagtggtccaagccggccatgactgtgcgccagatcagcctgcgaggcggcatgcccaccgacaagcgcatcatctcggtttcgggggatggcagcttcctgttctgcgccca

SEQ ID NO: 5438 - DNA, 599 bp, Chlorella sorokiniana
  Clone ID: LIB3602-078-Q6-K6-B4
ccatctccaacctgggcatgtacggcgtgcagcagtttgcggccatcgtcaacccgccgcaggcctgcatccttgcggtgggcacgacagaggcccgcgtggtgccctccgccacagcaccctccggctttgaagaggccaacttcctgacctgcacgctgtcgtgcgaccaccgcgtggtggacggcgcggtgggagcgcagtggctgcaggccttcaagtcgtacctagaggacccggccaccatgctgctctaagccaaccaccacgctggcatgctgcttggcagcctgccgtggcacatcggcctgccctggcctgcgctgcacagcaccgagtgaccagcatcggctggtcagcggcggccaagccagcacggctgcgccaccacgcaccgcctcagttgcccctctaccttgcacacgtttcagtcctgatccgttctgttacccgtctctgtgcacccccctgaacagcttgtgtgtggttgctccgctgtctcgcgcctttcggagctgcgctccgcctggccccacctgatggtgttccttgtcccgcatcattttctgcttctttcctgcgcactgcacggccacgca

SEQ ID NO: 5439 - DNA, 593 bp, Chlorella sorokiniana
  Clone ID: LIB3602-078-Q6-K6-B5
gtcgacccagcgttcgatcgccacggcgcacaggagttcactccgccgcctgaggagagccgagccatcatccggcaaggctacaccgtgccgcgcaacctgctgctgcgctttgcccaggacgaaattgacgaaacgccgcagctggcctccacgctgcagtcgtcagccgtggcatccatgctggagctgaccggcaagacgctgccgggcgagcacgcacggccgctgcagcaggacctgaaccgcatctcgccagacgtggcgcggctggccagccaggcggcctcccagggcgagagcttcatgggccagctgggcagcctggttcagcaggcgggcctgcctgagcagaccgccaaccagctcacgggccttgccaagctgggcatgggcattgcggggaccatcgcccagaccgtgggctcggccagtgcgccggaggacatcgatgccctggcagacgaaattggctccttctgcggcctcgcacccggcagcaaaccctccaccccggcagcgctgcccgaacgggcaggcagcggtgcaggcggcagcgggcccgtcagcggcagcttcgacgccagcatttg

SEQ ID NO: 5440 - DNA, 593 bp, Chlorella sorokiniana
  unsure (1)..(593): unsure at all n locations; Clone ID: LIB3602-078-Q6-K6-B6
ccagnacgtttagcagccggtgctggctggcacggcactaccccatcagcctggcccacgtcatcccgctgctggaggtggtggccgcggggaacaagcactttgcgcaggcggcgacctacctgcggcagtttgagaattctgaggagacgttcccggtgaaggtgcaggtgccgctcatgtggacggtgtaccttcagctggctttccgccactttgtgctgctggggccgggcgccgaggcgcgccagcccggcttcttcgagctgccgcccggctacacgctggaccgcatggaagagggggacattgtggccaagaaggcggagccgctgctggagcgattcgactcgggcagcagcagcctgccggtgccggagccatgaacgagtggcagccgcgcgctcatggcgcagcggaacccgctcggcctcattggaaagaaccttactgcacaatgactaacttgcaaatgcctgtgctgccaagttcagctcccaaatgcctgctcctgtgtctgccggcacggcttgttgcagggctctgcctgcccgcgctcgccccatgcctagcctcccgccgcccgtgcgcaa

SEQ ID NO: 5441 - DNA, 608 bp, Chlorella sorokiniana
  unsure (1)..(608): unsure at all n locations; Clone ID: LIB3602-078-Q6-K6-B7
ngaagaggacatcaagtccaagcccgagcagatccgcgagaagattgtgcagggccgcgtggacaagattgccaaggagatgagcctgctggaccagcagttcatcaaggacacctccaagaccgtggcggagcacatcaaggagcagattgcgggcatcggcgagaacatccaggtccgccgcttctcccgctacgtcctcggcgaaggcattgagaagaagcaggtcgacttcgcggctgaggtggcggcgcagacgggcggcaagctctgagcggccggccagccctcactgcccccctcctaagcagcaaagccgcccggccctccaggccgagcggcttaaacaacccagcaacgatgcgaggccaaccgcgcccctctctagtctatactcacgtcccctctcctgtccgattttaagccttctgccgacccgctcacagcaccgacaatgccctctcgcactgcgctgcgcggcccagcggcccgcgcctcctcactttttgtgcccagcccgcattggggtggtctgcctatttcattctgggctccctctcgtcccgcccgtccgccccctctgcttcttggccagngcaatgcctagc

SEQ ID NO: 5442 - DNA, 590 bp, Chlorella sorokiniana
  Clone ID: LIB3602-078-Q6-K6-B8
cacctgcctccacgtcacccttcatcaaccctcacccaacccatccacctgccacccatccactcaccttccctccgccacaacctctgccacccactcaccacccatcacccgctcaacgccctccatgcaccatcctccccatccaccaaatctgccaccccaaacgcacgtccgccgctgcaccacctgccgccccctcacccgcacccatcttccacccgccacctttcctgccgctcaccgccgcacatcctacctcccacacctcactccatgtccacccttcacccgcgcttcacacagcggctgctgccatgcaaagctgctgccaaacccatccatcatgctcgcacacccactcacccacacgtccaacgtatccagacccattttcaaggcccgactgtacagtgccttttgcgtccttatgccgatctggtaccaggacttaatgtgtaacaaatggtatgttaaaaaaaaaaaaaaaaaaaaaaaaaaaaaaaaaaaaaaaaaaaaaaaaaaaaaaaaaaaaaaaaaaaaaaaaaaaaaaaaaaaaaaaaaaaaaaaaaaaaaaaaaaaagggggga

SEQ ID NO: 5443 - DNA, 595 bp, Chlorella sorokiniana
  Clone ID: LIB3602-078-Q6-K6-B9
gcgctcggtgcccatccgcaggacgacgaggtgtctgtcgtgcgcggacacctacaagggcacgcgagggcaaggtggtccaggtgtaccgcaagaagtgggtgatccacatcgagcgcatcacccgcgagaaggtcaacggcgccaccgtgaacgtgggcgtggacccctccaaggtggtggtcaccaagctgaagctggacaaggaccggcgccagctgctggagcgcaagcgcgcgggcaagggcctggccgacaagggcaagttcacggaggcggaggtggcggccatggagaacgtggactaagcgccacgcccaccccgcagcagccagcagcagcagcagtgttgaggccgcgggcgggccaccgacgccagtgcggctcgggtggcggcggcccgacggccccggtgggggcagcctctccgtgtggctgtgcgctccaccggcagcggcgcagcctcggcagcgcttggaagcatggaggctcgagaggcccttgctccggcgcggcccagcggcgcttgctttcatgcagcggttctgccgcagcgcgtcacacggcgggcgctggcgcgcagtttgcacccttc

SEQ ID NO: 5444 - DNA, 226 bp, Chlorella sorokiniana
  Clone ID: LIB3602-078-Q6-K6-C1
ttttccgcgacagcccaaatgtttaacccatatgccctgggtgtgggtgttgctgccggactgtacttctgggtgcgccgcaagcagcaagggcaatgagactgaactgtggcaaccttggctcttccacccctcaagcctcagcatggctgcatgtgcacagtccctgcatgccattggttgacaagcagcagcaccagatggcttttgccctgccccgttcctt

SEQ ID NO: 5445 - DNA, 472 bp, Chlorella sorokiniana
  Clone ID: LIB3602-078-Q6-K6-C10
cccgcaatatgagcgacgcccagactaccttgcaaaaaaaagaacttgcccgcccctttttccgatgcccctgccccccgcccatgccgtacacgccacctgcggcgctgctgttcgtgcagcgccccgccggcgccccatccttcatgcatcatgatgcccagttttgacgccttttgcccagccccataccatacccgtacaaacacagccctttcatgcatgctctctgccccatgcgttaccgcctgtcaccactgctctggtctccccaatgccctccctgataccacgttccgctacactcctcgcaaggccggcagcatgcgccgctcccctgtgccacagccgccatctgctccttccagcccccgccttttcctccatcaagccccgcgctcctttgaaggaattccctgtgccaccatcatgctcccaaaccactgtcatgggtgtaaggcacgtcaaccgc

SEQ ID NO: 5446 - DNA, 467 bp, Chlorella sorokiniana
  unsure (1)..(467): unsure at all n locations; Clone ID: LIB3602-078-Q6-K6-C11
cggacgcgtgggctgcgtttcacgatgcgggtggagaatgcgcggcacaggcgcggctgcgcagaggagtgttactacctcattgtgccgcgccacccggccgccccgcgggcgctcgtgtccacaggcaccatccagggcgatgacgccaaatcagcggtgcccgccgctgtggcgctgcccacgcggcggtggaccacggacggagccggcacggcgcagtgagcggtggagcagctgaacatgtgtgctgccccctcggcttgggttggcgtaggtggctgcgttgcagcggcggtaggcggcagcgaagcgacagcaaagtttgggcgccggcccgtgcagcactctttggtagcttagcgcgacttagtcttgttttggaggcctgacgcaaggcagaacctgtgatgcattccaagcaaaaaaaaaaaaaaaaaaaaaaaaaaaaaaaaaaaanaggggcg

SEQ ID NO: 5447 - DNA, 596 bp, Chlorella sorokiniana
  Clone ID: LIB3602-078-Q6-K6-C12
ctctgcaggcgcccgcgcggctcatgctcaaccgcaagcccacgcgcatcgagctcaaggccgaggacaaggaggagtacgaggcggtgcgagcggagcgccagcaagcgcagctgcaggcagcggcagcggcagccggcaaggcgcccctgtcaccgctgttcaccgcgcccgccaagaagccaaccgccgctcagcgcatcggcctgcagcagtgagccgctgctttgcagcgcaccctccggcgcatagcagggcggctttcggggcagcagcagcaggcgcgggcagtcagagcaaggcagtaacagcagcagcggcaggggagcaggagggtatggtggaagtcgaggtcaagctgcggctgccggatgcggcggcgcatgccagcctggcgcaggcgctgcaggggggctacaaggccacgtatcagcaggagaacttcttcttcgacggcgcgcagcaggagctgagcaaggagcgcgtggtgctgcgggtgcggttctacaacggggaccacaaggcggtgatcaccatcaagggcaagcaggtgctgaaggacggcatcgggcgggcgccagaggaggaggagcccc

SEQ ID NO: 5448 - DNA, 437 bp, Chlorella sorokiniana
  Clone ID: LIB3602-078-Q6-K6-C2
gggcgagagctcccatcgcggccagcattgctcccgccttcagcgcgggcaagagcttcaaggatgccgtgaagaacggcgccaagtgagcagccctgtgctgactcgcgcacagctgggcgcatgctgcgcgtgcacccccctcccttctccaggcgggcagccctgcagcggcggcgccgtcaccccgcgcctgtatatcagccatgttccagcggccgggcgctgctgttgcgcggcgggggcggccgcgaaggctgccgctgagcggcggcggcgcgcccgcccagacggccccctgcaccccctgacctacctgtccgccccaacgtcacgcccctacccacccgatactgttgctgctgcttgctcgccagctcgcccggttttccatagactgtcggcactgaggctctctgtaaatatcggttttcaaa

SEQ ID NO: 5449 - DNA, 470 bp, Chlorella sorokiniana
  Clone ID: LIB3602-078-Q6-K6-C3
gttatgccggtgctgctgcaagtggacttccccttcgggggccctttggagatgccatggcggaggggatgaaggggctggcggaatccatcgctgctgagcccggcctgatctggaaggtgtggaccgagaatgcggagaccaaggaggcgggcggcatctacttgtttgacagccgggagaatgcgcaaaagtacatcaccatgcacgaggcgcggctcaagggctttggcgtccctgtggtgaacgtcaagttctttgatgtgaatgtggctctttctgaaatcgacaaggccaagctgcagtaacagccgcaggcgagaggagtgccaattgagttgtgtggccgcgatgcgtgagtttcaagtgcggtttcggctttagattgtccaatatttcacttcatgcgttacaatagtattgtccacgaatccacaacgtggctcacgggattaaatggaactgccgtg

SEQ ID NO: 5450 - DNA, 428 bp, Chlorella sorokiniana
  Clone ID: LIB3602-078-Q6-K6-C4
gctgtacgacatctgcttccgcaccctgaagctgaccacgccctcgttcggcgacctgaaccacctcatctccgccgtcatgtccggcatcacctgctgcctgcggttccccggccagctcaactccgacctgcgcaagctggcggtcaacctgatccccttcccccgcctgcacttcttcatggtgggctttgcgcccctcacctcccgcggcagccagcagtaccgcagcctgacggtgcccgagctcacgcagcagatgtgggacgccaagaacatgatgtgcgcagcagacccccgccacggccggtacctcaccgcctcggcgctcttccgcggccgcatgtcctccaaggaggtggacgagcagatgctcaacgtgcagaacaagacagcagctacttcgttgagtggatccccaacacgtc

SEQ ID NO: 5451 - DNA, 601 bp, Chlorella sorokiniana
  Clone ID: LIB3602-078-Q6-K6-C5
agctgcgcacaagggctgatgctgagcgcagacaaccttgccaaggacctgatggtgtttctgtgcagcctgtttggcagcccagccatgctagccaggctgctggagcgtccagatgggtttcaaggcattcacggcgagctcttcaccacaatcattgcccctgcggacactgaggtgcaagacgtgacgcctgtgtatatcagctggattgcgctcctggtggagcagcagcccgccttctttgcccagttgccatccatgctggcaggcggcctgccggtgcctccggtgctggcggcacccctgtgggcatcctgtgcacgcctggcacaaaggctgacctcttacctgaccagcggccagctaccctccacttgcgaccatgcctttgtgcatgtggagcgggtgcagagcaaggcggctgccgtgctgctcgccctgctgcgtgacttgcgcggggagctgcacgctgcgtgccgtgcaacagcaacagcgcagcagctgcgggcggcggcggcggcgtccgagcagcggggcggggccgacgggcacgaggcggcgcggctgctgcgccaggcggcggcgctggtgtagatga

SEQ ID NO: 5452 - DNA, 605 bp, Chlorella sorokiniana
  Clone ID: LIB3602-078-Q6-K6-C7
ccagggcgagatctgcatccgcggccccatgctgtttgcgggctactacaaggacgaggagcgcaccaaggcggagatggatgaagacggcttcttccacacaggcgacatcggcacggtgaacgagcagggctgcctcaagatcatcgaccgcaagaagaacatcttcaagctggcgcagggcgagtacatcgcggttgagttcctggagcagcagtactcttcgagcgacgcggtggagcagatctgggtctacggctcgccgcacgagagcgtgctggtggcggtggtggtgcccaagaaggcttttgccgacaagcactcggacctgggcagcaaggaggcgcagcaggccatgctggcggagctggcggccgcccagaaggccaagaagctcaagggatttgaggccatcaagggggtgatcctgttcgacgagcacttcaccatcgagaacgacctgatgacgccctccatgaagctcaagcgcccgcagctgcagcagcgcttccagccgcagatcgatgcgctgtaccgcgagctcaaggcagcccaggcagcgcgctaagcagcggcgctggtattgaacagcctgtgcctcatat

SEQ ID NO: 5453 - DNA, 333 bp, Chlorella sorokiniana
  Clone ID: LIB3602-078-Q6-K6-C8
cgcatgggtttgttacagcgagcgacccccaccaaaaaaaaaaatcgttaaaagaaggggtaccaaagaccagacgggacaaaagttaatatttgcagcaggcgggggggcaggcccccccttataggccctggggaggggagggctcaaacccgggtgagttgagggggtgggcaggggcaagtgacacaaagggcgaggcaattcataccctttgctggcgcccaaaggggtcaaagcaaaagcaagggaggccctccgggccctcctatttgtgtatatggaaaacccaagcgaggcatcggccatgcggggcggggatggggggctccc

SEQ ID NO: 5454 - DNA, 404 bp, Chlorella sorokiniana
  Clone ID: LIB3602-078-Q6-K6-D1
ccagcctgctgcggcgcggcagccgatgcaggtcggctgagcggtcttgcatgcgcatgctgttgtaatctacttttgtaccgtttggttgtaccaacttgttgttgtcaatgctggctgaatgacaaaaaaaaaaaaaaaaaaaaaaaaaaaaaaaaaaaaaaaaaaaaaaaaaaaaaaaaaagggaaaaaaaaaaaaaaaaaaaaaaaaaaaaaaagggcgggcctgctaaataataaaatcttaaataccgccaaataaaaataatatagttttcgttttttaaacctaaattaataaaaaaaccgtggttttaaacaaattaagactggaaaaacaaaatccttttctaacctaatgtaatagcaaaaaataccccttcacccatcttccttaacaacaa

SEQ ID NO: 5455 - DNA, 510 bp, Chlorella sorokiniana
  Clone ID: LIB3602-078-Q6-K6-D10
ggggtctcaggagcaggatggtgaagttcctgaagcccgggaaggtggtcatccttctgtccggccgctatgccggcaagaaggcggtcatcgtgaagaactacgatgatggcaccagcagccgcccctacggccacgcgctcgtgtgcggcctgtctaaggagccccggaaggtgatcaagcggtcgtccctcaagacccaggcgcgccgctccagcctgaagaccttcatcaaggtggtcaactaccagcacatgatgcccacccgctacacgctggaggtggacctcaagggcgtggtgaccgccgagtgcgtggacaacagcaccaagaaggtggaggccaacaaggaggccaaggcgctgctggaggagaagttcaagagcggcaagaaccggtggttcttcaccaagctccgcttctgagggagtttcttggagagcctaggttgcagcagccgtgacgtgacgtgctccttgccccgagacgccatgtaacgtcacaccccgc

SEQ ID NO: 5456 - DNA, 164 bp, Chlorella sorokiniana
  unsure (1)..(164): unsure at all n locations; Clone ID: LIB3602-078-Q6-K6-D12
ttcccctcctcccacatgtcttttccctgcgccctgcagcccccgtcctgtttgattactagcgtccggtcccatcatcttgtatcagcctaacctttcatgatggatgcaccctgcccagtttgtgcacaccgctctctccttgttgtaatgctcccccgtng

SEQ ID NO: 5457 - DNA, 587 bp, Chlorella sorokiniana
  unsure (1)..(587): unsure at all n locations; Clone ID: LIB3602-078-Q6-K6-D2
anaggttaaggagagcctgtcccctgctgccgaccatgtcaaggaggctgcccgcgaggtgggcactgccgtgaaggaggacgccaccaccgccaaggacaaggtggctgatgccgccaccgccgccggcgattccgcaaaggccaaggcagaggccgccaagcagcgcatgtcggaggctgcggagggagctaagcaggacggcgccgccgacatgatggagcgcgccaaagagaagggcaaggacatggccaacaccgccgccgacaaggcggaggacatgattgaaaagatccggccctaaaccaagggctataccttgctggctgtggcggcaacaaaaccgagcccaccaaacagccagcggcctatgccggcagccctcgtggccgtgccggcggccggcactgccgcagctagccgtcggcgccagcagcccagctgaacgactcatctgtgcggccgctgggccgctgtgattcatttgcatcggcccatgagcggctgccttgcacgcatggtgcggcacggcctgctctgcggcccttcatacctttgtacctttctgtatcatcttgcagcaatgg

SEQ ID NO: 5458 - DNA, 519 bp, Chlorella sorokiniana
  Clone ID: LIB3602-078-Q6-K6-D4
cgcaggctgctgggctgcggtacggcaagcagcccgcctgctggccatgcggctttgatacgaccccaccccccaaacccaacgacagcttcattcccgccaaagtttttcaaaccccttccggagccgttggacggcgttcctttggttttgcaaacacaacccgctcactttgcatggcattctgcaagtgccacccccacggcccctccctttgacctccctccggctttgctttgccgcctcatgtttccctccgtctcccccttcccacttcatttctcctgcaagcgggcgtggctcatgccccctgcgctgccaccccatcgctgctggtctgtgaacctcgttttaattagcctgcgtccagtgcccgtttctgcggttttgtgaccctggtcttcctcccatgatcccagccctcgaatcgagagtgtgactaccgccagccatactatgccatcgtttgctcatatgtaatgatcagtttgccatcactgttgcaacagttgctgctgg

SEQ ID NO: 5459 - DNA, 461 bp, Chlorella sorokiniana
  Clone ID: LIB3602-078-Q6-K6-D5
tctttggcgaggccaagattgaggacctgtccgcccaggcggccggcgcagcagcagagcagttccgcatggcggaggccatgggcgcggcgggtgccggccccgcgcccgcgcgcgctgccgaggctgttgaggaggaggaggaggagggcgaggaggtggacgagagcggcgtggaggccaaggacattgagctggtgatgacgcaggcgggcgtcagccgcagcaaggcggtcaaggcgctcaaaaacgccgacggcgacatcgtcagcgccatcatggagctcacgatgtgagcggggcacccggaggtgcaggcgcgccgcacggcagggcatgcctggctcgtgcgtcgtgccggcggggcggcggcggcggcgatagcgctgcgcgccacggcccgccacccttgcttcctgctggcttgattcctatgctggctctgtgacaaacgtacacgc

SEQ ID NO: 5460 - DNA, 223 bp, Chlorella sorokiniana
  Clone ID: LIB3602-078-Q6-K6-D6
gcattgtagattaaacgcgcatgctgcagtgagcagcctgtgtttatgcttgagggccatgttgttgtagtcctggcctctgcctgcaagcctgccgtacgcagacttatctcgcctcaccacacccgcatgccttctccgagcgttcaactgaacctgcacattccgccccgcttcattccgcacccttcatccttcatcttgtgtaatgtgctttgtgttg

SEQ ID NO: 5461 - DNA, 484 bp, Chlorella sorokiniana
  Clone ID: LIB3602-078-Q6-K6-D7
taaaaaaaaaaaaaaaaaaaaaaaaaaaaaaaaaaaaaaaaaaaaaaaaaaaaaaaaaaaaaaaaaaaaaaaaaaaaaaaaaaagagaaaaggggatataaggggtcggggttttttgtttgcactgcgggttgcttgcgtcgggcttgccatggtttttcttgtctttttttggcctgctccgtggcttggcgggggccggcgttgtgcatggcctggcctggccgttctcctgcgttttccccttgtaccccttcccctttctcccgttttccccgtcgggctggcccctttggggtcccccttgttggccttttctgaccgtgattgggccttggttctgtctgggtccctcctttttgggcgctgtggtggtcccgggtacgggcgcttttccccctgccagttccctggactctcccgcccgttccttccccttttttccttttctttccttccctttttttcccctttccccgttttt

SEQ ID NO: 5462 - DNA, 576 bp, Chlorella sorokiniana
  unsure (1)..(576): unsure at all n locations; Clone ID: LIB3602-078-Q6-K6-E1
tttcgaaaaaaaaaaaaaaaaaaaaaaaaaaaaagggcggacagaataaaagggctggccgctaatcaatataaaaaataataaaaaaaaaaaaaaaaatagggagtaaaaatattaaataaaaaaaaaataaaaaaaaataaaataatggttggaaattttgttgtttttccttttcttccttttttttttttgggggggtgggtgttccnccttcgctcccttttctttttttttggggtggggcggtttttttttcttttttttgtttttttttttttcttgttgtcgtgtttgcttttttttttttttttgtttctttgttggtgtttttttcctttttttttttgttcttgtttttttttgtttcttttttttgttctttctttgttttttttgtttttgttttttgttttttgttcttctttgtttgtgtttgttttgcggttttttggcttgttttttgtttgttctttttttgtttgttttttttgtttgtttttgtgttgtttttttttttttttttttttttttttttttttttctgtttttcttttttttttttttttttttttt

SEQ ID NO: 5463 - DNA, 534 bp, Chlorella sorokiniana
  Clone ID: LIB3602-078-Q6-K6-E10
ctttgcgcaggttgctaaggaggagacaagatggtgactcctctggtgcgcgtgaagagcatcaagaagcgcaccaagcgcttccagcgccaccagagcgaccgtaggatcacggtcaaggagagctggcgccggcccaagggtattgactcgcgtgtgcgccggaagttcaagggatgcggcatcatcatgcccaacattggctacggcaccaacaagaagacccgccacgtgctgcccaacggcttcctcaagtttgtggtgaacaacgtgaaggaccttgagctgctgctgatgcacaaccgcaagtactgcgccgagatcgcgcacaacgtgtccaccctcaagcgcaaggcgattgtggagcgcgcggcggagctgaacattgccctgaccaacggcaacagccggctgcgcagccaggaggacgagtaagctgctcgcccccctgcgtcaccagcagcggcgccagtaccttgggagcatagcagcggcttacattggggtgctactgctcccatgtaaggcacccca

SEQ ID NO: 5464 - DNA, 188 bp, Chlorella sorokiniana
  Clone ID: LIB3602-078-Q6-K6-E11
aaaaaaaaaaaaaaaaaaaaaaaaaaaggggaaaaaaaaaaaaaaaaaaagacaaacaaaaataaaggaatccaaagcttactaacagcgtgcatgctatagctttcagctctctctatagcgttcacccgaagttcatttaacttggccgtcttgttaaaaccctggggcattggcaaaaaccctgg

SEQ ID NO: 5465 - DNA, 593 bp, Chlorella sorokiniana
  Clone ID: LIB3602-078-Q6-K6-E12
gacgagcctgcagcgaacagcaacaaaatggcggcaccacccccgaccgccggcgcctggccaactgggctttgcggctgctttgaggactgcggcacatgctgctgctgctactggtgccacatgtgccagtatggcagcgtggccagcgacatcgaccccacggccagctgctgcggccagtgctgctgcttctggctgctgcactactgctgcctgcagggcctgattgctgggcccaagcgcgagaagctgcgcgccgcgcacaacctgccccccgagccctgcggcgactgctgcgtgcacacctggtgcgggccctgcgccgtggcccaggaggcgcgcatcatcaagaagtacggcgtgcagccggcccagccggcctttgtgaccgcccccatgacggcgcccccgccgcagcaggccatgatgtgaagcagagcggccagcgggagtttgaagtagcggcggctggcagctgatggacagccagccagccagcacggagcagctggtagcggtggcttggcccagctgtcgcaaacagcttggcagcagcctactgaccagcaagaggagaggaccgactcgag

SEQ ID NO: 5466 - DNA, 593 bp, Chlorella sorokiniana
  Clone ID: LIB3602-078-Q6-K6-E2
gcggtgcgcagggcgcgctggcagtgggcgtgcggggcagcgacaccattgtgctggcggtggagaagaaggcggtggccaagctgcaggtggcccagacggtgcgcaagattgcccagattgacgaccacatctgcctggcgtttgcgggcctgacggcggatgcgcgcgtgctcatcaacaaggcgcgcatagaggcgcagagccacaggctgacgctggacgagcgggcgagcgtggagcacatgacgcggtatattgcgggggtgcagcagcgctacacgcagagcggcggcgtgcggccctttggcatctccacgctcatcgttgggtttgacccgctgggccgccccgcgctgtaccagaccgacccctcgggcacctactctgcctggaaggcaaacgccatcggccgcaactccaagaccgtgcgcgagtacctggagaagaaccacgcggagacgagcgggcgggacacgctgaagctggcgctgcgtgcgctgaccgaggtggttgagggcagcagcaagaacatcgaggtggcggtggtggagaaggaggcggggctgcgcttcctcacagacgaggatgtg

SEQ ID NO: 5467 - DNA, 211 bp, Chlorella sorokiniana
  Clone ID: LIB3602-078-Q6-K6-E4
caactactagcgcatgcccctgtaacgcattgtattcgtttctttcatgccaagcctgagcccagccaatggcaaacccgtccccttgcacctgccctctgccccctttgcactgccatgtacactcgcccttgccgaaccatgcacagccggcacaccctgcattgttttagctctctctttccttcatctctgtaagttagatgcctgt

SEQ ID NO: 5468 - DNA, 594 bp, Chlorella sorokiniana
  Clone ID: LIB3602-078-Q6-K6-E6
ccagatgctgtcggcagtagtgggcatcaccacgcgcgtcgtcatacacaagacctggattgcggggccggtgggcatgagcctggcgctggtggtgatgcagctgactgccacaacgcacccgcccggcggcgccaccgccctcatcgcggccacgctgcccacgctgcccaagtggcacggctactcgtacctggtcaccatcagcgtgggcagctgcatcatgcagatcattgcactcattgtgaacaacctggaccccaagaggcgctacccaacctactggtattgagtggagggccgctgttgcggacgagccgtcacccgcaaacccaagcgctggccagctgcgccgcaacccttgcatgtgcgcgccgccggccagcgcagctgttgcgcaccttccctttcattgcctttttgcccccctttacgaattttcgaatacctggccctccccgcaatctgcttgcgcccagtgctgcgttgcctcccgcacccaagacccccagcgtaccaacctccctcgatcacttatgcataccatcccgcgtctgccttgcacccatgaaccgcttccatccggactaccct

SEQ ID NO: 5469 - DNA, 209 bp, Chlorella sorokiniana
  Clone ID: LIB3602-078-Q6-K6-E7
aaacgtccgcttttgtctgcactcctcagggcgtgccaattgtgcgcgccgccgttgtatcctgccaactgtaacattaatgactaaaaaaaaaaaaaaaaaaaaaaaaaaaaaaaaaaaaaaaaaaaaaaaaaaaaaaaaaaaaaaaaaaaaaaaaaaaaaaaaaaaaaaaaaaaaaaaaaaaaaaaggggcgggcggttttaaaaga

SEQ ID NO: 5470 - DNA, 162 bp, Chlorella sorokiniana
  Clone ID: LIB3602-078-Q6-K6-E8
taccgcgtcgcatcgcgacggtcatagcttctttctataggggtcaccctaaaattcatattcacttgcgccggtcgtttttacaaacgttcgtggactgggggaaaaacctctggcggttacgccaactttatatcgcctttgcagcaacaattccccctt

SEQ ID NO: 5471 - DNA, 225 bp, Chlorella sorokiniana
  unsure (1)..(225): unsure at all n locations; Clone ID: LIB3602-078-Q6-K6-E9
cgcgggcctcaatgagnaacagctggcgctctgcgatgccttcatctacatccctcagtacggcgtcggcaccgcctcactgaacgtggcagtcgcggcatccatcatcctgcaccactttgcaaactgggcgggctaccccgagcgacagcgagagggtcagaagtttgtagtggcggagcggccgcagcgcaccggcccccgcaatagcgtgccccctgactg

SEQ ID NO: 5472 - DNA, 575 bp, Chlorella sorokiniana
  Clone ID: LIB3602-078-Q6-K6-F10
cagttttagggctagcaagccgtcgcggttccagcccctttcgcaactccaccagctccccctgtctgcacacgccatggctcccaaggttttcagctggaacttccccggcgcttacgccgtgcagttcatgaccgtggtgtcgtgcaccgcctgcgtgtacacttgctaccacttcctggtcaagaacccggatgtgcactttgtcaaggagctgaagcaggacgagctggcggagagcgcgcggtggtcccagcaggccaaggccgtccagggcaacgtgttccgctggctggcgcagacgcgcgacaccgccgcgggcgagcagaaggacacccgcatcttccgcgtttgagcgcccgccaggctgctgcgctaaatcggcgcgcaataccagccgctcaccgccactcgccgccgctgcgcccccctgtgcttgctctcagggcctgaggccctctgccagtcagccacctggggccggcacccccttgccgctatgatatgcgtccccaaagctggagtgaggcattgcggaacccaatgctgtttttccaccgccctgcttttaatat

SEQ ID NO: 5473 - DNA, 516 bp, Chlorella sorokiniana
  unsure (1)..(516): unsure at all n locations; Clone ID: LIB3602-078-Q6-K6-F11
gntgccgccaaccccttttacggcctgcccgggcccgagatctgccagcctgagaacatcaaggtgcccgtgtacctgcaccacggcgctctggacgacatgaagggcttcagcgacccagagtcggccaaggcatttgcggacaagatcaacgcggcaggcggcgacgcgaagctgttcgtttacgagggctccggccacggcttcctcaacattggggaggaggcgctggccaagcgggcgcacatgggcttccccgagcctcccgccagtgcacaggagctggcctggagccgcgtcctggagctgtttggccgcacgctcaaggcgtgagagggctgcatggactcagggccatgcacaaacatacttctgggcagtatgtgagagcggtgacggcatactgcacatgggcactcgattggatgggctgccgacatgatattgttgcgcggctggcatgggcaagctgatcgcactgcagcttattttgggccgatgtaactcaatgagctg

SEQ ID NO: 5474 - DNA, 599 bp, Chlorella sorokiniana
  unsure (1)..(599): unsure at all n locations; Clone ID: LIB3602-078-Q6-K6-F12
cgagnagatcgacgccatcgccatcaccaagggccacggcactgagggcgtggtgacccgctggggtgtgtcccgcctgccccgcaagacccatcgcggtctgcgtaaggtggcctgcatcggcgcgtggcacccggcgcgcgtgggctggaccgtggcccgctccggtgccatgggcttcaaccaccgcactgagatgaacaagaaggtgtaccgcatcggtgtgaagggcgaggccagccacgccgccaccaccgagcacgacgtgacggtgaaggacattacccccatgggcggcttcccccactacggcgtggtcaaggaggactatgtgatgatcaagggcgcctgccccggcgtcaagcgccgcgtcatcaccctgcgcaagagcctgttcccccagaccagccgcaaggcgctggaagatatccgcctgaaattcatcgatacgtccagcaagttcggcaacggccgcttccagacctcggaggagaaggccaagatcctgggccgcctcaaggcctgagcccagaaggcgtgctgagcggggagcgcagcgcgcacagcacgccgcccgcccgccggcggcggcggcgcta

SEQ ID NO: 5475 - DNA, 385 bp, Chlorella sorokiniana
  Clone ID: LIB3602-078-Q6-K6-F2
aaacttgagatcaaaaaaaaaaaaaaaaaaaaaaaaaaaaaaaaaaaaaaaaaaaaaaaaaaaaaaaaaaaaaaaaaaaaaaaaaaaaaaaaaaaaaaaaaaaaaaaaaaaaaaaaaaaaaaaaaaaaaaaaaaaaaaaagggggggggggttttcggttttacaagtttccctttttcgggcctgggggggtggggggtttttttttttttttttcgggaacccaaatttcttggcccggggttttaaattttccaggttgggaaaagcctagacctttcccctttttctttttttttgggttttgttccctttttcccttttttggcgtttttagtaaaaagggccagggcccccttcccccttttcccatttttataacatt

SEQ ID NO: 5476 - DNA, 56 bp, Chlorella sorokiniana
  Clone ID: LIB3602-078-Q6-K6-F3
gttgagacgagccatgtacatccattccactcctgagtgtgtaatatagcaagccc

SEQ ID NO: 5477 - DNA, 210 bp, Chlorella sorokiniana
  unsure (1)..(210): unsure at all n locations; Clone ID: LIB3602-078-Q6-K6-F5
ccttcagnataccatctagaaactaagcataacgccaagccactgctcgctcctttcggatcgcccatttggttggttgtcggcccctcttccaatcggccccgcctcgacttgatcctcatcacgtccgcttttgtctgcactcctcaggggcgtgccaattgtgcgcgccgccgttgtatcctgccaactgtaacattaatgactacc

SEQ ID NO: 5478 - DNA, 596 bp, Chlorella sorokiniana
  Clone ID: LIB3602-078-Q6-K6-F6
agtaggtccaagctcggcgtgggggcaccagcagcgcgccaccatgggtcgcatgcacagcaatggcaagggcaagagccgctcggctctgccctacaagcgcagccccccctcctggctgaagatcacccccggcgaggtgtctgacaccatcgccaagatggccaagaagggcatgaccccctcccagatcggcgtgatcctgcgcgacagccacggcatcgcccaggtcaagtccgtgaccggctccaagatcctgcgcatcctcaagggccagggcctggcccccgagctgcccgaggatctgtaccacctcatcaagaaggcggtggccatgcgcaagcacctggaggccaaccgcaaggacaaggacggcaagttccacctgattctggtggagtcccgcatccaccgcctggctcggtactacaagcgtaccaaaaagctgccgcccaactggaagtacgagtccgccaccgcctccgcgctggtgcagggctgagcgctcgcctcgcgcgtgagctgacggctgcagccacggctatctccaactggtgtgccagcaggcatcaccacgaagcagccgcagctctcca

SEQ ID NO: 5479 - DNA, 579 bp, Chlorella sorokiniana
  Clone ID: LIB3602-078-Q6-K6-F7
tgccgcaatgccaggcggctacgttttaggcagcgtcatgcttgtgggcactgttgctgccgcttctttcccagacccagccagtgtgcgccacaaaacccaaccgacctggccccacctgcagactgccctccctgcatccgcgaggtgctggcgcacggcaaccgcacctgccccatctgccgcacccgtgagcgggctgggaagggggcctggcagcctcgccagtgttatgcaatgtccgccatgcttgcgtaaacgggtgggtttgtcctgctactgcccatctgtccatgtccttctgctcatgcccatccaccttccacatttccgcagcgctgcgcgaggaggacttgttcgatgcggtgagcgaggaggaggcgcggctgaacgccgcggtgcgcagcgcggccgacggcgccaacgccgacttcggcgccaaggtatccatgctgctgtctgagctggcggcgatgcgggcagcggacccgggcgccaaggcggtcgtcttctccagctggggccgcctgctcaagctggtgggcaacgcgctggaccagaacggcgtgcggcacgcca

SEQ ID NO: 5480 - DNA, 303 bp, Chlorella sorokiniana
  Clone ID: LIB3602-078-Q6-K6-F8
tgtgaaccgcctctccatctccatccgtcaacttaccaccagacctggcttgagatcgccaccaacgcccacttgcctcctgcaccatgcctgctttgatcccacactctgtgaaccgcctttcagtcacacctgttggtatccgtgctgcctgcctgcagtcaccctgcctcccatcccccatctcacaaaggtccaccccgcattccatcgcccgcaaacgcccatgccgattgatcgaacgctgcagctcaccaaacagtgaacttgaagccacctgggtgctgttacaaaaacgccgta

SEQ ID NO: 5481 - DNA, 591 bp, Chlorella sorokiniana
  Clone ID: LIB3602-078-Q6-K6-F9
cccacttctgccacaactggggcaccttcatcctgctcacctggatgcccacctactacaaccaggtgctgggcctggacctgcgcagcagcggcttctactcggtgctgccctgggtgaccatggcggtgtctgccaacgtgggcggctggatcgccgacacgctggtggagcgcggctggagcgtgaccaccgtccgtaaagtcatgcagacgattggcttcctgggccccgccttcttcctgacccgcctgggaggcatcaccagcgtggccggcgccgtgggctgcatgatggcggcgcagggcctggatgccttctcccagtccggcctgtactccaatcacgccgacatcggccctcggtatgccggcgtgctgctggggctgtccaacaccgcgggcgtgcttgcgggcgtgctgggcaccgccgccaccggcttcatcctgcagaacggctcctggaaccaggtgtggggcgtggcggtggcgctgtacctggtgggcactgttgtgtggaacctgtttgccacgggcgagcgcgtgttcgagtgagcacgcctctagcgcccgtcggcgaagctgccctctc

SEQ ID NO: 5482 - DNA, 590 bp, Chlorella sorokiniana
  unsure (1)..(590): unsure at all n locations; Clone ID: LIB3602-078-Q6-K6-G1
caggcgccgcagnagggtaaagagcaaatatgccggcgggccagggctaccgcgcgcgtacgcgccacatgttcagccgcggcttcaggcagaagggcttcatcccgctgtccacctacctgaccaactacaagctgggtgactatgtggacatcaaggtcaacgccgcggtgcacaagggcatgccccacaagttctaccacggcaagactggctgcgtgtggaatgtgaccaagcgcgccgtgggcgtggagctgctcaagcaggtcaacgggcggtacatcaagaagcgcatccacgtgcgcatcgagcacgtgacccccagccgctgccacgaggagttcctgcgccgctgcaaggagaacgacgcggcgcggcacgcggccaaggtggagggcaagccgctgccggtgctcaagcgccagcccaagggcccccgcaccgaggccatcatgctggagaacgtgaagatggagaccatcacggccatcccctacgatatcctcaaggagggcgtgctctgagcgtgatcggcggcgacgttccgttgattgcggctgcagcttagtgagatgtaaccccgcagaaaa

SEQ ID NO: 5483 - DNA, 246 bp, Chlorella sorokiniana
  Clone ID: LIB3602-078-Q6-K6-G11
tctgaaaaaaaaaaaaaaaaaaaaaaaaaaaaaaaaaaaaaaaaaaaaaaaaaaaaaaaaaaaaaaaaaaaaaaaaaaaaaaaaggggcgggccggttctagaaggaacccagagtttacgttaccgcgtcgcttcgcgaacgtcataagcttctttttatgagggtcaccctaaaattacaattccactgggcccgtcggtttttacaaacgtgggtggactggggaaaaaacccttggcggttc

SEQ ID NO: 5484 - DNA, 266 bp, Chlorella sorokiniana
  Clone ID: LIB3602-078-Q6-K6-G12
gcgttcggcaaatcctactcagtctgacccacttgcgctctacctgtccagaagttcggtctctactatgtcaagtgcctgctgtcattctcagcctgtgcgcaattgccgctctcttttggcagcctcccatcctaaataatagccgtgtttggaggcatagatgcatcatgtgtaagaacccccgcaaaaaaaaaaaaaaaaaaaaaaaaaaaaaaaaaaaaaaaaaaaaaaaaaaaaaaaaaaaaaaaaaggggggaacgatt

SEQ ID NO: 5485 - DNA, 227 bp, Chlorella sorokiniana
  Clone ID: LIB3602-078-Q6-K6-G2
aaaaaaaaaaaaaaaaaaaaaaaaaaaaaaaaaaaaaaaaaaaaaaaaaaaaaaaaaaaaaaaaaaaaaaaaaaaaaaaaaaaaaaaaaaaaaaaaaaaaaaaaaaaaggggcgggccgttttaggggtacccaggtttttcgtcccccgtccttgcgccgtacttagctttttttttggtggcccccttaatttgagtcccctggcccgtcggtttacccccgccg

SEQ ID NO: 5486 - DNA, 520 bp, Chlorella sorokiniana
  unsure (1)..(520): unsure at all n locations; Clone ID: LIB3602-078-Q6-K6-G4
ngagcaacggtgcaggttgtcatcctggcagaccccgacggccacgagatctgctttgtgggtgatgaagcgttccgccagctcagcgtgccagatgacaacgcacccacgctgctgcagcgctccatcagcctcgatggcagccgcgagtggctggaaagcaagcagcagcggcaggagggcgcggcatcacacaaggcgacggcagcggttggcgcggcaggggccaagagcgcagcaggctcgccgcaggcagcaggcgcagcggccgcagcaccagcagctgcagcacctgtggcggcgcccaagccagctgcgcccgccgccgctccagctgcggctgcagcagttgctgccaagtcagcaggcaagtagaccagtgaaccaaatcgaacccacactgacgtaccctccaacttgccttgcctgctcctttcaaatcctgcctgcatccttcaacatctgcatgccagtaagcgcagcaccgtctgcctgctggcctgttacaaagcatacaatt

SEQ ID NO: 5487 - DNA, 589 bp, Chlorella sorokiniana
  Clone ID: LIB3602-078-Q6-K6-G6
cggcctgctctgcggcccttcatacctttgtacctttctgtatcatcttgcagcaatggcagccggctgcatctttctaacatcgtcaccggcccactcgtttgtgccatgcccacctgcctccaacgtcacccttcatcaaccctcacccaacccatccacctgccacccatccactcaccttccctccgccacaacctctgccacccactcaccacccatcacccgctcaacgccctccatgcaccatcctccccatccaccaaatctgccaccccaaacgcacgtccgccgctgcaccacctgccgccccctcacccgcacccatcttccacccgccacctttcctgccgctcaccgccgcacatcctacctcccacacctcactccatgtccacccttcacccgcgcttcacacagcggctgctgccatgcaaagctgctgccaaacccatccatcatgctcgcacacccactcacccacacgtccaacgtatccagacccattttcaaggcccgactgtacagtgcctttttgcgtccttatgccgatctggtaccaggacttaatgtgtaacaaatggtatgt

SEQ ID NO: 5488 - DNA, 371 bp, Chlorella sorokiniana
  Clone ID: LIB3602-078-Q6-K6-G7
gccctgcgggaggcgcttccatacccaccctggcagcgcttgcttgctaggcttgtaccaacaccttgacctgaccagcgttgtgctggcacctcggcggcccgtgttgttggctgccccaattcccctgcctttttgcctccctgccgatagccctgaatagcccttactaccctttgtttctctccctctgctggtgtgcagcagctttttcattttgtggccgccgcagcgccaagctgttgcagccaccacagtgcatgctgaagccgaacgacgcactgtgcaacgcaactctcacacctgtcgattgttcacattgggtctactttttgggatcgcctccctgttacatttaaagcaaggatctg

SEQ ID NO: 5489 - DNA, 591 bp, Chlorella sorokiniana
  Clone ID: LIB3602-078-Q6-K6-G8
gcaggccgctctcgctcagcgtctggctctggtcaagcccacccggggcgcccgcaagcaggtgacccgcgccgccgtcgagttctacggccccgaccgcgccaagtggctgggccccttctccgagggctccgtcccctcctacctgaagggcgagttccccggtgactatggctgggacaccgccggcctgtctgccgaccccgagaccttcgcgcgctaccgcgagattgaggtcatccacgcccgctgggccatgctcggcgccctgggctgcctgacccccgagctgctgcagaacaacggcgccgctgacttcggcgaggcggccgtctggttcaaagccggcgcttcgatcttcaacgaggacggcctgaactacctgggcaacccctccctgatccacgcccagtccatcgtggctgtgctgctgacccagctggtgatcatgggcgccgccgaggcgtaccgctacagcggcgagggccccgtggagaccagcggcgactccctgtaccccggcggcttcttcgaccccctgggtctggctgacgaccccgacaccctggctgagctgaaggtgaaggagat

SEQ ID NO: 5490 - DNA, 570 bp, Chlorella sorokiniana
  Clone ID: LIB3602-078-Q6-K6-G9
cccagcgtccgcccacgcgtccgggcacgggcgccgcggctgcggcgtgtcgctccgggcgcgggcggcagctgctgcaccatgtgccgctggcagcgcggttgttgcgcccggcgtggccatgtgttgatggcacgctggacacatccatgtaacgctgctgcgcaaaaaaaaaaaaaaaaaaaaaaaaaaaaaaaaaaaaaaaaaaaaaaaaaaaaaaaaaaaaaaaaaaaaaaacaaaaaaagggggcccgttcttaaaaaaaccaaatttatttactcgggcatccaaaattaaatcttttgtatagggtcacccaaattcaattaactggaacaacccttttacaaacccaattaattggaaaaccttggcattccccaacttaatgcttttgaaaaaaatacacatttcgccacctgtcgtaatacccaaaaaggccccaacctataggcctttagaaaacttgcccagtctcaatgcataaagggacgcgccttttaggggtacattaagcgcgaccggtatagtggttacccccatagggaccgctacatttgctagctccc

SEQ ID NO: 5491 - DNA, 574 bp, Chlorella sorokiniana
  Clone ID: LIB3602-078-Q6-K6-H1
ggggcagctcacctgggcgcccatgcacgagtcagacgctttctggcgggagaacgccgaaagctggtggagaacaactgccagctgctgcgcgtgctgctcaagctgctggagacgagcagggactccaccaccctggcggtcggctgctacgacctggcccagtttgtgtcccacatcccccatgggcgcggcattgtgactgagctgcggggcaaggagctggtcatgcgcctcatgatgcacccagacccggatgtgcagtcccaggcgctcaagtgcgtgcagaaggtgctgctcagcaaggacaagtctgatttcctggcagcttctgcctgagctcactcacagccagcagcgccacagccactttggccctactacgagcctgacggctgcacgcgcttcgagcccccacggccctttgacaccgctgcagcaagcctgccgggcctccgacctgtgttccaccttttgctgagtttacactgctgctgtactacttttgctgcccgcactgtcctgttgtgccccgccctgtatccctcccagcctgctgtaatttcaagctgct

SEQ ID NO: 5492 - DNA, 497 bp, Chlorella sorokiniana
  Clone ID: LIB3602-078-Q6-K6-H10
gtcgggcaagggtgaagacaccaatatgaaccgcacgattgtggtgcgccgcgactacctgcactacatcaagaagtaccagcggtacgagaagcgccacaccaacatctcggcgcacatctcgccctgcttccgctgccacgagggcgacaccgtggtcatcggccagtgccggcccctgtccaagacggtgcgcttcaacgtgctgcgcgtcatccccgcgggctctggcgccaagaagggcttcggctccttctaagcaggctggactaagggcctcttgccttgctggctgaagccctcgacagcagcagcagcagccccagcacggcatgcaagcgctgcagacgccctgctgccctgagtaagcgccgccatgtgccggcggtggcagcagcaccgcccgccttgcatacacctggcccctaggatgccggccacggggcgcccagtagtcgccagacggcggggcgcagcgcatgtaaccgtgtgcatga

SEQ ID NO: 5493 - DNA, 395 bp, Chlorella sorokiniana
  Clone ID: LIB3602-078-Q6-K6-H11
gcagtgcaggttgctgctgcctaccggcttgtgcgttgctgcggtgctttcctgctgccaactggcccacgctccattcacccgcgctgcccgctcaatatgagatgctcattcgcccatgcacccacccccctgcagtgtaccacgtgacccaggacggctggaccaaggtgcggggcgaggacgtgggagagctgcacttccgctactacccccagccagaccagcacccatgcaacctggccgaccccctggccgtctgagcgctgtggcacacacctgcgtagccccttgcactgcgattgccaccccacgccttgggtttgcaaggcagcatggcatgggctgcactctgccctgcactgtgagctgcggttgtaacataacaacacatg

SEQ ID NO: 5494 - DNA, 580 bp, Chlorella sorokiniana
  unsure (1)..(580): unsure at all n locations; Clone ID: LIB3602-078-Q6-K6-H12
gctccccttgcgctgcgctcggtgcaagnatcggctctaggcgtcgggatgtgcgcgcacggcccgcgggcctgcgcgtgcaggcggtgcagcagggcggagacgacctgagccggaagtttgcggaggcggcccgcaagatgaatgtcaagctgcccgaggtggaggcgcaaaacgtggcaactcaggcgccgcccaggttctctcagccccgtggcggttggaacgacggctctgccgctgccgacaaggtgcggcggcaggagcagcaggtgctgagtgcctggacgtcggagcgtggcatgcagctggcggcgggtggcaccatcgtgctggtgctgctgctgctgtttgccgctggtggcccgccctctgacgcgcgctgcaccctgccctggtgctgagcgctgagcacctgccatcttgcctgaccctccccctgttgcgctgtgacgtttcatgctgaacacccacccgttgtggcttgctgcatttcgttgcgatgcttgatgctgccccatctcatttcacctcatcagcacgtgcgcgtcttaacgcgatctatgattgcatgctgcct

SEQ ID NO: 5495 - DNA, 509 bp, Chlorella sorokiniana
  Clone ID: LIB3602-078-Q6-K6-H2
ccggtcgccccgcgctctaaaaaaaaaaaaaaaaaaaatgagaggaaaaggaaaagaaaaaaaaaaaaaaaaaaaaaaaaaaaaaaaaaaaaaaaaaaaaaaaaaaaaaaaaaaaaaaaaaaaaaataaaaaaggggtcctttttaaatccattttcttccctttttttcaaatattcttttttttttttttggggggggtctttccggcccgcctttcccccttttggcttgtgtttacccttcctttcccactttttgcccttgctgcccccccttttcccggggtcctctttcgtacccgccttttcctttctcttttccccccttttttcccccttttttggctatggggcccccccttttttcctcccttttcccccgggggtttgggtgtttctcccttggttttcccttcctttgccccgcttcttttctccgttttttttggttttttccccttttttttttccttttttggccgtttttcccgctctgtttttttgtttt

SEQ ID NO: 5496 - DNA, 582 bp, Chlorella sorokiniana
  Clone ID: LIB3602-078-Q6-K6-H3
caaccatgcagcctgcttcacctgcgttaagggccttgccggcacccgcctggcggcccgccccagcagcagccgggtgcaggcccgcgcctacgtgcgcgtgcaggccaactcgttctacccccgcgggcccagcagcatggggcgcgtatgaggaccccctggcctttgtggcctgattgctgggctggttcgcgctcgctccaacatcaaggtgcccgttttgggcggagagtcgctgttaggggccttccatgcctgcatgctgtataacctggccaacttcccccagggccctgctttggactccaacttatgggtgctcatgatcacttggcacatggagctctttgcttgcctgttttggggcctcatcggcgtgaacgcccggcggcagggctacttggactgagcgctgccccatttggctcccatctcggattcattgctcaaacttgccgtgtacacgccatgtgccctgttgaaacgctctacgcttctgatgcattcactgccagggtcgtccccgcagcggcagcggcggcagctggacccgcgcgcccggcagtctgagttcaaggg

SEQ ID NO: 5497 - DNA, 616 bp, Chlorella sorokiniana
  Clone ID: LIB3602-078-Q6-K6-H4
aggcagcccaccacccgcgctgctgatgcgctgtccagccctactgaggagcagtgggcaaagtttcgccggaagcagcgaaaaggcagcggcagggcgccgtcgacagccccagcagcagcagtggcgctgtccgatgcggcggcagcagcagctgatgtgccgggtgataagccggtggcagcagcggcccggcgggcgggtgcgggcccaaccaccagcaagtacttccggccatcgggcggcacagtggtgggcggcttgcggcggtcggcggggcgccctcagccgggcggcttgatggcgacgctgcgtgctgcactgcaggacgagccctcagtggagaagctgctcagcgagcaggcagcagcggctgccctagattcagcggccgacagcggggacgaggatgatgcaggactggcgctggagcagcaccgccacgggggcaggccacgcttcgttgtgccgcatcgccagccacagcagcagcagcagcagcagcaggcagagttgcaggcactggggctgcagtcatcgcccaccatagatgacctgctggatggcagctccatagacaggggtgacgatgaggagcaggagctgccctccctgc

SEQ ID NO: 5498 - DNA, 249 bp, Chlorella sorokiniana
  Clone ID: LIB3602-078-Q6-K6-H5
gtgcggcaccagcgccgcggcgcctcgcgatagtgcccccaactgtcccgcgtgctgtgcctcagtgcttccgtccatctgttgtctgtacaccctctgccgcatttcattgcatgcacactctgcttcagttggcttcgtctgtgtgttgctccatgcctggccgactcccttacatcttcggcattgcctggctctgtgccaagcctcagctctccgcactgctctgtaaagatgttgctctgctcc

SEQ ID NO: 5499 - DNA, 608 bp, Chlorella sorokiniana
  Clone ID: LIB3602-078-Q6-K6-H6
tcgaaaaaaaaaaaaaaaaaaaaaaaaaaaaaaaaaaaaaaaaaaaaaaaaaaaaaaaaaaaaaaaaaaaaaaaaaaaaaaaaaaaaaaaaaaaaaaaaaaaaaaaaaaaaaaaaaaggggcggccatttttaaaaaaaccggggctgcccctcttttggggttccccaggtttttctccctcttttttttgggccccgctagggttttttttttggggccccccatttttcaactccttgggccgggaatttcccccgcctttccccttgggaaaccccctgggttcccccccctttttcccctgggggcttttcccctttgggcccggggccttttgcctttagggccccccccctttcccttttcccaatggggcccccccttgttggggactttcaccccccccttttggggtctttacccccggggggcgggttggtttcccccgggctttccctccccttttttaggctctttacccccctttttttgctttttttcccgttttttcccgccaagttttaagggtttcccccctttggttttaccggggggctccttttgggggcccggttcccggttttccgggcccggggcccggaaaaa

SEQ ID NO: 5500 - DNA, 595 bp, Chlorella sorokiniana
  Clone ID: LIB3602-078-Q6-K6-H8
cgccagcctgcgccgccagcagggcgcgggcatgggtgccgccactcgcctgtcggcggtgcgtgccatggccaccgccaacggccctgtcaccaagaaggtctacttcgacatcacgattggagaccagcccgccggccgcatcaccatcggcctgtacggcgatgaggtgcccaagaccgccgagaacttccgcgcgctgtgcaccggcgagatgggcttcggctacaagggctgcggcttccaccgcgtcatccctgacttcatgatccagggcggcgacttcaccgcgggcaacggcaccggcggcaagtccatctacggccgcaccttccccgacgagaacttcaagtacaagcacactgtgcccggcctgatgtccatggccaacgccggccccaacaccaacggcagccagttcttcatcaccacggttgccaccccctggctggacggccgccactgcgtgtttggtgaggtgattgacggcatggacgttgtgcggaagattgagtccacccccaccggccccatggaccgcccccgccagaacgtggtgatcaaggactgcggcgagctggcgtaaacaaccttc

SEQ ID NO: 5501 - DNA, 584 bp, Chlorella sorokiniana
  Clone ID: LIB3602-078-Q6-K6-H9
cgtgattccctgcacaagcgccgcgccacgggcggcaagcagaaggcatggcgcaagaagcggaagtatgagctgggccgccaggccgccatgaccaagctgtcctccaacgtgtgcgtgcgccgcgtgcgcgtgcgcggcggcaactccaagttccgcgcgctgcgcctcgaccacggcaacttctcctggggctctgaggccgtgacccgcaaggtgcgcatcctggacgtgaagtacaacgcgtccaacaacgagctggtgcgcacccagaccctggtgaagggctgcatcgtggaggtggacgccgctcccttcaagcagtggtaccagcagcactacggcgcggaggtgggccagaagaagaaggccgccgccgccgcgcccgccgagggcgaggccgcctcccagagcaaccacgtgaagcggaagctcaagcagcgcaaccagggccgcaagctggaccagatgctggacgaccaattcgccaccggccgcctgtacgccgctctgtcctcccgccccggccagtgcggccgcgcggacggctacatcctggagggccgcgagctcgagttctatgt

SEQ ID NO: 5502 - DNA, 404 bp, Chlorella sorokiniana
  unsure (1)..(404): unsure at all n locations; Clone ID: LIB3602-079-Q6-K6-A1
gcgtccgccctgngcgctgggtccgctttgntgttcctgcccttccaccgcgcctccctggccaaggcgggcatgcccaagcagaacggcatgacccacctgcaggctggcgatgctcgcgctgaagaggcgtctttcattctaaagaccaacgaccccgccggcttcaccgtcgtggacgtcatggcctggggcgccctgggccacgctgccgccttctacatcctcgcaacctccagcctgggcctcgaccgcaaccccttctaaaccagtccacggccgcagcctgcgcccaggccacaaccccatcccgagaagagcatttgtccggcgctgtgcctttttctgttgggcatggcgactgcagccacgcatgtgatactgctatgtaaacgaccgcttgt

SEQ ID NO: 5503 - DNA, 610 bp, Chlorella sorokiniana
  Clone ID: LIB3602-079-Q6-K6-A11
tttgcgccagcaacggcgtggacacggcgcgccgcctcaccctgctgggcttctgctacagcgcggagcagctgtttgagcgcgtggaggacacggtgctcgctcgcggcggcgaggtttgggagacgcacacgcagctcaagagcggcgtgcacgagtgcctaaagatgagcgtggcaatcccctatctgttcggcgtgccgcccgagtttgagcacctgaaggccggcatcaaaaccggcggaggcatcatcgaccgcattgagcagcagtggttcatcttctgagcgcatggagcctcactccaggtgtatgtgcattacgccaggcatcagctgcttcgacagtaccctccccctgcctgaattttgtgccaccgctggtgccggctcgcaccagcggcggctgttccctgcgcccctgctgttgcccagcgggcgcccctccctgttgtgccatgatttgcagcctgccaaattgtagcgagccacggcaggctgccccctttgatctctaaaccccctcctaccccgacatcccccctcactttcatgctgtgctgccctgtaccaacagccatccatgtgattgcccaattgtacgagcgccg

SEQ ID NO: 5504 - DNA, 471 bp, Chlorella sorokiniana
  Clone ID: LIB3602-079-Q6-K6-A12
cccgctcgctgccgcactgcggcgcaccatgctccttccccacaccgaccctgcaccttggccctcatattgctgccgtccgtcgcctgccgtgccccgccagcccgcctcatggggcgctccatgcagctcacatccccctggcaggctggctgagcacttaggctagacagcagctgcccgttggcctccctgcacccggttttgctcccttcttgcttccacaacccgcttgcagcaacgttgctcgtgcactgctcccagcagttggtggtgctcaacgatggggtcacccggacacccgacctccgctgttgttgtttcattccagcattgcatgcccacgttgtgttgtttccagagccagtcagcctgtggaccaggcccagcctctgtaacccaagcaagcaaagcagcgcaaattcgcagagatcgtgaatgccttggttttcatgcgccccagctcattcg

SEQ ID NO: 5505 - DNA, 450 bp, Chlorella sorokiniana
  Clone ID: LIB3602-079-Q6-K6-A2
cccggtcgcccacgcgtctaaaaaaaaaaaaaaaaaaaaaaaaaaaaaaaaaaaaaaaaaaaaaaaaaaaaaaaaaaaaaaaaaaaaaaaaaaaaaaaaaaaaaaaaaaaggcggcctttttaaaggatccagctacatcccttcttgcggggggttcttttttttttgtgtgcctaatcctttcactggcgggggtgactctttgggttggcaattttggcttcccatttttcccctggggcttgccccttttcgccgggccgaatttgaagggcccgcccttcccttttcaaggttgtcatcctgattgggaaggggcgccccctttccggtcttttggcccggcggttgggaggtttcccccccgtggccgttcttttgccgcgccgttgcccgttcctttggtgctccctccctttttgcccgttggccgctttcttgctgcttta

SEQ ID NO: 5506 - DNA, 416 bp, Chlorella sorokiniana
  Clone ID: LIB3602-079-Q6-K6-A3
tcgggaaccagcaagaggcccctaaggagcagaagtcgaaggaggcgaaggcgcttgccgccgccaactccagcaagggcaagaagaagaaatggtccaagggcaagctgaaggagaaggtgaacaacctggtcctcttcgacaaggccacctatgagaagctgctcactgaggtgcccaagtacaagatgatcactccctcggtgctgtccgaccgcctgcggatcaacggcagcctggcgcgcgccgccatcaaggagctgctgggcaaggggctgattaaggaggtggccaagagccgcgcgcagcagatttacacccgcgcgacggcagccgccagctaagcagccacccagcagtttggcagcatgctagtgcactcgttgtgcttgccaatctggtaacaggtccctcgc

SEQ ID NO: 5507 - DNA, 403 bp, Chlorella sorokiniana
  Clone ID: LIB3602-079-Q6-K6-A4
cccacgcgtccgcccacgcgtccgcccacgcgtccggccgcagctgcgccgcaagaaagcaaaggggcccaacccgctgtcggttcagaagccgaaaaaggctaagaaggcggcagcggggactggcggtgccagcggcggcggcggcggtggcggtgagcccaagcagcagaagcagcagcaggcagcggcagctggtggagagggcggcgagcagcctgctcagaagaagaagcggcagcggcggcgcggcaagggcgctgcggcgggcggcgctggtggcggcgctggtagcggcagcgattgagttgcagcgtggtggtcagcctgctgcgtccattgcgccaactgttctggcttgaaattcacaggtgtttgctctgttgcaatggataaagcgcac

SEQ ID NO: 5508 - DNA, 401 bp, Chlorella sorokiniana
  Clone ID: LIB3602-079-Q6-K6-A5
ccctgtcttttcctcgccacgcctttcaaatgcattcaagctcggtactcggccaacttgaacttactccaaaccgcactcctgttagcccttcccctccacgaccttgcggcgcagccgcctgtgtgtgcttcccactcgcaggcctgccgccccgcacccatccataattttttgcccggcccctttggtttctctgcccatcgccgccggatgcggcgtcccccagatcgctcgtctctctcttcctacctcctgcatgctgcagcaagctatacatggccgttcagccaccgcatccccccttttttgcccccctagtgtccttcgtcccctcgcgtgcgtcttactaccgatacctgctgtaccaacaaaacccagccatgtaactgaccgagtgc

SEQ ID NO: 5509 - DNA, 586 bp, Chlorella sorokiniana
  unsure (1)..(586): unsure at all n locations; Clone ID: LIB3602-079-Q6-K6-A6
ggtcgacccagcgttcgagccccatgctgatctccaanaanaaccggcgcgaggtgtacaagtacctcttcaaggagggcgtgctgtacgcggagaaggacttcaacctgcccaagcaccccgagattgatgtgcccaacctggaggtcatcaagctcatgcagtccttcaagtccaaggagtatgtgaccgagcgctacgcctggcgccacttctactggttcctgaccgactctggcattgagtacctgcgcgagttcctgaacctgccctccgagatcgtgcccgccaccctcaagaagagcacgcgccccctggagcgcgagggcgcgcgcccgccccgccgcgacggccccccccgccgcttcggcgaccgcgagggctaccgctccgagaaggcgggcgcccccggcgagtaccgccccgagttccgcggcggcttcggccgtggcgccgccccccagtaagcgtccgcttcctggagcagcgccccctgggctcggcaggcggcggcgggtgcggcggccgcgaggagtggcagagtgtgcgtgccagctgcatgcaggctactgtaacctccgccgac

SEQ ID NO: 5510 - DNA, 583 bp, Chlorella sorokiniana
  unsure (1)..(583): unsure at all n locations; Clone ID: LIB3602-079-Q6-K6-A7
tttgcagcagccctccgaggctgagcgtagccgtagtgcggagccagagtcgtgtaacacgctggccggtnaaaaaaaaaaaaaaaaaaaaaaaaaaaaaaaaaaaaaaaaataaaaaaaaaaaaaaaaaaaaaaaaaataggtaggacgttatagatgttctatgtttacgtcctcttttattggactggttgtcttttttatagtttttctttgtttaaatcctttggtttccttttttaatcgtcttgcttgggattcctttgttttttcttagctttttcgctttgcagtttattcctttttgtttttgttggctttcttcgcactcatgcntttttttttttttcctttttttgtcgttgttcttttttgatggtgtttggggtggttcttttttttgtgttttttgtttgtgtttttttttgtttttcgttcttgtgttttttttttttctgttcttggggttttttttgctttgttccgtctttttgtcatttttttttgttctcttgtttttttttttgtttttttcttttttttttgtttttgtttttctttttttttttccttttattttttt

SEQ ID NO: 5511 - DNA, 501 bp, Chlorella sorokiniana
  unsure (1)..(501): unsure at all n locations; Clone ID: LIB3602-079-Q6-K6-A8
gggaggtgcccctgtaccaggctcaggagggcgacaccatgttcggcgtgggcagcctgggcgacaccgaggcaggcctgccccccatcgctgacatgaaccagttcctgaaggaccagctggacggccacctgaagaacggccgcacccccatgcagctgtccatgcactacggctggctgaccaacaaggaggacaaggtggaccccagctgcagcgatgccggctgcgagctgttccccaacgagaacgcaaaggccgtgggcaagttcctggactacgcgctgaagcaggaggcggtgcgcttcgtcacctactccgacttcatccgctggatgcaggaccccgtgcccctggacaagttcgacgagtggatcgactgcaagacccccggcgtcaaggccgacctgtccaccgtcaagctgaccgatgagcagaaggccaacgcctactacctgcgcaagatggaggaggcggtggcagtggnctccccccgccccc

SEQ ID NO: 5512 - DNA, 590 bp, Chlorella sorokiniana
  Clone ID: LIB3602-079-Q6-K6-A9
cagcagcttccttttcgtgtcggagggcgcaggcaagcgcatggtacaccccgacagcagcctgttcagcgtggcggcctcggcactctatggcatcatcctagcggctcaggagcagtacgcagacagcctcttccgagtgaatgagatgcggctgtgagttgcaatgagatgcggctgtgagttgcgtttgttgcacgccgcagggcgggctacgtcgtgctgtttggctgcagccttgctgcaggcggggctcggagctagcattgcaagggggagggtgcgcagatgttgtatcactgctgctgcccctgctgctgagccgttgctgttgtgctgtgccatgccatatgctgcaggtatgcgatgctgaagcgccacggcgacattggcaaccaccagttccgcgaccatttcggcaccaaggcgtacagccaccgcaaggttgggaggctggtgtccgaggcgctcctgacctcaaagcatgctgagcggattgtggtgacgccagccatgctggatggagccacggtaaccgtctagtcaagtctcggcccagcctggcgatgcccaaccaaaaggcatgccaa

SEQ ID NO: 5513 - DNA, 441 bp, Chlorella sorokiniana
  unsure (1)..(441): unsure at all n locations; Clone ID: LIB3602-079-Q6-K6-B1
tgcctgcagcagagtcagctgcgggttcggcagcagctgcagatgcgccagcggcaggggcagcagcagcaggaggcgaggctgtgcggccttcgggcaagctgctcactggccgtacgcgaggccaggcaggcggcgacaacggcagcagcgaggatgtgggcacgcccaagcatgcgcagcgcagcatgccgcccttgcacgttccggcggctggtccggccccctcgcttggagagtttggcctgcagtcaccgcggccgccaggcagcagctgactgctcttgtgcaggctgtagtgattcatttgcggctttgtctggcttggctcccgaatcttgcttcccttggctttcttctcctgctctggtctgctgcttacagttcactgcttcgatgtgattctgcatcagtcnnnnnanaannnannnnnnnnnanaa

SEQ ID NO: 5514 - DNA, 500 bp, Chlorella sorokiniana
  Clone ID: LIB3602-079-Q6-K6-B11
cggcccactcgtttgtgccatgcccacctgcctccaacgtcacccttcatcaaccctcacccaacccatccacctgccacccatccactcaccttccctccgccacaacctctgccacccactcaccacccatcacccgctcaacgccctccatgcaccatcctccccatccaccaaatctgccaccccaaacgcacgtccgccgctgcaccacctgccgccccctcacccgcacccatcttccacccgccacctttcctgccgctcaccgccgcacatcctacctcccacacctcactccatgtccacccttcacccgcgcttcacacagcggctgctgccatgcaaagctgctgccaaacccatccatcatgctcgcacacccactcacccacacgtccaacgtatccagacccattttcaaggcccgactgtacagtgcctttttgcgtccttatgccgatctggtaccaggacttaatgtgtaacaaatggtatgt

SEQ ID NO: 5515 - DNA, 596 bp, Chlorella sorokiniana
  unsure (1)..(596): unsure at all n locations; Clone ID: LIB3602-079-Q6-K6-B12
cctggncgcaatggtgcagggcggctacaagtaccaccagtaccaggtggtgggccgccatgtgcccaccgagaaggagccggagcccaccatctaccgcatgaagctgtgggccaccgacgccgtgcgcgccaagtccaagttctggtacttcctgcgcaagctgcgcaaggtgaagaaggccaacggccagatcctggccatcaacgagatctttgagcgcaaccccaccaccgtgaagaactacggcatctgggtgcgctaccagtctcgtaccggctaccacaacgcctacaaggagtaccgcaacaccaccctgaacggcgctgtggagcagatgtaccaggagatgggcagccgccaccgcgtgcgctccccctgcatccagatcatcaagaccgccacgctcacggcgtcccagtgcaagcgcgcggccacgcagcagctgcacgacagcaagatcagcttcccgctggcgcgcaaggtgctgcgcccctcgtcccgcaagttccgcaccaccttcaaggcggtgcgccccaacgtggccatctactgagcgcctcgccccaaggcggctcgcggccacactggcggca

SEQ ID NO: 5516 - DNA, 380 bp, Chlorella sorokiniana
  Clone ID: LIB3602-079-Q6-K6-B2
cttgcctgtagtgaaggtaaagtctcaccatgggcaagtgcggcaagggcacgggcagctttggcctgcgccacaccaagacgcacacgctgtgccgccgctgcggccgccgctccttccacatccagaagagcacctgcggctcgtgcggctaccccgcggccaagatccggaagtacaactggagcgtgaaggccatcggccgcaagaccaccggcaccggccgcatgcgccacctgaagaacgtgcagcgccgcttccgcaacggcttccgcgagggctctgctgccaagaagatcgctgcctaaacagctggtgtctgcagctacgcggcagcacgttgagccagctgtgtagcaggatgtaacaccgcgacacac

SEQ ID NO: 5517 - DNA, 519 bp, Chlorella sorokiniana
  unsure (1)..(519): unsure at all n locations; Clone ID: LIB3602-079-Q6-K6-B3
ccgggtttcgacccacgcgtttcgccggcaagtcccccctggnaaaacctgnggctgaccaccttgnnctgagccnngtctgtgaacaaacggcnnttcgcgtcccgccgaccaagtgtcnnctgccccttgnngcctgaacgcncnngtcgtcaactctggtagctgacgctnngggcagtcccatattaacgcgcggccatgcccggttttgcgacaangcacacatcatgatgagtgaggattgcccaacctcccttgtcgcactgcttgtaacaantcctggcgtccctcttgtacccttngacccgcactcgggcgtggatatgtaacgttccgcgggactcanaaaaaaaaaagaaaaaaaaaataaaaaaaaaaataataaaaaaaaaaaaaaagaatgaaaagaaaaaaaaaaaaaaaaaaaaaaaagggggggcggaatataaagaaaaaaaatggtgggtcccccgtgtaaaggaaccaattttccctcccaagggttcccccaaatta

SEQ ID NO: 5518 - DNA, 604 bp, Chlorella sorokiniana
  Clone ID: LIB3602-079-Q6-K6-B4
gccgcaggtcaaggcgggggcggcgggcgtgaaggacacgatagagagggacgttgccggccacgacgtcttcatctacatgaagggcgtgccgcaggcccccatgtgcggcttctccaacatggcctgtgccatcctcaacctgtacggtgtggagtacggttcgcgcaacgtgctggccgaccccgaggtgcgggagggcatcaagcagttcacgcactggcccaccatcccgcaggtcttcatcaagggcgagtttgtgggcggcagcgacatcctgcacgagctgcaccagaagggcgagctgaagaagatgctggagggcgtgaagcaggctgatgaccagggcggccacagctgcaagacctagttgcgcaaggcaggctgatgactagggcggccgcggaacacaagcaatcgcctctaccagcctgcttgcctgggaatttcgagcttggcttgccttgctcgcccagagcgccctgagggcgcaagcttgggggccgcatgcgagcatgggcagctgcgggcccattgcgcagccaagtgggcaacaacgggctctacggaaacagctggatcttgacttttcgttgctgctgct

SEQ ID NO: 5519 - DNA, 745 bp, Chlorella sorokiniana
  unsure (1)..(745): unsure at all n locations; Clone ID: LIB3602-079-Q6-K6-B6
acccacgccgtctcgacaagggatcttcgnngcaccaccnagnaccnngcgtccgagcagnaagnaagggggctacaagtctnngccgcgccacnnatcatggccnnnacggcgacctgnngcccgcctcnnatcaactcnntgatgagatnnccagtcggtggtcanatgccgcagaagaaccggcacnctgcccgcgccnngcgctgaagnnaagaacccgcttngcgcaacctnggggcgcgctgnnctcaagctcannacccctacgccaagnggtggcgcnngccgcgccgagtctttgctggccgcgcccagaaggggnnngccaagtcggcccaaggggtggaggcngnngcccgcaagggcccaaggcncccgccgcgcccgccccgcnnggtgaagaaaaggtnngtccaaggcnnncttctacnnagcaccanntgatcaccgnnnactcggactacngnntgggcgannggactacgagnngtgttcagcagctttggctggnngcaccacccatgtnnnagcgccccggcccccggagtagctttccccagaaggaaaggcgaaagcgcggcnngcggcggcgcccgccccgcccgcgnnggcggcggaggggtcaaaccggcccgcgggcggcggcccgcttgcgcgccgccgccgnnncccgagcgttgaccagagagggcccgccccagttgaggggcgcaccagaagtacancgcacccccgtgtaaca

SEQ ID NO: 5520 - DNA, 613 bp, Chlorella sorokiniana
  Clone ID: LIB3602-079-Q6-K6-B8
ctgggaatcatctttggggaccgcctgcggcgcaccacactgctgctatactgcatctggattgtgtgtgcaatcacatactacgggctagtgctgctcacaaccgcgctgcaaactgtggccaagcgggatgcgtgcacgcccagcggagcgcccaacctggacagcagcgattaccttgccatcctggttgccagctcagcagaagcgcctggcttgctcgcagcggcctccctgattgaccgcaagggtcgcaagtggacgctgcgcttgggcctgctggcctgcaccgccgcgctgctgggccttctggcagacccctcgcggggcggccagctggcgctgctctttgcggcgcgtgcagctgtggagggtagctacagcgtgctgtatgtctactctccagagctgtaccccaccattgtgcgggcactggcgcttgccatgtgcaatggcttctcgcggctgggaggcttccttgccccattcgccacagtgtaccttgtggcggacggacgcacccacaccgcagagctgctgctgggcagcctgtgctgtttggcaggcctgtgcgcgctgctgctgccttacgagacacgcggcagggacctgc

SEQ ID NO: 5521 - DNA, 302 bp, Chlorella sorokiniana
  Clone ID: LIB3602-079-Q6-K6-B9
cgcaccctcaccgaacccctcggctttcattgctaacgtcctttcgcttccgtcagttttgctgtttgctccatgctgctcgctcccgagcgccccctagctcgctccatattaaggcatgagcttctctgcccctgatatcgcccccttgtctgtactgcgcacttgcctgcgaattgcagccgcgcccccacctgtaactgcgcttcagccaaaaaaaaaaaaaaaaaaaaaaaaaaaaaaaaaaaaaaaaaaaaaaaaaaaaaaaaaaaggaggaacgaatgtagggggtccaatctta

SEQ ID NO: 5522 - DNA, 576 bp, Chlorella sorokiniana
  unsure (1)..(576): unsure at all n locations; Clone ID: LIB3602-079-Q6-K6-C1
gccgccgacatgatggagcgcgccaaagagaagggcaaggacatggccaacaccgccgccgacaaggcggaggacatgattgaaaagatccggccctaaaccaagggctataccttgctggctgtggcggcaacaaaaccgagcccaccaaacagccagcggcctatgccggcagccctcgtggccgtgccggcggccggcactgccgcagctagccgtcggcgccagcagcccagctgaacgactcatctgtgcggccgctgggccgctgtgattcatttgcatcggcccatgagcggctgccttgcacgcatggtgcggcacggcctgctctgcggcccttcatacctttgtacctttctgtatcatcttgcagcaatggcagccggctgcatctttctaacatcgtcaccggcccactcgtttgtgccatgcccacctgcctccaacgtcacccttcatcaaccctcacccaacccatccacctgccacccatccactcaccttncctccgccacaacctctgncacccactcaccacccattacccgctcaacgtcctccatgcaccattct

SEQ ID NO: 5523 - DNA, 606 bp, Chlorella sorokiniana
  Clone ID: LIB3602-079-Q6-K6-C11
cgcggcatgttgcgcttttgtggcacgccgcatggtgaaacaggacagctgctccctgctggagagcgcaagactgcagaatccatgataggctttgcgccgctgctcgcttggtcgtgcagggcgcaggagccatctgcggatgaagatgagacatatgtggcagccgtgaacgcagcactgaatgccgaggaggacggcgacgctatggatgctgagctgcccgctgtgcctgctgtgcccgctgtgcctgcagccgcagcagcacccagcgcagccccagcggcggcagttggcggtgcggcagcaggcggcggcggcagtgccaccatctcagcgtccaacctggcggcggcgctgggcagcattctgtctggagcggcggcccgccagggcggcatggcagccatggctgaccctgggccgaccctcggggatgtgctcaagccggaggcgctggggccgctgttggcgagcgaggaaatggtggcacgcttggcgccttacctgcctgaagagcaccggagcgcggcggccattcgggagctggtcagcacgccccagttccgccaccagctggacctgttctcgcatgcgctgatgact

SEQ ID NO: 5524 - DNA, 411 bp, Chlorella sorokiniana
  Clone ID: LIB3602-079-Q6-K6-C12
gcgttcggtgttgtgtttcttgatcacaacccctcgcgcctgggcgcgctttcagcacacttctttctcaacatttcatcgccatgtttgaaccctcccctcaccctgacgcacagccagattgctcccatacgcaaagcgcctcaacgaatgcgcctcatgcagtcagccttttcgtttttgcctcaacaatgccccgtgtaacacagccctcagtaaaaaaaaaaaaaaaaaaaaaaaaaaaaaaaaaaaaaaaaaaaaaaaaaaaaaaaaaaaaaaaaaaaaaaaaaaaaaaaaaaaaaaaaaaaaaaaaaaaaaaaaaaaaaaaaaaaaaaaaaaaaaaaaaaaaaaaaaaaaaaaaaaaaaaagagggggaggggaaaaaaaaaaaaaaaataaaaaagggggggg

SEQ ID NO: 5525 - DNA, 609 bp, Chlorella sorokiniana
  Clone ID: LIB3602-079-Q6-K6-C2
ctgttctccgaccgcacctgcttcaccatcgcccatcgcctggacaacgtcatccgctccgaccaggtgatcgtgatggatgcgggcctggtggccgagatcggccccccctccgtgctgctggccaaccccaactccgccttctccaagctggtggacaagacgggcgccgcctccgccgccgcgctgcgcaagatggccgccgacttcctggcagagcgccaggccggtgtgcaggtgggcttccacaagcgcccctcgctggacgaggtgcgccgctccctggacggcggcgctcgccccatggcctcctacctcacccctgcccccggccactaagcggctgcaccccggcgcagcggctggtgagacgcctctcttgctcgagacggcccgccagcccccgccgccggccgccgcccggccctaggcgcgccagctgtcgcgcccaaacctcgtgtacctgtgtgcgcactgccagtgagcgcagctgccctttttctcccccttccctgtgtgagacgcccgcttttgcccactccaccactcacccgccgctggcggtttctctctcaagcccctgccaccttaccactcgccatgccatgc

SEQ ID NO: 5526 - DNA, 83 bp, Chlorella sorokiniana
  Clone ID: LIB3602-079-Q6-K6-C4
taaaaaaaaaaaaaaaaaaaaaaaaaaaaaaaaaaaaaaaaaaaaaaaaaaaaaaaaaaaaagggaggggcgggcctgttttg

SEQ ID NO: 5527 - DNA, 613 bp, Chlorella sorokiniana
  Clone ID: LIB3602-079-Q6-K6-C5
gtctgatgcccccaccttcctgaagcagttccaggccggcaagctggacaagtgggtgaagagcgaggagcctccggctgacaacgacggccccgtccgcattctgactgccaagacgtttgacgacgaggtcttcaagagcggcaaggacaccttcatcaagttccacgccccttggtgcggccactgcaagaacatgcagccagcttgggaggcaactggcaaggagctgcagaagctgggcgacgagggcgtggtgatcgcccaatttgatgccaccgccaatgatgcgcctgccaaccccaagctctctgtgcgcggcttccccaccctctactttgtcaccgccaagggagatgtgtacacctacgatggtgaccgaagcaagaaggacctgctgaagttcattgcctaccgccgcaccaccgagccggaggccagcaagaagaaggtcaaggcagcgaagaagcaggccgacgacagcgaggacgatgaaaaggatgagctgtaggctgcaggttcagtaagctgcacgtcagtgtggtgccagcacacgctagcgctggctgcttgtagtgcctacgtgggcgcttggctttcggcccccgctgtc

SEQ ID NO: 5528 - DNA, 576 bp, Chlorella sorokiniana
  Clone ID: LIB3602-079-Q6-K6-C6
gcaggcgttcgtcattctgccgtcctttctgtcaacgcatcatcgaggccaaccagctatctggagggcaagacacagtcgatagcacgctaatttacagcgcagcgccgttgctccgcggctggccagcgacctgccgccgctgccgccgccgccgccgcagtgatggccgcgcaagcacagccgtggacagaggccgacacggcggctgcccgcgccgctatcccacacctgcgctccggcctcgtccacctcaacaatgcgggctgcagcatccccacacaagccacgctggcagcggtgcaagactaccttgcacgggaggcgtccgatggcgggtacgaaacggttgatgccagcgccgccgcgctgcagcggccctacaccgcgctggctgccctgctcaactgccggcccgaggagatcgccattctgaccagcgcaactgcggcttggcagcaagtcctttatggcctggcatggggctggcggccaggcgaccgtgtgctgaccagcgtgcacgagtacggcagcaatgccatcgccctgctgcagctggccaggcggacaggcgtg

SEQ ID NO: 5529 - DNA, 461 bp, Chlorella sorokiniana
  Clone ID: LIB3602-079-Q6-K6-C7
cgagattttccagcagcaccagaagagtgctcgctggacgaggtgttcgccaatggcaagagcaagcaggatttgacgcgccgcacgagcagcggcaactggattgacgaccgggtcacatggcgcgaggagcttgcctacaagcgctccatgggctacctgtgacccaccggcggttggtgggcagcaaaacactgctgctaccgggctggcagtcagcgcagaggctccctgttgaggccagccacgcagttaacttggtatgctccagagagtgatcggccgcagcctgcggcaggcagtcgagctcgcttcccgccgctgccgcgggctcgccagccgcctctgcccaccgcacttgtaatacaacgagcacttttgatacctctcttctgtgccaatctttccaactgcaacgcccctctggcgaaagccggatggctgtgtaagtcgcctccctt

SEQ ID NO: 5530 - DNA, 531 bp, Chlorella sorokiniana
  unsure (1)..(531): unsure at all n locations; Clone ID: LIB3602-079-Q6-K6-C9
agnagnaagcggaggcaaagcggctggcagcagaggaggaggctgcgctggcggctgctggcaagaagaaggcatccaagcctgcgccacccaaggtcaccgcagcgcagctggccagcatgcgggagcgggagcagcgggagatggcgcagcaggcggcagagcagcaggatgcgcagcgccgcatggtgtcagaggaccagtacgcagcagctgtggaagtggacaaccgcaaccgggaggagggcgtggtggaggcgcgcagcatggatgcggcgctgcaggcgctgtcactgggcaagcaggaagtggaccggcaccccgagaagcgggccaaggcggcgtgggaggcctattacgaggagcagctgcaagtcctcaagcaggagaagcccggcctgcggctcatgcagtacaaaagcatgatcttcgagcggtggcagcgcgacccacgcaatccccgcaatcagaaggtcgacgcgtgaggggaattggctgccactgacttgtcagctgttgctgaattcgtgt

SEQ ID NO: 5531 - DNA, 579 bp, Chlorella sorokiniana
  Clone ID: LIB3602-079-Q6-K6-D10
gcgagggcggcgatcgcctgcagaagccgccaagtgctggagcagctgactggccagcagccggtgtttggcaaggcgcgctacaccgtgcgccagtggaccattcgccgtaacgagaagatctcggcccacgtgaccgtgcgcggcgagaaggcgatgcagctgctggaggcgggcctgaaggtgaaggagtacgagctcatccgccgcaacttctccgactcgggcaactttggctttggcatcaacgagcacatcgacctgggcatcaagtacgacccctccaccggcatctacggcatggacttctacgtggtgctggagcgccccggctaccgcgtggcgcgccgccgcaagcagctggccaaggtgggcgtgcagcaccgcgtgacgaaggaggacgcaattaagtggttccagcagaagttcgagggtgtggtgctcaataaggcccacgccgcctaagcggcaggacggccaccgcctcggcgcgccggcacctctcagacgacaggcagacagcacaccccctgcaccacggcgctgcgctgcactgccccgctggcttgttgctgccca

SEQ ID NO: 5532 - DNA, 452 bp, Chlorella sorokiniana
  unsure (1)..(452): unsure at all n locations; Clone ID: LIB3602-079-Q6-K6-D11
cggacgcgtgggctgcactacatcaagaagtaccagcggtacgagaagcgccacaccaacatctcggcgcacatctcgccctgcttccgctgccacgagggcgacaccgtggtcatcggccagtgccggcccctgtccaagacggtnngcgcttcaacgtgctgcgcgtcatccccgcgggctctggcgccaagaagggcttcggctccttctaagcaggctggactaagggcctcttgccttgctggctgaagccctcgacagcagcagcagcagccccagcacggcatgcaagcgctgcagacgccctgctgccctgagtaagcgccgccatgtgccggcggtggcagcagcaccgcccgccttgcatacacctggcccctaggatgccggccacggggcgcccagtagtcgccagacggcggggcgcagcgcatgtaaccgtgtgcatg

SEQ ID NO: 5533 - DNA, 384 bp, Chlorella sorokiniana
  Clone ID: LIB3602-079-Q6-K6-D12
ccccaacgaccgcttgtgcgccttccatgacccaactaactgctctggacttgctgcccctggcgatttgatgtgtttgttgttgagcgatgccgcctgtgctgcggcagatttcatgcctgaaaccgatttccttgttgatgcacgcctttcatgcggcggtgttaccgtcaacagaataccatgtaaagaacaaaagggaaaaaaaaaaaaaaaaaaaaaaaaaaaaaaaaaaaaaaaaaaaaaaaaaaaaaaaaaaaaaaaaaaaaaaaaaaaaaaaaaaaaaaaaaaaaaaaaaaaaaaaaaaaaaaggggggccctttttaaagaaccaaatttaactacccgtgcattgcaagttaaaattttttttttggggccccc

SEQ ID NO: 5534 - DNA, 375 bp, Chlorella sorokiniana
  Clone ID: LIB3602-079-Q6-K6-D2
cccacgcgtccgcaccgacttcaagctgctgctcaagcgctggaaggcgcagcaggcggcggcggccaagaaggaggcggggctgtacagcggcatgatgaaggcgctgggcggcagcagcggcaaggccacagcaggcgcagcagcggtgcccgctgcgcccgctgcggcggcggagaatgcggcggcaaacggcgaggctgctgcagctgcggccggtggcgaggcggcgacggagtcctgaggagagcggaaaccgtcggcattcagtccgcactgcgggacccgatgtgcccacctcatgattcatcactgatatagtttgttcaaccagtccccatttcatgtcgtagctgagtgtagtgcaaggctggc

SEQ ID NO: 5535 - DNA, 334 bp, Chlorella sorokiniana
  Clone ID: LIB3602-079-Q6-K6-D3
tcgtctacttgtctcatacacaaccgcactgcccaaccccctacatttgtttgtccccttcgtgtgcagtctcctcaggccgtgcggtgcgcagttgctccctaggatgttgttccaatcaagccactttacgataccagcctgcaaaaaaaaaaaaaaaaaaaaaaaaaaaaaaaaaaaaaaagaaaaaaaaaaaaaaaaaaaaaaaaaaaaaaaaaaaaaaaaaaaaaagaaaaaaaaaaaaaaaaaaaaaaaatataatataatataaattaatataaagttttttttgagaatagtatataaaataataaagtggggtgttatttttatt

SEQ ID NO: 5536 - DNA, 444 bp, Chlorella sorokiniana
  unsure (1)..(444): unsure at all n locations; Clone ID: LIB3602-079-Q6-K6-D4
cggncgcgtggtgaaaaaaaaaaaaaaaaaaaaaaaaaaaaaaaaaaaaaaaaaaaaaaaaaaaaaaaaaaaaaaataaaaaaaaaaaaaataaaaaaaaaaaaaaaaaaaaaaaaaataaaatttttattaaaaaaaaattaaattaaattaaaatttctaaaaaatttaaataattgggggggggggtttttggggtttcacttttttttttcgcttttttgccttttttttttttttttttttggccctttattttttttttttggccggttttttttttcttgggtttttggaaatcctttggtttcccccattttttccgtttttgcgcttttttttttttggttttttggttttttcgcggggggcctctctctttttccttttccctttttttggcttttttctttgtttttggttcccttctttttgggttttttt

SEQ ID NO: 5537 - DNA, 265 bp, Chlorella sorokiniana
  Clone ID: LIB3602-079-Q6-K6-D5
gcgtccgtaaaaaaaaaaaaaaaaaaaaaaaaaaagaaaaaaaaaaaaaaaaaaaaaaaaaaaaaaaagaaagaaaaaatataaaaaaaacaaaaattaataaagacaatgcttgcgtgcgggtttcatggttttctggcgttccgctttcttggttgcgcccgtcctgttttttttttcttcggggctgccttggtcgggggggggggggggcccaccttcctgcggctggggctggttggcctctctgggcggcccggctttt

SEQ ID NO: 5538 - DNA, 647 bp, Chlorella sorokiniana
  Clone ID: LIB3602-079-Q6-K6-D6
ccgggtttcgacccacgcgttctgaaaaaaaaaaaaaaaaaaaaaaaaaaaaaaaaaaaaaaaaaaaaaaaaaaaaaaaaaaaaaaaaaaaaaaaaaagggggcgggcccgtttttaggaggaccacaattttactgcacgctgtgctgtgcaaagcgttatagtctttttcttatggggtgacccctaaatataaatatacactgggccgcggtgttttaacaaacgtggggagacggggagaaaaccctctggctttccccacaattttatatcgctttgtgcaacacatccccctttttgcgccagtggtggtataatagcaaaaggaggcccacccgcgatgcgctcttcccaaacagtttgcccaaccctaaaatggcaaaagtggcaccgcccctctgtagcgggcacattaacgcgcgggggggttgtggggttttaccgcacagtgtacacttttacttttgccagccctatagcccccgcttttttctttttttcccctttttttctccccacgttcggcgttttcccccgaaaatctataaatggggggctccttttggggtccctttttagtgttttacggcccctccccccaaaaaaacttgattggggagagggttcacgtaggggcccatccc

SEQ ID NO: 5539 - DNA, 77 bp, Chlorella sorokiniana
  Clone ID: LIB3602-079-Q6-K6-D7
aaaaaaaaaaaaaaaaaaaaaaaaaaaaaaaaaaaaaaaaaaaaaaaaaaaaaaaaaaaaaaaaaaaaaaaaaaaga

SEQ ID NO: 5540 - DNA, 566 bp, Chlorella sorokiniana
  Clone ID: LIB3602-079-Q6-K6-D9
cctacgcgtccgcctccccctcaacaggacactctagagagggctctgtgaccctgcggctgaccctggcgcacacgcggcagcgcatacaccagagcatacacacaatccaggatctgctgccggatgagacgtcgcccgagatgttccccgtgttggacgtgggcttgcaaatgccacacgaaactccagacctgcctccggagcgcgcgctagcacgcgtgcaaccacaggtccaccaccagctgggcgacctacaggacctgctccaggacctgcacctgaccatggagctgtcgcagaagatgggggataccaacgcccatgccgacacgctgggcaagcttgctgacatgtatgatcagctgacggacctaaaaactgatgaacgattctatgacccaagcgtgaacgagattgcaaaccaggcgctgacataaaccttcaattcatgctggaaatcatgctacacatgagccagcagcggatccgcctgcgtatttccatgtgtagcttcacactcaactttgaagtatactttgcaggatgcacataagggatctgaa

SEQ ID NO: 5541 - DNA, 435 bp, Chlorella sorokiniana
  unsure (1)..(435): unsure at all n locations; Clone ID: LIB3602-079-Q6-K6-E1
tctaaaatgnnctttcgtgcgccggcgtcanacgaggctgcanacaggcatgcgcggtgncgttcggcaagccatttggtgtgtgcgcgcgcgtgggcatcggtcagatcctgctgtccatccgctgcaaggacacgcacgctgcggtggcggaggaggccctccgtcgtgccaagttcaagttccccgggcgccagaagatcgtggctagcaggaactggggcttcactccctacctgcgcgacgattacttggagtggaagcgtgagggccgccttgtgaacgacggtgtgaatgccaagctgcttggcaaccacggcccgctggacgcacgggagcccggccagattttcgagggtcctgcccgtctgtggcgtgtgccggtgcatgcctaacatgttgcttgggttctaaagatgtaacgaacatctgagc

SEQ ID NO: 5542 - DNA, 543 bp, Chlorella sorokiniana
  Clone ID: LIB3602-079-Q6-K6-E10
ggcaaggtcaagtgcgagctcaacggccacacgtttccggcccggatcgacgctctgcaggccttcctcaacggcaagaagtatgccaagctggtggcggcggctgacctggatgcgcagctggccaagtacgagcccttcatcgtcaaatccaagaacctgccgggcatgctgttctgcgcgctgacgggcgagctgctcaacgcgcggctgcacgaggtgaagcaccacttgaagggcaagaagtttgcgcgcgccaaagagtggttccaggcggacgagcaggagctgctggaggagccggaggtggagggagacgacatggaggaagatgggccagagggcagcgacggccctggcttctgggtgccagacgaagtgctgcaagagtacgagatgggcgatgcagaggccgaggcaggagaggaggcggcggcggcgggcgcagccgatgcggatgctggttctgaggaagaggaggagcagcaacctgcggcggcggctaagggcagcaaaagcaagggcggcaaaggcaaggcggcg

SEQ ID NO: 5543 - DNA, 526 bp, Chlorella sorokiniana
  Clone ID: LIB3602-079-Q6-K6-E11
gcgcgtcaatcatttacagcaacactgtttgaatttgcctcatatcaaacaccaaaacatggctggcttgcaggatagcatgtgtaggcagcaacagataacagagtcgacctctcgaccaagcaggggttgcaaaacaagtctttgaggcatgatgggcagcctggcaaacaccctgcataaaaaacatccgaagcaatggagccgtccagtccgtgcggtccccaagcccaactgaacaaccaaatgagcccggctgcagcgttcgccgcgtcgtggcaccgggactgttgcaatatgaggcacaggctgttcaataccagcgccgttgtttaacgcgctgcctgggctgccttgagctcgcggtacagcgcatcgatctgcggttggaaacgctgctgcagctgcgggcgcttgagcttcatggagggcgtcatcaggtcgttctcgatggtgaagtgctcgtcgaacaggatcacccccttgatggcctcaaatcccttgagcttcttggccttctgggcgg

SEQ ID NO: 5544 - DNA, 492 bp, Chlorella sorokiniana
  Clone ID: LIB3602-079-Q6-K6-E12
tcgaaaaaaaaaaaaaaaaaaaaaaaaaaaaaaaaaaagaaaaaaaaaaaataaaaaaaaaaaaaataaaaaaaaaaaaaaatggcaaaacgataatataaggatctagggctaacctacacgtaacttgcatggccgataattttacattggggtgactgtaaaaaaccttgacgggccccagttttatagcgtgggggctggtacccccttggccggccccaattttatcgctttggcccgcatcgatcttccttccgatggggtgttcaccctgagtcccgaacggaacgccctttgtaacggttccttaacctgggtgggagtggggactccccttggagcggccctttcacttggcaggggcgctggggctccctgctttgtgtctctttcctttctttagtggccatattgcccgcccttttcccttaatttctttctttgggggtccgtttagggttctttcccagtgctttactaatcgggggc

SEQ ID NO: 5545 - DNA, 622 bp, Chlorella sorokiniana
  unsure (1)..(622): unsure at all n locations; Clone ID: LIB3602-079-Q6-K6-E2
aaaaaaaaaaaaaaaaaaaaaaaaaaaaaaaaaaaaaaaaaaacccacgcgttccgccgcagaggtcactggtgcttggcgggactttgtgcgcacttgggcgggagcacaaacgtacccgaaaaatttagaaccagagggggcacgggagcaaggtggtcacatatttgtagcccgcattccgcttcccacgcatcccgngccgacatgcttgaaaaactactgggaactggctgggctttcccaagctgcttcgaccccagcggggaaatcttgacgcgggcgcttgtggcagcttccagccccgtgcaactggagatatggcaaaactttgcgaatttggacaatggggaggatgaggaggctgggggctcgctcactgcggcccagtttgtggccaagtgcggcagttggtggcagccccggcagccgcagcttgctgcacacgccgaggcagccgtgtttgaaattcagctgacccgcgatgacggcgcagtcgaggtgcagtcggcagccaagtattggcagggctgctggtgggcatgcttgctgtgcaacgaggcagatggcaacctaggcgtctacatcattccggcgatgtgccaggggcacgaagctgcct

SEQ ID NO: 5546 - DNA, 546 bp, Chlorella sorokiniana
  unsure (1)..(546): unsure at all n locations; Clone ID: LIB3602-079-Q6-K6-E3
ccaagcggagctgggacaagcgcaggccaagctcaatctgcatcgcgacgatgtgtcgcctgaggcgcagcgcctggtgctgcccgacggtcatgatgcggcgccgctgaagggcaaagccctgctgcccgcagaccagtgcaagcacatggacaaggaggtggccaagatgaggacggagggcacagcggcggtgaacaacgtgatcaacgccatgtggaccaagttcggcaccgccgcgcgggcactgacaatgaagcagtggcgcgcccaagtgcgcagcgcggggcggcgcttcatggcgcagcagaagaagaaagcagccgagggggaggcgcacatcgcgccgcgggcagtgcagaaggcgcagaaggaggaggagcgcaagcgcaagcgcaagggagagaagattgtgtctgtgaagaagctgacgaaggcgcgttgaggcggcggtggcagcggtgcagggccaccatgcgcaggcgggcgctcccaagagcctccgcctttctcacattgcatagattgtaaagcaaacttgattna

SEQ ID NO: 5547 - DNA, 404 bp, Chlorella sorokiniana
  Clone ID: LIB3602-079-Q6-K6-E4
taaaaaaaaaaaaaaaaaaaaaaaaaaaaaaagaaaaaaaaaaaaaaagaaaaacaaaataaaaaaaaaaaaaaaaaaaaaaaaaaaataaaaaaaaataaaataaacctataataaatacaaatttactttaaatttacaaaaaaaaaatggggcgcccctttttggggggcccccctttttctttcggggggtgggccgcctttcttttttttttgtgccccctttttttgcttgctgtgtgcggggttttccaacgtttgcccttgcgaaaacccttgcggttccctttttttttccgttcctcctttcccccttttctcgcgggggcttgtgttggttgcggccctctttgtttccccttttctttcctttcttccccctgtgtgtccttttgtcttccc

SEQ ID NO: 5548 - DNA, 603 bp, Chlorella sorokiniana
  Clone ID: LIB3602-079-Q6-K6-E5
gtcccgcaccctccacgcgcgccgcagcggctgcccgcagcgcctcgccggcagcgggcggtggcggtgaaggcgggcctgctggatatgttcaaccagggcaaggtgcaggcggcggtggcggcggccgggcagtacgacgaagcggccaccaaggcggcgattgacaagtacattgctgacaacccggtggtggtgttcagctggagcggctgccccttctgcaagcgcgccaaggcggtcctggatgccacgggcgccaagtacaccgcccttgagctggaccagatggccgacggcaaggcgctgcgggctgagctggccaagaagaccggtcggtccagcgtgcccaacatctggattgccggcaagaatgtgggcggctgcaacgacggccccggcgtggccacgctgcaggacaagggcgagctggtgccgatgctgaaggccgccggcgcgctctgatgcagcagcaggctgaaacgcaagctgttgcctggtgccctgccggctgctgtttgtcatgcacgagctatcagattgaacttgacgactgctggtccactggtcgttgtttgatgtgcactttgcaaccaagcggtc

SEQ ID NO: 5549 - DNA, 264 bp, Chlorella sorokiniana
  Clone ID: LIB3602-079-Q6-K6-E8
agcaggacagtgcagcgcagcagccgtggcatgtggtgggcgacgtcgacttttgtgacgtggcgcccgtggcggcggcgctgactccggtgcccggcggcgtgggccccatgaccattgccgcggtgctgcacaacacggtgcaggcggcgcggtacaacctgggcctggagaagcaggagctgcgctgaggcgcagcgctgcatgcctttgtgtcccttgcttgtgttgagtgcagcggatgcatgtgtaaaactgcatgct

SEQ ID NO: 5550 - DNA, 590 bp, Chlorella sorokiniana
  Clone ID: LIB3602-079-Q6-K6-E9
ccgaggtggaggcggagctgacggcggttgagctggcggcccttgagcagctgaaccgcggccagacgctgtacctgctggaccagagcggcgaaaccgccaaagcggtggcccgcgagctgaccaagcgcggctttagcaaggtgtttgtggtgtctggcggctgcaacgcctggaccaacgccaagctgcgcaccaagccgtggcagggggaggggctcaacaccctgcgcgccccctccgcgcttgacgagatcatccaggtcactgagaagctggagcccctggccgagaagctggaggtgcccgagaaggtgaaggtcaacgcctgagctgcaagcctgtgagccttcaccgccactggcagcatggtaccagccgcccagagcagccattgctgtccatcgcggccccatctgatcgaacccaagaatgtatccctcgcccccgtcccccgccctctgcctctcccagtggggccgccccccaacccagtctgatccgatttgcttgcgtgccgccatttcaggcactcccccttgtcgtccgcctgtacattacccgcttgacccaattgcatcggtgccaac

SEQ ID NO: 5551 - DNA, 584 bp, Chlorella sorokiniana
  unsure (1)..(584): unsure at all n locations; Clone ID: LIB3602-079-Q6-K6-F1
ctccccactcggnacaccatggtgaagtacgcgaaggaggtggcggagccgaaggccgccaaggcccgcgggtccgacctgcgcgtccacttcaagaacacgcgtgaggccgccttcgctctgcgcaacatggacctgaccaaggccaaggcgtacatgcaggcggtgattgaccacaagcgctgcgtgcctttcctgcgctacaacggcggcgtgggccgcacctcccaggccaagaacgagggcaactcgattggccagggccggtggcccaagaagtcggccgagttcctgctgggcctgctgaccaacgcggagagcaacgccgagagcaagggcctggacgtggatgcgctgtacgtgagccacatccaggtcaacaaggcgcagaagggccgccgccggacttaccgcgcgcacggccgcatcaacgcctacatgtccagcccctgccacattgagctgatcctggcggagcgcgggcaggcggtgaaggccgaggcggaggacaagcgccgcaagctgagcaagaaggagctggccaagaagctgcgcagcggcaccaccagcaagagcagctaggc

SEQ ID NO: 5552 - DNA, 449 bp, Chlorella sorokiniana
  unsure (1)..(449): unsure at all n locations; Clone ID: LIB3602-079-Q6-K6-F10
cggacgcgtggggcgcggcgcctgcccgctcacagcgcgcaagttccccccgggaaccgaggacgccgtgtatgcgctagcagacagcctgagctacggcggcgacccgcccgtgggcaacgaggcggcacgcctgcgggcgggggcgctagcgggccagcccgcaccccgcaagcaggcgcgcaagcagaataggaagcagaattgacggcgcatgctatagacgccagctgcagctgttagtgcagcatgcgcatgccgcggccgcggcggccatgcgtgcaaggaagctggcgcgtcgtgccaaccgccgtacttagcaataaggtacccttagcttagcagcaagctccagaggcccagcagtgctcagccagcagcctggctgagctgacaggacgccaccccctgacgcatcccctttagcagccggcaggcaacgnngtcag

SEQ ID NO: 5553 - DNA, 586 bp, Chlorella sorokiniana
  unsure (1)..(586): unsure at all n locations; Clone ID: LIB3602-079-Q6-K6-F11
tttctggncgcgtgggcggctctgctgctccctcagccaccaaacagcacaccatgcagaccgccctgtgccaggccctgcgcgcccctgtggcctccaaggcccagacccgcagcaacgccggccgcaccgtcgtggtgtgccgcgcgcagcagcagaacctggccgctaaggccgcgggtgcgggcgtgtctgtccccgccctgctggcggcgcaccccgctctggcgctggtggacgaccgccttgcgggcgagggcaccggcaagatcctgggcatcaacgacccctccctgttctgggccatcaccattgtgttcaccatcgtgtggggcgtgttctacgtgtccacccgcgagattgacgctgcgtctgaccgcgagaacgacgatgactttggcctgaccctctgagcgggcgcccagcatcaggcggcccgcgcggcgtaggcccacgggcctgccgggcaaattttcgtccttctgttgcagcttgtccgccatgtgtacgctaaatccaaatttcaccccgagaagagaactcgctatgtagcacccttgtgtgaacaccgcccctctggggctcc

SEQ ID NO: 5554 - DNA, 589 bp, Chlorella sorokiniana
  Clone ID: LIB3602-079-Q6-K6-F12
ggaggcgcaggacgacaagaccgtgaccgagtggatgcgccagcagggcgtgcccgaccgcgtgaacgacgaggtgttcatcgccatggccaaggccctcaacttcatcgaccccgacgagctgtccatgatctgcgtgctcatcgccctcaaccgcttcctccaggagaagcacggcagcaagatggcgttcctggacggcgcgccgcccgagcgcctgtgccagcccattgtggactacgtcacggcgcgcggcggcgaggtgcgcatgaagagcggcatcaagaacattgagctgaatgaggacggcagcgtcaagcagtacaacctgctgacgggcgagtccatcaccgccgacctgtatgtgtcggccatgccggtggacattgtgaagaagctgatgcccgagccctggggccgcatggacttcttctcgcgcctggacaagctggtgggcgtgcccgtcatcaacatccacatctggtttgaccgcaagctgtccacggtggaccacctgctcttctcccgctccccgctcctctccgtctacgccgacatgagcgtgacgtgcaaggagtactacgacccc

SEQ ID NO: 5555 - DNA, 567 bp, Chlorella sorokiniana
  unsure (1)..(567): unsure at all n locations; Clone ID: LIB3602-079-Q6-K6-F2
ggaggcgccngaggggagacacgatgcagatcttcgtgaagaccctcacgggcaagaccatcaccctcgaggtggagtcttcggacaccatcgagaatgtgaaggccaagatccaggacaaggagggcatcccccctgaccagcagcgcctgatcttcgccggcaagcagctggaggacggccgcaccctggcagactacaacatccagaaggagtcgacgctgcacctggtgctgcgcctgcgcggcggcatcattgagccgtccctgcagatcctggcccgcaagtacaaccaggacaagatgatctgccgcaagtgctacgcccgcctgcacccccgcgctgtgaactgccgcaagaagaagtgcggccacacctcgcagctgcgccccaagaagaaactcaagtaaactactcgcttcggcacgagcggaagcggcatgagcggcagcaaccgctgccccccccccgccccgccagccgggatgccatgacagcaccggctgctcagctgctgatgtgctgcatgtcaattgctgctgcggaaatgtaacggtggtagcgatc

SEQ ID NO: 5556 - DNA, 590 bp, Chlorella sorokiniana
  Clone ID: LIB3602-079-Q6-K6-F3
gcgaaacgcagctggtgcagctgttggccggcatggcgggcgccagcccttccatgtaggcaggcccacagcatgtacacagcatgccagccacccctagtgtgggccgcctgcggacgtgcgtatcatacatggcatgcacgtcacacccgcaagcgcccccttgctttgtacacaagtacagccagtcttgaatacctctccttcccatcgtgttcagctcctgttttgctactgccccggtgcacacctgcttttcacatcgcactaccgatttgggacacatgcatcgatttttgaatcctcgcaacacacctacgattgcatgcacactttcatcgcatcactcatcaacctttcatcggcaggctgccccaggcgcagcctgctcgcccgcacagcttagccaagaatctgcggtgacctgttgctgcggccatcacagcggctgtctcgcctgcacctgatcttcaaagcaccgccatcactcttcctgtctgccatcactcactgccggacatgcatgcttgccaacaaaatgcacatgccctgtcacccaaatcaccaagaccctcggtccctccctccaa

SEQ ID NO: 5557 - DNA, 593 bp, Chlorella sorokiniana
  Clone ID: LIB3602-079-Q6-K6-F4
cggagctgctccacgcgcgctgtagcggcgcccagccggcagtcgtcgcgcccgtcgcgcccttcgccacatgtggcgccctaccgcagcagcaggggccggcttgtgtgccgtgcagggcctgagcagcagcaatcgcagcagcagaccgatgaggccgcccccagcagcaccagcgctggcagcagccctgatgccccaggcagcgtgcgcgacacgctgcgggcggcggagcagcagcgcagcggcggccgcaggcggcaggcagactcgaccgactggatttccagccagctgacgcggcggtttgggctggcaggtggcctggcctgggtgggcttcctcacattcggcgtcctgtccgagcagatcaagactcggctggaaattgcgagcgaggaggcaaacacgcgggaggtggctgatgcgccagaggttgtgacgccagagggtctgcggtaccgagacctgaagatcggcggcggctcgccgcccatccccggctacatcgtggtgcttgactacaagggctatgctaatggagagctgtttgaggacacgaccgcccggcgcaagcctattgtgttcctgta

SEQ ID NO: 5558 - DNA, 539 bp, Chlorella sorokiniana
  unsure (1)..(539): unsure at all n locations; Clone ID: LIB3602-079-Q6-K6-F5
cggccacccagtagtcaccaaggccgacgtgctggctgccctgcgcgtcgccctccgctccgcaatagcggcccgcatggacgccaagtccatcagggatgatatcgaccgcatcaacgccatggaggcggatgagaacggcgcttgcgtgcaggcgcagcagccgtcggcgcagcagtcggtgctgcagcagcagctgctggcaggcctgcaggacggtggtgctggcagatgaggcgccgcaggacacagatgatgaggaccagccgcagcccactccacctcccccgctgtcctccactccttcagtttgccaatcacctccccgctccacctcccccgctgtcctccactccttcagtttgccaatcacttcccccactccacctccccggctgtcctccactccttcagtttgccaatcacctcccctttccacctcccccgntgtcctccactccttcagtttgccaatcacctcccccattcacctccccggttgncctccattctttgggttggccattcacctccccgtt

SEQ ID NO: 5559 - DNA, 117 bp, Chlorella sorokiniana
  Clone ID: LIB3602-079-Q6-K6-F6
tgaaaaaaaaaaaaaaaaaaaaaaaaaaaaaaaaaaaaaaaaaaaaaaaaaaaaaaaaaaaaaaaaaaaaaaaaaaaaaaaaaaaaaaaaaaaggggcgggccggttttagaagaac

SEQ ID NO: 5560 - DNA, 542 bp, Chlorella sorokiniana
  Clone ID: LIB3602-079-Q6-K6-F7
gcgatgggctgtgggatgtgctggacagccaggaggtggtgaagctggctcggcgagacctgcagcgcggcaccacaccacaggaggtggccgagcggctgtcggcgctggctgtgaagcgtggcagccaggacaatgtggccgtggtgctcattgacctgggcaaggtggactggagcaagtccaacggcggcggcaacggcctgtttggcggcctgggcagcattttcgggtcgcggtgaggccgccccccgcccagggcttgccctcgtgcgctgcaccccggcggcgccgtgtgcgccccgtgcagcgccgcccccacagagagaagatccgcactgcgtgcacccctatgcaattgcttgcttttcactattatttttgctgtctgcccaactgtccctctcccgctgtgtgcgggcccagatgccctggccgctggtcgcctgcggggcggctgtgccgctgtattccttccccctgtagtaagagagtatttggcctgcgcgcccgcgctgcccacaatgtaataatctccaacg

SEQ ID NO: 5561 - DNA, 228 bp, Chlorella sorokiniana
  Clone ID: LIB3602-079-Q6-K6-F8
ctgctgtgccttcgggcctctctccttcgcggcgcatggcgttcggcagcagctgtacattacactacccagtttctggctgtaacacctgacgcacaaaaaaaaaaaaaaaaaaaaaaaaaaaaaaaaaaaaaaaaaaaaaaaaaaaaaaaaaaaaaaaaaaaaaaaaagggagaaacgatttaaaggatcaaaactatacaaacgcaagaatgcaaaaaaaataaa

SEQ ID NO: 5562 - DNA, 372 bp, Chlorella sorokiniana
  Clone ID: LIB3602-079-Q6-K6-F9
ccaccttcctggaccccagggtcgtggcgctgcgactggctatgacactgctgtggccctgcccgccgctggcgacgatgaggagtacctgaaggagaacatcaagtcggccggcgcaatgaagggccaggcagtgttctccattgccaaggtggatgctgccaccggcgagattgctggcgtgtttgagtctgtgcagccttccgacactgacctgggagccaaggcccccaaggacgtcaagatcactggcctctggtatgctcagctttcgtaagcgctgccagcgcccgtcgtttggagaagagaattacagctttgtcgctcgacctgtttgtcagacgtagaactgctcatgtaacataagcgcgc

SEQ ID NO: 5563 - DNA, 479 bp, Chlorella sorokiniana
  unsure (1)..(479): unsure at all n locations; Clone ID: LIB3602-079-Q6-K6-G1
cccgggttcgacccaacgcgttcgcngtggttcggcccgtcgtcgaggtagccagcacgatggccaaaatcaaggcccatgagctgcgcggcaagggcaaggaggagctgctgcagcagctcaaggagctgaagcaggagctgagcggcctgcgcgtggccaaggtcaccggcggcgcccccaacaagctgtccaagatcaaggtggtgcgcaagggcattgcccgcgtgctgaccgtggtcaaccagaagacccgggacgctctgaaggaggcgtacaagggcaagaagtacgtgcccctggacctgcgcgtcaagaagacccgcgccatccgccgccgcctcaccaaggcgcaggccaacgccaagactgagaaggctgccaagaaggcgcgcgccttcccgcagcggaagtacgcgctcaaggcgtgaaggccttggaagcagcccgctgcagccgtgcaggcacacctctaggca

SEQ ID NO: 5564 - DNA, 229 bp, Chlorella sorokiniana
  Clone ID: LIB3602-079-Q6-K6-G10
tcgaaaaaaaaaaaaaaaaaaaaaaaaaaaaaaaaaaaaaaaaaaaaaaaaaaaaaaaaaaaaaaaggggcgggccgcttctaggaggaacccaagctttacgttaccgcgtcgcatcgcgacggtcattagcttctttttataggtgtcaccctaaaattacaattcactgggcccggtggtttttacaaacgttcgtggacttgggaaaaacaccctgggcgtttac

SEQ ID NO: 5565 - DNA, 240 bp, Chlorella sorokiniana
  Clone ID: LIB3602-079-Q6-K6-G12
cggccgcgtgggtggaagtacgagtccgccaccgcctccgcgctggtgcagggctgagcgctcgcctcgcgcgtgagctgacggctgcagccacggctatctccaactggtgtgccagcaggcatcaccacgaagcagccgcagctctccagctggctctgcctgcgtttgcagcccctggcttgatgtgctgctctcttgcatgcatgcgccaagcgcatgtgtaaagctgctgcagac

SEQ ID NO: 5566 - DNA, 111 bp, Chlorella sorokiniana
  Clone ID: LIB3602-079-Q6-K6-G2
taaaaaaaaaaaaaaaaaaaaaaaaaaaaaaaaaaaaaaaaaaaaaaaaaaaaaaaaaaaaaaaaaaaaaaaaaaaaaaaaaaaggggcggggggttctcggtggtcccag

SEQ ID NO: 5567 - DNA, 590 bp, Chlorella sorokiniana
  Clone ID: LIB3602-079-Q6-K6-G3
atcaacagcaccagcagcagcaccagcaccagcagcatcaacagcaccagcaccagcaccagcaccagcagcatcaacagcaccagcagcagcaccagcaccagcagcaggtgtcgcagcatccacgtgagccaattattacgttgctgggcttcagcaaaggcgccctcgtgctgcatcaggtgcttgccgagctggcggaatggcagcgccagtctggacaggagtgtgccatgtgcacttggcaggcccgccaggctgccaccccaccaccaccagcagcagcagcagcagccgatcatgcagggcagggctgggaagcggcattggtggcagtgcgggagctgcactggctggatgcaggggcaaatagtaggggtgtcgcctaccccaccagcgccgctctgttccaggcgctagcgctgcgctgtgctgcgcatgctgtggggctgcacctgcacggcacgccgcggcagtggcatgaccccagtcgacggtggctcgcgcaggaggaagcagccatggcggcggcagctgcggcggcgggcgtggcgtgccggcggcgacaatactttgctgggcaaccgcca

SEQ ID NO: 5568 - DNA, 587 bp, Chlorella sorokiniana
  Clone ID: LIB3602-079-Q6-K6-G4
gaacccatgtttcccgcggcgctcaaggccgagaccgcctactgtatgccgtgtttgcctcctgcgagctggagacgcgcacagcgccgctcttgaagggctgggaggagacggaggactatgacgtgtatgaagaagccatggcttggccgcccaaggaggggccgcagccgacacgcgaggagtggttccttcagcatctgtgcgtggggcggcgctttgacacggcatggagccggatgaagggcggcggcccctggagcatagacgactttgctctgtacagcgacgacacgggcgcggagcagtatgcattggacttgaaggcacagacgtcaaaggaccttggcatctgctgggtggcgccactggatgagacgcaagccttcctgcactcagacaagatatcggcattcggcaacggcagcctgtggtacatgaactacacgtcaggggcatgcctggtggtgaccgtgccgccagcggagcagggcgtgcgcgccgtggctccggcaccggcgccgcccgaagccagcgcttgagcggcatggggcggaggagcgttcggtgggaaggcgcgtccacga

SEQ ID NO: 5569 - DNA, 381 bp, Chlorella sorokiniana
  Clone ID: LIB3602-079-Q6-K6-G5
tgaaaaaaaaaaaaaaaaaaaaaaaaaaaaaaaaaaaaaaaaaaaaaaaaaaaaaaaaaaaaaaaaaaaaaaaaaaaaaaaaaaaaaaaaaaaaaaaaaaaaaaaaaaaaaaaaaaaaaaaaaaaggggcgcccggttttagaggatccaggtttccttccgcgtccttgcaacgcattactttttttttggggtccccaaatttaatttcggggcccccgtttttccaccgtggtaattggaaaaaccctggggttccccattttattggctttgcaacacttccccttttccccagttggccttttaccaaaggggcccgccccgttcgcctttccaaacatttccccaccctgaatggtaattgggcccccccttttg

SEQ ID NO: 5570 - DNA, 481 bp, Chlorella sorokiniana
  unsure (1)..(481): unsure at all n locations; Clone ID: LIB3602-079-Q6-K6-G6
cccacccccgccgcctgggcagccgctgcgctcaagcagattgggcgggagacgagcttcactccctactggttccacggcctgcagcaagcggtgatccggctggcgcccgagtggctggtcaaccgccaggtcatgcgcatgcaccagggcttccgctcccgttactaccgccgcctggcgcggcagcaggcggaggcggcggccgctgctgcgggcgaggcctcggcgggtgagggccaggaggaggcgcctaagcgcgagctgcgccgccgcaagtgaagtgcacaccgcgagctcaagcccttgccagccttgagatggggcatgcagcgggccagcggcgacagtcagcagcaatgaccaagggtggcgttgtgctgtacgagagtgtgcatggcagcgaatcctcatgtagtgtctgtcattagctggcatggttgatttgacacaaggccgcagatgtaaacgtgacaccnaa

SEQ ID NO: 5571 - DNA, 450 bp, Chlorella sorokiniana
  Clone ID: LIB3602-079-Q6-K6-G8
gcaggagcgccggcggcagcggcaggcagtgcagcactgctgccctcccaggtgtccagcagcaaccagcagcagcagcagcagcggccattggccaccgctggacaggctgcatctgcgcagcagcagccgcaatctgggcagcagccagggcaacagcagccgtcccagcagccggggcaacaactgagtcagcagccgccggtgcagcagcgggaccctcgcctggagcaggaggctgctgagctgatgcgtgagctggcggaggagcagatgctggcgcagctgtttgacgacgattgaagcagttgtgccatgtgcaactcttggggagctactggacgacgtccgattgtctccagatggtgctgcctgtgcatttttggccgtccctgcatgcaccctgacaccgttgtgctggatagctggccctgtaaggacgtgactgtc

SEQ ID NO: 5572 - DNA, 402 bp, Chlorella sorokiniana
  Clone ID: LIB3602-079-Q6-K6-G9
cagaacggaggacgacggctgggtgatccgtgacggcgtggtggtcatcatcaaggactccaacatacccgacggcaccatcatctgagcccagaaagccagccgggcggcagcagcacctcaacatcaccttgccgccccggcgcgctgccgccacctcatgttgcaccgtggctgccttggccgcatttttgccatcccattcattcgcgttggcctgtactcccgcttgtcttgtccagtctcccttttccctgtcccctgctccctcctcctgacccttgctctgctcccgcggggttttgctcagccactacccgagaatgcaccaccaacccgaatgcatttcatactcgcgcgcgtgtgatgacccgcccagccgatctgtaagacatttctttc

SEQ ID NO: 5573 - DNA, 575 bp, Chlorella sorokiniana
  Clone ID: LIB3602-079-Q6-K6-H1
ccggtgtcgacccaacgcgtccgcctgctgcacagctgagcagcacagcgcggagcagcatgcggaggcagtcgcagaggcggcagagcatcagctggagcagatacaggccgtggctgcccgtgtgctgggcatcaccgaagggctggacgctgtggaggacggccatgaggatgaggacgaggatgagtgacaggggaggtagcactgatggtgctgcggcttgtctgtcaaggttgcggcgctcccgccatcctattatcacaccctgctgctctgctgcctggcctctgaaactgtcacttcatacccaaacttcaacgaggcagaggcaagacatgaaagtgggcaggaatacggcgcatcatcgtgcccgtggagctgggctaccccgacaacgacttcaacaaggcggggcccaagccctccaccttcagcggccagcgtgcactctgctttctgcttggaaacaagggactcattgacaaaacgctgctgtttgacatcgagctgaagaacgtgctttgattggatttacgacgtcagaattcagttttctgaggcaactgtaatga

SEQ ID NO: 5574 - DNA, 482 bp, Chlorella sorokiniana
  unsure (1)..(482): unsure at all n locations; Clone ID: LIB3602-079-Q6-K6-H10
tcgcnnctgcctccaacgtcacccttcatgcaaccctcacccaaccccatccacctgccacccatccagctcaccttccctccgccacaacctctgccacccactcaccacccatcacccgctcaacgccctccatgcaccatcctccccatccaccaaatctgccaccccaaacgcacgtccgccgctgcaccacctgccgccccctcacccgcacccatcttccacccgccacctttcctgccgctcaccgccgcacatcctacctcccacacctcactccatgtccacccttcacccgcgcttcacacagcggctgctgccatgcaaagctgctgccaaacccatccatcatgctcgcacacccactcacccacacgtccaacgtatccagacccattttcaaggcccgactgtacagtgcctttttgcgtccttatgccgatctggtaccaggacttaatgtgtaacaaatggtatgt

SEQ ID NO: 5575 - DNA, 544 bp, Chlorella sorokiniana
  unsure (1)..(544): unsure at all n locations; Clone ID: LIB3602-079-Q6-K6-H11
ttctggtgaagctcaacctgatgggcaagtccaagaccatggnagagcaaggactgggtggacccccagggccgcaagggcaagggctacggcgtgtaccgcttcgccaacaagtacggcgccaacgtggacggctacagcccgatctacacccccgacacctggtccgagtctggcgactcttacaagctgggcaccaagggccttattgcttgggccggcctgattgtggtgctgctgggcgtgggcatcaacctggtgatctccacctctgccctgggccagtaaatggcgacgccccccgcgtcggcagcagcagcagcagccagcagcattcccttgcagctaccccccgagaagacaaaccctcaccctaccctagctggcggcgtcaccatgcgccgctcccttgctttccgtttcactgtccctttcgttcctgcgttcgtttagtggaggaggcccgcctgtgtacctgacctggtggccgcgtttttggttgagcggcttgtagccgcacatctgtattatcagctacgtcnaa

SEQ ID NO: 5576 - DNA, 570 bp, Chlorella sorokiniana
  Clone ID: LIB3602-079-Q6-K6-H2
ggggctgggcgtggtgaccaaggcaccatcattgaggtcaatgtgtcggagctgggcctggtgacccccggcggcaaggtggtgtggggcaagtacgcgcaggtcaccaacaaccccgagaacgacggctgcatcaacgcggtcctgctggtgtaaacctcgcaccccgctgccagcagcctgtgccggtggtccgaccgcagcagcagcccagcagcggcggtggttgcaccgccacgctgccatggagcgtgggctgctgctctgccaggttgagagccgcgccgctggttgctgcgcccccttgtagcattattggccctcccccaggccgccctgtagcattgatcttcttcctgccccccatgtcaccagtgcaccacattctgctgcgctgcacccacgcttagcctgcttctcttccccgctcgcctcttctgctcccgttgtagctgccacatttcgtcctacctgctctctaccctccgtccctcccctgacgcgccccctggctggacatctgactttgtgaagcttgcatcacaacctgagatgtaatgtgatgtgtgc

SEQ ID NO: 5577 - DNA, 519 bp, Chlorella sorokiniana
  Clone ID: LIB3602-079-Q6-K6-H3
gcgtccgaaaaaaaaaaaaaaaaaaaaaaaaaaaaaaaaaaaaagggcggcgtcaaatctaaaccacaaaaatatgggcgctaattccaacacacgctttgtatgatttagggggggcctttcctatcaaacagttccctgctctgccccgcagcatctttttgggggagccttcctccccaatcgatgcctgcaagccatgccgtccctgctgctccgtctttgccacacccctaccgttgttcttgctcccctccatcagccgtcggccgttatccccctttgtccatccttccgccagaggcgcgctgtctacgcccactttacgctacacttgccctgcctttttgccgccttaatccccttctcttgtacgaatgtttactgcccttctgccccttattttgcgcctggccattttgcctgtgctttaatttcgagcgcttcgtccgtctgcctttttcctgtgagtttccttttttcccgctcctcctcctgtgttttttgggtctatgttgt

SEQ ID NO: 5578 - DNA, 610 bp, Chlorella sorokiniana
  Clone ID: LIB3602-079-Q6-K6-H4
gccactgccgccagcccatctgcaccgccaatcggctctgcagctgcgagctttggcacgaaagcctgggaacccacacctggcagcacacatgggcattgacgatgccatgcggcgggtgatcggccggccctacagcggggagactgagcccaagacggcccggtcgccccaggccacgtggagggacacagacccaggctacaaccccaacatggccaagacggggcgcagctactacgacacggtctagaacaagaaggctaacaccggggtttgggactaccacctgcactatgagaaggctgatcgggaggctagccacgacgtgacgcgcgccgtcttcaagtccatgggcgcctccaccactccctaaggcgatgtgctggatgcctctgtcctgcgcaagatgtttgcctcgaaccgcgtggaccacctgatggccctggtcgtcaagaacaaggacaggaagatcgacttcaaggagttctgcgacctgatccgcaagctcccctgcgactgagcgatacataaggcagatgctcgggccaatgcctgcactaaatgcaccgtttcacaccgcgccacagacgcggcgctgattgacgcg

SEQ ID NO: 5579 - DNA, 612 bp, Chlorella sorokiniana
  Clone ID: LIB3602-079-Q6-K6-H5
cgacaaaaaaaaagacaccaacaaaagaaaaaagaaaaagaaaaaaaaaaaaaaaaaaaaaaagaaaaaaactaaaacatagaaagaaaaggaaaaaaagaaaaagcaggagctgccgggacctgaccgacgtggcagtaagccccgccagccgcggctcccaagcgcgcgctccagagatccgcaagatgtttggcctgggccaaggcatgacgacgtgccgccactacggtgaagatctacggcaagcaaggtgtgagaagaacggcaagaccaccatcaagtgccccaagatccagcgcctggtgacggccccaggtgctgcagcgcaagcgccggcgggccgtcctcaagaaggagcgcgtctcgcgcaagaagaccgatgccgccgagtaccacaagctgctggtgcagcgcctgaaggagcacctcgagcgccgctccgagtccctggccaagaagcgggccatccgcatggcctttgttgcctgcaaggaggccttagccgtccctatgccggctgcatagtggcgcctgccgcctgcttgttgttgcgaggggcgcggcccggcacgaggctcgggcagcccttccctgtctgcttgcagcggc

SEQ ID NO: 5580 - DNA, 589 bp, Chlorella sorokiniana
  Clone ID: LIB3602-079-Q6-K6-H6
gcggattacgcgggtgtcgtgcacgggtcaagcctggcttatgccccgcatgttgatgatgcagccgtgcttccaatctgcccgagcagcttgtgagagcagttcggtcgttgcacaccttacttagatgactctgcccctgcactggaaagcatgcccccacgctatgcatgggtcataccgcaatgcatcctgccactccccgccctgacctgtgttactctgtaggacactcgactattgttcccaccccaggacgctcgctcttttcctgttttgcctcctttccccgttgtgctcaccgcagcgcatgacgccccaccaacgcctgaactgaccatcgaactgcatcccccactggtagagtggcctggtttgctggtatgttcaatactgtcccctcgcctgcttaccttcctctcatccgagcgactgcttctatcacagctactcagactgacatgcttgccataactgagggctggcgccccacctctggcaatgttcgagtgccaccccacctctgctgacccggcgtggcactgcttacatgcgatccatccctcttgagcaggagctaatgtaaacg

SEQ ID NO: 5581 - DNA, 313 bp, Chlorella sorokiniana
  Clone ID: LIB3602-079-Q6-K6-H7
ttaaaaaaaaaaaaaaaaaaaaaaagggggggggaaaaagaaaaaaaaaaaaaaaaaaaaaaaaaaaaaaaaaaaaaaaaaaaaaaaaaaaaaaaaaaaaaaaaaaaaaaagggggggcgcgttttatattttccaagcttccttcccctttgcttgcccccctttttccttttcttttgtttccccttggtgggcttttttttccgccgttttacttcgttttgcctgggggtcccctgccgttcccccctttgttacccttgcgcttttccccctttttcccctttggggtatttcccttttggccccccc

SEQ ID NO: 5582 - DNA, 593 bp, Chlorella sorokiniana
  Clone ID: LIB3602-079-Q6-K6-H9
cggcgtgctgggctccctcttcctggccgactgcgcggctgtgaaggagggcggctttgcgcccgcccccgcccccgccgccgccaacgacaccgacatggacatggccatgtgagcctccagtggccagcgctgcagccccgggtgctgcaaccccggtgctgctgcagccgcccgtgcggcggcaggccagttggctcgccgatgtggcttcattcagcggcctgttgcagccgccagcccattgatgccagctgccaaggcagggctgctgcctggcttgaagcgaggcctgggcacggccttctcttgcctgcttgaggccctgaacaccccaaccagattgtcacctgtggtgcacgtcaaaacccaatgcgctagctgctgactgtggggtgcgggcgcatagcccgctgcccgagagagctccccctcccctgaccaaacgtgaccatgcatcctttccctggcatcctttcccccccttcttttcctggcgtgtcgcccaaccgttgcccgggccgcccattctgcggctcgtggcccattcagctgctgctgcggcctgatcgcaccccatctctggcattccg

SEQ ID NO: 5583 - DNA, 530 bp, Chlorella sorokiniana
  Clone ID: LIB3602-080-Q6-K6-A1
taaaaaaaaaaaaaaaaaaaaaaaaaaaaaaaaaaaaaaaaaaaaaaaaaaaaaaaaaaaaaggaagaacgggtctggaggctcctaaggttcccaacctttcacttcccactgcattcgcatgtcttatcgtcttctcttggagtccacttaactgcaccgccgtgtgcccaccgttttacaccgggtaaaaccggggcgatacccccaatttactccaccttgcatggccttcccccttttcccccgttgtccccagttgggaaaaggcccaaacaggcccgcccttcccaccctttccaccacttgggtggcctatgggacgcgccctaccccccctcttttagcgcattaggcgcggcggtttcgctcattgtgccccctctatttgctacccttttaaggcccgttccttccgcttttttcccttccttccttgcctttttcgccggttttcccggctagcccctaaagggtgtgctccgttgggggctccaagggagcccttttcggcccctccgccccaaaaa

SEQ ID NO: 5584 - DNA, 110 bp, Chlorella sorokiniana
  unsure (1)..(110): unsure at all n locations; Clone ID: LIB3602-080-Q6-K6-A10
cggccgcgtgggcgactacattgccagcggccgcctcgncaagnacatcgacttctcggcggacgacaagatccttgcggcggtcggcaagtaaaccggccaaatcggcc

SEQ ID NO: 5585 - DNA, 118 bp, Chlorella sorokiniana
  unsure (1)..(118): unsure at all n locations; Clone ID: LIB3602-080-Q6-K6-A12
gtttcttgccctgcaccagtactccaagcaacnatgcaggctgcccactccagctcgcgccacccggcccgccgtggctcgccgcaccaccgtgcgcgtgcnaggctcagcaggccgc

SEQ ID NO: 5586 - DNA, 393 bp, Chlorella sorokiniana
  Clone ID: LIB3602-080-Q6-K6-A2
cgttcggtggcagcgggggcggccggcccacccggcagcacgcagccaccggcggcagcaggcgcaacagcagcagcggcggcagcgtccggggaagcagcaatattgccgcaagctggtgagcggcctccgagctgagcctgcctgccccaccctcatcttatttcctcccccatcaagcctggggtttccccctggatttttagtactgtttcctttcgctctgactctcacagcgctcacccaaaggccacggcttgccgccggcctgctcccctcctccgctgattcttcacccttcaatgactgagccctgaagccctgaactttatataaacatgttacacgttgcgtgggcctgactgcagcagcacatgtaaacccagctgctcc

SEQ ID NO: 5587 - DNA, 405 bp, Chlorella sorokiniana
  Clone ID: LIB3602-080-Q6-K6-A3
cgtcgacggccgcccttttttttttttttttttttttttccgctcgggtgcattacacgtgtgctgcaatgagagtgtgagcgcgcgtgcgccaacaaaatgcaggtggggggggagcggtgaaaatggcaggaggcgggcgggccctcagggccctgcacaaccgcgccgtgcgtgcggcatcatcgacatttcaggaagccatcatctattgaaaagacaggataaaaggtgggagaaaactggcatttgttctggcagaatcaaattccttctgagcaagcggcgtggggcggcctcgggccgcggggccagggcaaaggggctgggaacaggaagacgagtccgcgcgtgcattgggtcaaacaagcacggccggccggtgggccttcaaggctgcagtgt

SEQ ID NO: 5588 - DNA, 499 bp, Chlorella sorokiniana
  Clone ID: LIB3602-080-Q6-K6-A4
gtgtaagagcacgcaggatgaaccgcacgatcgtggtgcgccgagactactctgcactacatctaagaagtaccagcggtacgagtaagcgccacaccaacatatcggggcacatctcgccctgctttcgctgccacagggcgacaccgcggtcatcggccagtgccggcccctgtccaagacggagcgtcttcaacgtgctgcgcgtcatccccgcgggctctggcgccaagaaggcttcggctccttctaagcaggctggactaagggcctcttgccttgctggctgaagccctcgacagcagcagcagcagccccagcacggcatgcaagcgctgcagacgccctgctgccctgagtaagcgccgccatgtgccggcggtggcagcagcaccgcccgccttgcatacacctggcccctaggatgccggccacggggcgcccagtagtcgccagacggcggggcgcagcgcatgtaaccgtgtgcatgaccatacta

SEQ ID NO: 5589 - DNA, 461 bp, Chlorella sorokiniana
  Clone ID: LIB3602-080-Q6-K6-A5
gggggagcgggtgctggtcgaagaacggatcagcgccttttttgccaccgagctggacatggtcctgcggcgcatgggcgtgcagcacgtggtcattgtgggggtgcagacgcccaactgcatccgtggcactgcctgggatgcgctagcgctcgactacccacgcgtcactgtgctggcagatgccaccgcctcccgctctgaagccgtgcaagcagcaaacctggaggacatgcggtgtgcatccgtgcacacgccaacggtcgccgagtgggcagcgcagctgtgacagggtgcagctgaaattcttgccaagacaaccaaccatgtagtcagtcattctgccagcctgatgtgctattcttcaagatatgtgatcaagaagcggggaaaaaaaaaaaaaaaaaaaaaaaaaaaaaaaaaaaaaaaaaaaaaaaaaaaaaaaaaaaatttaatagaat

SEQ ID NO: 5590 - DNA, 480 bp, Chlorella sorokiniana
  unsure (1)..(480): unsure at all n locations; Clone ID: LIB3602-080-Q6-K6-A6
ccgncattgagaaccaggccaacgagaacctgcaccacaagctgacgctcaacggctacctggcggagttcacggggcagagcatggagactatcaccgccgacaccgaccgcgacttcttcatgtccgcacaggaggcggtcgagtacggcctgatcgatgctgtggtcagtaagccgtccatggtgatggcgtaagctgcttcacctgctctgtctgcctgctagaaacagctgctggccaaggcggctgtgggccgcacgccgccgctgcggcgcattgccgcgcgcgcgcgtgccgccccgtactagacacatggattgctctccctcctgactccctcgttcgctgctcctcacacaaaccttctgttttgtttgctcccttgctcgtgcgcccccgcggcgcggctctggcgcctctgaacctgcaccctccacagttttgcgcccagccacctctgtaacctgtcgcaccgtg

SEQ ID NO: 5591 - DNA, 586 bp, Chlorella sorokiniana
  unsure (1)..(586): unsure at all n locations; Clone ID: LIB3602-080-Q6-K6-A7
agcanactcaggngcgcgcggtgatgagccaggcggagacagcccagtttgtgcgggagttgcgggaggccttcaaccagctggacgcgctgcccatgcccacagtggccgttgtagacggatttgcgttggggggcggcgctgagctggcgctcgcctgcgacgtgcgggtggcggggcgggacgcgcagtttgccttccctgaaacacggctgggcatcatcccgggggcgggcggcacgcagcggctgcctcgcatcgtgggcacctcacgcgccaaggagttgatcttcactggcaggcgcatcgacatgcacgacgcagtgaagatggggctcgctgatcatgccgctgatgagacaggagcggaggatgtggcgttgaacctggcgagggacattgcacggggcggcccgctggccttgcggctggccaagcaggccatctcgctgggcggcgagctggacctgaacagcgggctgaagctggaggaggcgtgctatgcgcaggtgatccccaccaaggaccggcaggagggcctggccgcgtttgcagagaagcggcagcccaagttcacgggcgagtg

SEQ ID NO: 5592 - DNA, 606 bp, Chlorella sorokiniana
  Clone ID: LIB3602-080-Q6-K6-A8
gtcgacccagcgtccgccaagtaccgcatttatgatgtgggcgccaagaagcgggcgtggacttcttccctcactgcgtccacctggtcagctgggagaaggagaacatctcgtccgaggcgctggaggcggcccgcatcgcggccaacaagtacatggtgaagaacgcgggcaaggacgccttccacctgcgcgtccgtgtgcaccccttccacgtgctgcgcatcaacaagatgctttcgtgcgccggcgcagacaggctgcagacaggcatgcgcggtgcgttcggcaagccatttggtgtgtgcgcgcgcgtgggcatcggtcagatcctgctgtccatccgctgcaaggacacgcacgctgcggtggcggaggaggccctccgtcgtgccaagttcaagttccccgggcgccagaagatcgtggctagcaggaactggggcttcactccctacctgcgcgacgattacttggagtggaagcgtgagggccgccttgtgaacgacggtgtgaatgccaagctgcttggcaaccacggcccgctggacgcacgggagcccggccagattttcgagggtcctgcccgtctgtggcgtgtgccgg

SEQ ID NO: 5593 - DNA, 591 bp, Chlorella sorokiniana
  unsure (1)..(591): unsure at all n locations; Clone ID: LIB3602-080-Q6-K6-A9
ccgggttgtcccagcgttcgcccagcgtccggcgccgctccgtgggtgctccaggcactgttgtgtgaccacccacaggcagcgcctcaccactgctccacagcagcagcagcagcttctttgcaacgcgggtgtgcggcgctcgccggctgacgccggcgcgccgccgccccgccccgccccccgaaccaaaccactcctgcgcaacacggcagcgcgcctgttggcacgaccctctgctcccacacacacttcagctccccactgctactcccgtccccagttctgctcagtgcatgatgcacgcccctctcttcgctcctcacaaccccaccccacaagcacttgccccattccgatttgcaaccggcgcacctgacgggcggccggcgccaatgttggcatgttgtaatacgtcgttcgcnnaanaaaaaaaaaaaaaaaaaaaacaaaaaaaaaaaaaaaaaaaaaagttttaaaannnaaaaaattanaaaaataaaaaaaaaaaaaaaaaaaagggggcggccgttttaggggtacccaattttacttcacccgtgcttgccaaggtaataagtttttttatag

SEQ ID NO: 5594 - DNA, 479 bp, Chlorella sorokiniana
  unsure (1)..(479): unsure at all n locations; Clone ID: LIB3602-080-Q6-K6-B1
gcgttcgctcgctcccgnagagcatgctgtgcctcatgctgcgccgcaccgcatgctgtgctgctattctctcccccccccctgatagtgtccttttccctcccccgcttttcccccggccgccgccgctcatgtgccgctgcgcccgcttcctgccctcacttgatcgcttgctagcacagccgatgcatctatcaaccgttcgttccagtcgcttccctcccccctgtgccctctgctccctcactgctatccctccccactcgcgtcccttgcttcgagctggattccatccctgcagtcgccgctctgctcgccggcatccttgctgcccccccagttttccgcaacagtgtcctcagttgttgtatactaacagtgttgtatcatgccaggctcgagtgatggagccgcccccggcatttgccccggggtgccgccctgccctttcattaaccagtgctgtaactgctgagcat

SEQ ID NO: 5595 - DNA, 102 bp, Chlorella sorokiniana
  unsure (1)..(102): unsure at all n locations; Clone ID: LIB3602-080-Q6-K6-B11
cggcggccagccacatctagagcctttgcattccttggctcggggcggcgactggtggcgggccctccggccgtgnncctgcctgccgccccgcagcgcacc

SEQ ID NO: 5596 - DNA, 343 bp, Chlorella sorokiniana
  unsure (1)..(343): unsure at all n locations; Clone ID: LIB3602-080-Q6-K6-B2
ccacgcgtccgnaaaaaaaaaaaaaaaaaaaaaaaaagagagaaaaagaaaaaaaaaaaaaaaaaaaaaaaaaaaaaaaaaaaaaaaaaaaaaaaaaaaaaaaaaaaaaaaaaaaaaaggaaaaaaaaaattaaaaaaaaaaagaaaagggggggcccggttttgggggttcccggtttcctttcggttccccccgctttcggggggggggtttggggtccccaagtggcttcctcctgggggctttggcccgcggcgctcctggttattcccgggggggcccccttttttggggcttggctgcacttcccgtttttcccctttgggggtttggggggggggg

SEQ ID NO: 5597 - DNA, 241 bp, Chlorella sorokiniana
  Clone ID: LIB3602-080-Q6-K6-B4
cttgtgcaggcctggtgaccggcagtcccccctggaaaacctggctgaccaccttgctgagccgtctgtgaacaacggcttcgcgtccgccaccaagttcctgcccctggcctgaacgccgtcgtcaacctggagcgacctgggcatcccatattaacggcggccagccggttttggacaagcacacacaacatatgagattcccaacctccctgcgcactgcttgtaacaatcctggctc

SEQ ID NO: 5598 - DNA, 655 bp, Chlorella sorokiniana
  unsure (1)..(655): unsure at all n locations; Clone ID: LIB3602-080-Q6-K6-B5
tcccgggtcgnacccacnnccgtccggtcgaccttgnaggtgcctcggcagnatcagnncgcgcatctgaagcactttgccagcagcngaaccgagtctccacacactttgccggcacccgacccaggccgcccttcgtgcnnttcacacgcgtccagnnaccaccaanaatgnngggtttgannaattgacgacagcaagggtgctttgctgctgtnnctggagtcgcagctttccacattttcgccatccacgccacnncgtcgcacctaagcacttacaatgagctgtacatnngagcaaggacctgccggtcaacgagccgatgacccgctggttcggcctggccctggccacctgcggcggcggcattccgataaccctgtccgctggagactacagcgacaagaagcccgtcaaggatgcactcaaggcatcgggcgccgggtggaccaccgcccttgtcaccacgctctacaacgcgcatgaggggcaccagaagaaggagccagcctacgcctcagccgtcggcatggctgccatggccgccctctgcctgtggcgcggcttcagggaggacgaatgaggagcagccaactatcgcgcacccagcaatgagcagggctggtcaacatgccaataagaacacacaaaa

SEQ ID NO: 5599 - DNA, 575 bp, Chlorella sorokiniana
  unsure (1)..(575): unsure at all n locations; Clone ID: LIB3602-080-Q6-K6-B6
gcggccgctcgcgaactagnaactacaggcatgtcggcaggggcagcaggagcaccaggcagccatgctgctgcgccaaccagtgcagctgcgacgcacctagagcgcatacggcagcggatagctgcagccaaagcagccggggcaactgaggcccagccgactgctccgccgacagctgctgcagccagtggcgttgcggctgccgctgagccaggccgcagccgcagtcccagcaggggtggcgccggcagcggcgatgaggaaaggcggcacaaacgcagcagcagccgacggtcgggacgcagcagaagccccagcaggagccgcagcaggagtaggagcaggggtgccaagcggcggcggcacaagcatggccacaagaagcgcagctgtagcagggagcgcagcaggagcggcgaacgccggcatggctccagccgcaagcagggcagcaagcgcagcaggcgagaccgcagcccgagcaggagcaggagtgcggctgcctcccccacttgtagcaccggccgtgccgccggcagcggcagaggggccgaggctggagcagaggcagc

SEQ ID NO: 5600 - DNA, 592 bp, Chlorella sorokiniana
  unsure (1)..(592): unsure at all n locations; Clone ID: LIB3602-080-Q6-K6-B8
cccagcgtccggcgggctggagccgcagccattccggctggtggtgcagcaggtggaggcggccctgcttgacccgcagctgccgccctctgtgctggctgacaacaaaaagtggtgaccgtcatgcggcagtttgtgaagaatctggagccacctggaggcggctacccgccgccgttccgccacccacgcgtcaccatggtcttccgggaccacctagccggcggccagctgcagcccgtcaagtttcacttcaccaccaccggcggcgactgccagagcgcagtcaaggcgagctggagcaagctgctgcagcgcatgggtctcaacccaaacttctactttgatggcgagcagtttaagaagccgccgccgccccggcggccagcggtggagctcccgcagcagcggcgcccggcagcagcggcccctccatcccccgaggaggtggaggcggtgcgggcgcgggcggcagcggctggcttccccagccagaccatctccgaggagcagtttaaggagatgcaggagcagtcggatgcggngcgtgcacagcgtgccgcagagcaggaccagctgagcgaggcggttg

SEQ ID NO: 5601 - DNA, 484 bp, Chlorella sorokiniana
  unsure (1)..(484): unsure at all n locations; Clone ID: LIB3602-080-Q6-K6-B9
agnagcggctgctgaaggaggcggaggcgcgcgaggctggccaggaggttgagaagaagaagcctgtggtggtcaagtacggcatcaaccacatcacgcagctggtggagagcggcaaggcgcagtgcgtggtgattgcgcacgacgtgcgaccccattgagattgtggtgtggctgcccgcgctgtgcaagaagatgggcgtgccctactgcatcgtcaagggcaaggcgcggctgggcaccgtggtgcacaagaagacggccaccgcgctggcgctgacggcggtgaagaacgaggaccagcgcgagttcgccaagctggtcgagtccttcaagaccatgtacaacgacggcccccgcgtcagctggggcggcggcatcatgggccccaagagccatgcggctcataataagaaggagcgggctctggccaaggtacgccggcctccgcttgtaagcgggcagtacccacctgccgctcacc

SEQ ID NO: 5602 - DNA, 287 bp, Chlorella sorokiniana
  unsure (1)..(287): unsure at all n locations; Clone ID: LIB3602-080-Q6-K6-C1
ntaatagtgcccgtgttttcccttgtcccaccttgcaatcgtccgatgttttttgctcttcttttattcggctgcccccgcactccgcgccacgcaagcccacccagctgcggcgcggcggtgctgatttaactgcccctccttctgacagcagttcgttttgtttgccctcggccggcccacactccaacgcatgctctcccttgcattgccctggcagacagatcttccatttcatgtgcagtgaattttatttcgttctttgctgatgtttacaagacgatgac

SEQ ID NO: 5603 - DNA, 598 bp, Chlorella sorokiniana
  unsure (1)..(598): unsure at all n locations; Clone ID: LIB3602-080-Q6-K6-C2
ctgncgatggcgcaaagnaggagacgtgctacgtgcaggtcaccggcatggtgaccgcggatgtgctggagaacgaccaggagtatgatgatgtgctggccgacatccacgaggagtgcaacaagtttggcacggtgctgcgcgtcctcgtgccgcgcccgccggtgcccgcacaggtacaatcagaattttcagcatatctttcggtgatgtgctgcagggttcaccggtgctgtggctgcgctgcgcaggggcgtgccttgccccttctcaaaatccaaaatgatcgggatttgcggcaactgtggtgtgcaacaatggcgccctcatgctttgcacgcatgcatgcgtttgtgagcaagggatttgctgccaaccaaccagtggcattgacacccatgcgtcccctgatgttgtgtggttgcaggcggcggagctgatggggaccgccagctatggcaaggcctttgtgcagttcctggatgccgacggcgccaagaaggcccgcgaggcgatccacggccgcatgtttgctgggagcacggtggaagcagttttcctgcagccccaggatttcctggacgcaattgctccgcct

SEQ ID NO: 5604 - DNA, 368 bp, Chlorella sorokiniana
  unsure (1)..(368): unsure at all n locations; Clone ID: LIB3602-080-Q6-K6-C3
ccggttcgacccagcgttcgggtcagggcagccgctgctgcctggacccccctaactcctgagagcgagtgagagcgcgaagtgcctttttgaggtttctgcctggagttaccggagcactgcccaccctcccatgcctaaagatgtccattcagggcgcactccttgcaaaacacccgcccactgctngaaaaagagtgaccactgccgaaggccaagtcaaacccttgactgagcctgagcactgagtgcctccccccaacgcatgccccctttgctcctgtgctgctgcctcctggcgcagccagtcttgcccccattcattaagagctgagctgagccaatgagatatgtaaggcttacgtact

SEQ ID NO: 5605 - DNA, 433 bp, Chlorella sorokiniana
  Clone ID: LIB3602-080-Q6-K6-C4
gaaaaaaaaaaaaaaaaaaaaaaaaaaaaaaaaaaaaaaaaaaaaaaaaaaaaaaaaaaaaaaaaaaaagggcgaacagctaaaagaagaaccaatgttccttccgccttgaggctccatatttgcttttttttggtgccaactgattgcattttcttgggcgttgtttaacaccatttacatacggggaaacacctctgaaccctcccaacttacacgccttgggcgacatccatctttcgcgtgttggattacttgccaaatggcccgattagcgtcgcccttaaccaagggtctgcacactgcttggtgtccaatgggcccctccttgtaatggctcatttaccgcggctgttgtggtgtttactcccagcgcgcccgatttacttgccaccctcctagccccctctccttcccttttctttccttcctt

SEQ ID NO: 5606 - DNA, 336 bp, Chlorella sorokiniana
  Clone ID: LIB3602-080-Q6-K6-C5
ctagttctagatcgcgggcggccgctcgcgatctagaaccgcagccatttatgaattggttgaccaagtacgctctctgattcctctattctgcgcacttcccctaagtaccgcttttgactcatttccacctgtcacaacagccgtactagtctccctgcctgtctctcatctttctcattcttcatccccagttcatcgcgctacgtggcgaggcgcgcaacacataaagtgttgcacgcacgtgagctgaatagcgacctcagcggtaaatagtaactataaaaaaaaaaaaaaaaaaaaaaacaaaaaaaaaaaaaaaaaaaaaacacaaaa

SEQ ID NO: 5607 - DNA, 504 bp, Chlorella sorokiniana
  Clone ID: LIB3602-080-Q6-K6-C6
cgctgacgtggggttgtggggctggtcagcgcacgtcgctgtggtacagaagtatggagagaacgggtatgttttccaggaggtgccccaaggtcagggagggcaacccgccctatccatcgtggacatcatgactcgttacaacatcccatcctttgacattatcaagattgacgtcgagggcacggaggtgtcagtgtttgaccctaaatcagacctgtcctggttgcatccagcgagcactcagctagttgctattgaggttcaccctgtttttgcgcatcactttaacgttaaggacgtagaaatgcgcgcgcgtgtcgaccaagcaatggcagcgtacgtgcaccggcatgatggccgcgagcttgacatatactttggccgggccctggttgactgatgggttttgccaggatgagctgagatgcttctgcagctctcttttgccggcctttgcagagtgctttgagaaagctagcttgtaacgcacgctctctacat

SEQ ID NO: 5608 - DNA, 504 bp, Chlorella sorokiniana
  unsure (1)..(504): unsure at all n locations; Clone ID: LIB3602-080-Q6-K6-C7
acctccttgtttcttgccctgcaccanatctccaagcaacgatgcaggctgcccagctccaggctcgcgccacccggcccgccgtggctcgccgcaccaccgtgcgcgtgcaggctcagcaggccgcgccccgcgctcaggcccccaagccccagcagtttgctgctggcctggctgccgccttcgctgccgtgaccctggtgctggcgcccgccgccaacgctgctgaggcccgcgcggaagtgaagagcgtggtgtgcgccagcaaccccacctccaagatctgcctcaaggacagcgccaagaactgaggcgtgccagctggactgagcgagcgctgagcccttgctggccgcacctgaggcaggcagccattgctgactgccggggggcaccgggccgccacccgctgcccggcagcatgggcgaggcggcgtgagaaagagaggacttgtgcactgccacacagttttttggacacctgtgctgtaacatatacttgag

SEQ ID NO: 5609 - DNA, 151 bp, Chlorella sorokiniana
  Clone ID: LIB3602-080-Q6-K6-C8
ccacgccgtccgtaaaaaaaaaaaaaaaaaaaaaaaaaaaaaaaaaaaaaaaaaaaaaaaaaaaaaaaaaaaaaaggaagaaaaaataaaaaagaaaacaaaactaacaaacacaaaacaatacaacgaaagtggctgttctttggaggag

SEQ ID NO: 5610 - DNA, 533 bp, Chlorella sorokiniana
  Clone ID: LIB3602-080-Q6-K6-D1
ctagcctccctggcctccctgcggcacctgccgcctgtacaaccaccaacccacttttgcacccacttttgcacccgcccgccccaagattgagccgcctgcccgcccccacggcagcggctccccacgttgtgtgtgtgccgtgtgtgccccacgccgccctccacccaccaccggtggccgaattttccagctgcccagcccgcgcctcgcctggcgctgactggcctgctgccgcctccgctccctcgcctcacctcaactcccgtctagcaaagcaacccctcgtctcgcatagtacgtcaatgcacccttgcgggagcaggctgcgccagcccatgctgcgcctgctgttgcaaatggccctagcggccagcctgcgctgtgcccagcccgctcccccttcctctcggatgccctgcccttttgaagcaatgcacctacccctagcgaactacctgccccgaaacacgcaaaccctccccccaattgcacagcagcacgccacacgcccgttgtccctgctgtgagct

SEQ ID NO: 5611 - DNA, 130 bp, Chlorella sorokiniana
  Clone ID: LIB3602-080-Q6-K6-D10
ctgtgatgccgccgctgcccgagcccgcttcctctgctccttctcccaatctttgccggcggctactcggctggctactactcctacaagtgggccgaggtgctgtcggcagacgcatttgcggcctttg

SEQ ID NO: 5612 - DNA, 69 bp, Chlorella sorokiniana
  Clone ID: LIB3602-080-Q6-K6-D11
ctagcaactggcgttctggggacaccttcttcaagaggccaagctcagggctacgtggcccggtcagcc

SEQ ID NO: 5613 - DNA, 505 bp, Chlorella sorokiniana
  Clone ID: LIB3602-080-Q6-K6-D2
tcgtaaaaaaaaaaaaaaaaaaaaaaataaaaaaaaaaaaaaaaaaaaaaaaaaaaaaaaaaaaaaaaaaaaaaaaaaaaaaaggaagaaagagtttaaaggatcaaaagttaaaaaaggggtggttggctttgggggggcccgttttttgggggtctttttttttgcctgcttggcgcctttttttggggggggggggggggggaaacccggggcgtttcttctttggctcgcttggggggccttgccttttttccctgttggggcctttggggttgggcccttttggcccggttggtttcccttttggggggcttgtggggggggtggttcgcccgttgtgccggcccttttggcgcgttggggggggggttttcgcccgttttttccggtgcgttttgttgggtttttcggcctgttgtttttgtttttttcccttgcttttgggcgttttttttcgtttttttcggtttttttttttttcgtgggttttgtttggggtttt

SEQ ID NO: 5614 - DNA, 272 bp, Chlorella sorokiniana
  Clone ID: LIB3602-080-Q6-K6-D3
gcgttcgcatttgcctacttctgtgtaacttattcggcttaaaaaaaaaaaaaaaaaaaaaaaaaaaaaaaaaaaaaaaaaaaaaaaaaaaaaaagaaaaagggcggtacggtctaccggtttccacgcttacgtgcgtcctgcttgctacgtttttttcttttgtttcggggctcctattttctgttccgtggggggcgtttctctccgttgggcctgccttggcccttgcgcgtgcgccctgcgttttgccccttgcggcccctttcccc

SEQ ID NO: 5615 - DNA, 503 bp, Chlorella sorokiniana
  unsure (1)..(503): unsure at all n locations; Clone ID: LIB3602-080-Q6-K6-D4
gaagcggctcacgctctgccccatccaaaagaagctgtcgccaagaagcggctcagccagaaggagattgaatgggtgaacgcttaccaccagcaggtctgggattcgctgtccccccggctggcgggcgaggaggaggagctggcctggctcaaggaggccacctcacctttgtgaacttgaagcgtgtgaatggctgcggccaactgcctggcgtcattcggccagcagcagagctggcctggctcaaggaggccacctcgccgctgtgaaacacgtgccaattgccgctcaacatggcagccagctgaccgcaacagtgccgctttgcaccaacaaccagcagcctagctgctgctgctgctgctgctgctgctgctgctgagccgccggatttctttcatctgtttcctcagctcgccacttgtaccctgaatccacgctcggttccatcagttgctctgtgtgaatgccaaacttgccnnantnnnnnnttannattt

SEQ ID NO: 5616 - DNA, 581 bp, Chlorella sorokiniana
  Clone ID: LIB3602-080-Q6-K6-D5
tgcagtccatcaccgtgcgcgcccccgtcgcggcccggcccgccactgccctgcgcagccaggcccgcaccgcccggcgcgtggtggcgttctccgcccccaagcaggaggccatcgaggccgccatcaaggaggctgaggagacctgcgcgggcggcccgtccggcgagtgcgccgctgcctgggacaccgtggaggagctgtccgccgctgcctcccacgccaaggatgcccaggccagcagcgaccctctggaggctaagcgcgtggcggactgcgagaccgacccctcgcagcccgagtgccgggtgtacgatgactgagcgtagtccgcgtgggctgagcctaggcagcagctggccaaccctgttctagcgcccctcgagccgacgaagcttcatcgcagccgccggctgggatagcccgccgggctgccaggccgccgccccgccccaatccgcttggccaaacatccgatcctccttgaattcagcgcaatgagccagcttcagcagcagtgctcctcccccgtctgtccatgaggcctttttcggcgccctgctgttcctgcctgtattcct

SEQ ID NO: 5617 - DNA, 311 bp, Chlorella sorokiniana
  Clone ID: LIB3602-080-Q6-K6-D6
gtgccggtccggctacccgggtcgaccagcgtccgcagggcctgcccgtaaacaccagcaacgacgacaagctggcgctgtacggtctgtttaaacaggcaaccgtgggcgacaacaccaccgaccgccccggcttctttgaccccaaggcaaggccaagtgggacgcatggcaataaggaggagggcaagagcaaggagcaggccatgcaggagtacattgagctggaggcgcagctgaaggccaagtacgccgcatagatgggctgacgagtgcggctatggtgtgcccagcatccatccaattgctat

SEQ ID NO: 5618 - DNA, 599 bp, Chlorella sorokiniana
  Clone ID: LIB3602-080-Q6-K6-D7
agcgtgaagaccgctgcgagacctgcagggtgagtggaattggctaccggcctccagggattccgctgggcattggagctgacgatgtggtgccaccaggcgtgcgcccaccaggctacggcggcgggccaggcttcccaggagtgatggagccgggcccactacgcggcggcggcggcatgcacgtgggccctggcgatcccatcttcggccctgggcgcatgggcggcggcgtgggcgggccgcctgggcatgcacccggcatgggcgggctgcctcccggtgcacgctgggacccgattgctccgcccggcatgcgcggcttccacccagacgactaccagcagccgccggggcgggtgcacccagacatggcgcagccggggcccggccgcggcatcgattttgaccaaatgtttggctgactgctgccggccagcggctgtgtggagcgtataagcgatgcccaaccagccacgcatgtctgtctacccctgtgctgttgctgcatgtgccatagctgtatagcgtatgcctctcctggctcctgctgcattggctcaagcgcggcagcgcatgtaagtcccgctgcccaaaaa

SEQ ID NO: 5619 - DNA, 88 bp, Chlorella sorokiniana
  Clone ID: LIB3602-080-Q6-K6-D8
taaaaaaaaaaaaaaaaaaaaaaaaaaaaaaaaaaaaaaaaaaaaaaaaaaaaaaaaaaaaaaaaaaaaaaagagggcgggccgttta

SEQ ID NO: 5620 - DNA, 116 bp, Chlorella sorokiniana
  Clone ID: LIB3602-080-Q6-K6-E11
ccgggtcgtccccacgccgttcggtatttggtgcacccatgcattgcccagtcgctccccactgccccgtacgttgcgagatgtagtaaccctcctctcccgtccctccccccacc

SEQ ID NO: 5621 - DNA, 134 bp, Chlorella sorokiniana
  unsure (1)..(134): unsure at all n locations; Clone ID: LIB3602-080-Q6-K6-E12
cgccacttctcggttacacgtgcgggggtgtgnatgcggtgcacaacacacaggccaagcagcgcatcaacccgcagcggccagcaccggcgcgtcccggcttcaatcactgccgggcgttgcgcacaggccaa

SEQ ID NO: 5622 - DNA, 600 bp, Chlorella sorokiniana
  Clone ID: LIB3602-080-Q6-K6-E2
gtggattggagccctcgcccaccaggggctgtacgcgacagctctcatgttctaggaccagtttgtgttgccactttgtgctgccttacgctgccttgtgctgcctgtgttgctgccgcatgccgccccaccggttgcatgccgccgcatgctgtcggatcggatcggctgcaagccattagagtgattatgcttctcacgacactttggatgttggcatggtcccgtgccgcaggtggaccccttctttgtgcatttgcatgccacctatactgtcggaccggtcattttgccgcaggtggaccccttctttgtgccgctgaccgaggaggagcgggaggagtttggggaggagggccagggtgtgggctccgccaacctggccaagcggctgatcgacgcggtgcggcggcgcaagggcctgcctgtggaggagaaggtggtggagtcggccaccaagcagcgcacccgcgcccgcaaggtgtgatggctgtagcactcgcaaggtgtgaggctgcatggagcgaggaagcggctcaaggggggtcaccgtggcgcagcgctgcgtggcgcctggcaccgtcttgcgacggcgtgccg

SEQ ID NO: 5623 - DNA, 149 bp, Chlorella sorokiniana
  unsure (1)..(149): unsure at all n locations; Clone ID: LIB3602-080-Q6-K6-E3
gngagcggcgnntccttccttggcctccgcgctccccctgcccaacctggccgagaagcgnncgctggctnngttgtggcggnntcgtgtnccctgnngcgccgccgctttggccaagnannncgcggcggnacccgcnttttccgcgg

SEQ ID NO: 5624 - DNA, 104 bp, Chlorella sorokiniana
  Clone ID: LIB3602-080-Q6-K6-E4
taaaaaaaaaaaaaaaaaaaaaaaaaaaaaaaaaaaaaaaaaaaaaaaaaaaaaaaaaaaaaaaaaaaaaaaaaaaaaaaaaaaaaaaaaaaaaaaaaaaggga

SEQ ID NO: 5625 - DNA, 203 bp, Chlorella sorokiniana
  Clone ID: LIB3602-080-Q6-K6-E6
gctgggaagctgacagtggctaacaaagcggtagcccactgccgggcagccaacctgattgacatacaacggcaacgactgcacctggcaaccgaaaccaaacccgcggacgaaaccacccggcaccgaagaccaaaacgcacacgcgaaacccccacccacatggccgcacatgtgaccggtttggatagcgctgcacctct

SEQ ID NO: 5626 - DNA, 451 bp, Chlorella sorokiniana
  unsure (1)..(451): unsure at all n locations; Clone ID: LIB3602-080-Q6-K6-E8
gttcagcccaagctagttcccaaatccccctccttccgctcgcaaagccgatttcatcgcgccgtggggcccgccacagaacccaatcctgcacaaccctgccatcgcatcacacctgcaggcccctccctcttgctattgctcccgtctcccctgctccatgcccacgccgtccccgccccgggccagtttcttgctaacgtcccacccgcatctgcacctctctcatcaatctcgaccgatttgatgcgccgtgccgtgctgtcctgaaggcggcgcaatcgcccagaatccgtccatagtgcccctcagcactgctcctttgccctaattactttactccggcctttgctgcacagccacgattgactggctgccgtcccagaaatgaacgccaagcttgcacaccctctccccaaacgcacgcctgatgtaatccgagattgcnnaa

SEQ ID NO: 5627 - DNA, 329 bp, Chlorella sorokiniana
  unsure (1)..(329): unsure at all n locations; Clone ID: LIB3602-080-Q6-K6-E9
ggcaactccctgtggnaccctccctgtttagctgatgctgcatacaccagcctgcaaagttgagcacggcctgctgcaccatccagcatgttgaaacaatgcctgctgccgcagcacgccatgaacatcagcgcagcgtgccgcctctgcaggatgcgctgctctgccaatcccaatcccatacgatgcaattgttccgcagagccgcaatgaagcgagccggccgctgccatgccagcccacccgccattctttcccgctgccgtcccgtgccccctgctgcaatgcccttctgaggtggccaatcctttgtaagtgcacattcnnaa

SEQ ID NO: 5628 - DNA, 533 bp, Chlorella sorokiniana
  unsure (1)..(533): unsure at all n locations; Clone ID: LIB3602-080-Q6-K6-F1
ggtgtacgctgccggnatgctggaacgtcttgctgagcacgatgcagagtgccaggcagcggtggttgcagctggcggcgtggcctgcctcgccagcctgctcagccatagcagcgatagagtgcagcttgcagcagccagtgcgctgcccgctgtgctcgactcctgcacggcagcacaagcggcatttgcagaggcacaggctgcccccgctgcagtccacttgctgagccaccccagcccgcgtgtgcagactaacgctgctggcatgctgggcaccgcagcctgcagccatgcagccaacagtgcagccattctggcagcgggggccatgcaaccgctggcgcagctgctgcgcacgcctggccacccagggcatgaatgggcagcgaccaccgtcagcaacctttgtgcaatgcagcctgaggcagcgacagctgcagtccaacaggctggtggcgtgctggatgcgcttgggcagatagcagcgaccagcaatgatgaggcagcgcgtcaggcagctgccacagcac

SEQ ID NO: 5629 - DNA, 147 bp, Chlorella sorokiniana
  Clone ID: LIB3602-080-Q6-K6-F10
cccgggttcgaccccgcgtccgctccccttctgcactacgtttcgcaagccacttgtttcatggcagcttctagcttctggccacctgagccgcggtccttgtcccctgcggcaccacagcctttcctcgcccagctgcacacgttt

SEQ ID NO: 5630 - DNA, 115 bp, Chlorella sorokiniana
  unsure (1)..(115): unsure at all n locations; Clone ID: LIB3602-080-Q6-K6-F12
ccctgtnctgcacacgccaggctcccaagttttcagctggaacttccccggcgcttacgccgtgcagttcatgaccgtggtgtcgtgcaccgcctgcgtgtacacttgcctacca

SEQ ID NO: 5631 - DNA, 340 bp, Chlorella sorokiniana
  Clone ID: LIB3602-080-Q6-K6-F2
atcctggccaaggtcaaggccacctttgacttccgccccggcatgattggcaaggccctggacctcaagcgcggcggcgaccgcttcatccacactgctgcatgtggtcactttggccgcacgaccgccccgatgtgttcacgtggagagaaggtgctgcccctcaaggacgcgtaagccagcagtggacacgcccatctatgcggcacagcggctactaaagcgggctgtctgcggcgacagagcgcggcgacgaccgaaaagtgtgccgcaccgcgccccggcgccccctctcccctgctcgcctctgttgactagctcctccctggtgctctgcatt

SEQ ID NO: 5632 - DNA, 546 bp, Chlorella sorokiniana
  Clone ID: LIB3602-080-Q6-K6-F3
tctagaatcgcgacggccgcccttttttttttttttttttttttttttttccgctgttgaccttacaatgctagagcaagcaaggatagaagagagggaggggctgcacttggggcacaggacgccgccaatgggctggtggggtcggaaaagcaacgtgacgctgccgagtgttcatgcacattcattcggaaaccgggcgcgtgccaaaaaggaagtctcatttgcacactctctggccacccgccggcgcctgccgccttacgccgacttgctcatgtggatggccaggtccaccaggcggttggagtagcccatctcgttatcgtaccagctgatgagcttgacaaaggtgtcggacagctggatgccggccttggcgtccacgatggacgagtgcttgtcgccgatgaagtcggcggacaccacgtcctcctcggtgtagcccaggatgcccttcatggggccctccgtcgccgccttgagcgcagccatgatgtcggcgtacttggcgggcttgtcaaggttgacggtcaggtcccccac

SEQ ID NO: 5633 - DNA, 398 bp, Chlorella sorokiniana
  Clone ID: LIB3602-080-Q6-K6-F4
gtttgtggtgccctcctaccgtggtgccaccttcctggaccccaaggtcgtggcgctgcgactggctatgacactgctgtggccctgcccgccgctggcgacgatgaggagtacctgaaggagaacatcaagtcggccggcgcaatgaagggccaggcagtgttctccattgccaaggtggatgctgccaccggcgagattgctggcgtgtttgagtctgtgcagccttccgacactgacctgggagccaaggcccccaaggacgtcaagatcactggcctctggtatgctcagctttcgtaagcgctgccagcgcccgtcgtttggagaagagaattacagctttgtcgctcgacctgtttgtcagacgtagaactgctcatgtaacataagcgcgc

SEQ ID NO: 5634 - DNA, 581 bp, Chlorella sorokiniana
  unsure (1)..(581): unsure at all n locations; Clone ID: LIB3602-080-Q6-K6-F5
cgctgngggtgctgcgcgccacaggggtccatcctcaccgtcatcgaggtgttcatccacgaccccctgtacaagtgggccctcaccaccaccgccgccaaccggcgccagcacgacggcggcgcagccgatgaggtggacgacggcagcggcgagacgggcggcgcaggcgcagcgggggcgggcgcgggcgtcaacttggccaacgccgatgcggagcgcacgctgctgcgcatcaagcagaagctggagggggtggaggcgggcgagggcgaggcgcgcggcgtggagggccaggtgcagcagctgctgcaggacgcgcagaaccccgactccctctgccgcatgtacatcgggtggcaaccctgggtgtaaaagtgcttcctacagagcgagcagacgcattccgagttatctcttgttcctttcagcgttaggttttgctttgttctgccgttccgctgcttcatgtcctctgtcttgcctgctagctcttgctcctgcacatactgtcaataaatgcagcccatctgcaactgccgcatggtgtgccaaatttcctgaacacgttatttcgtaaa

SEQ ID NO: 5635 - DNA, 368 bp, Chlorella sorokiniana
  unsure (1)..(368): unsure at all n locations; Clone ID: LIB3602-080-Q6-K6-F6
ggtggncttccccggccagccgcggcgcgtgatcagcttcaagcggctggcactcaccgacttcacggtggacatcccccgcctcgccaagaagcggtgctgaagaagcgctggaggaggcggaggttgaggccaagttcgccaagagcgcgtggggccagaagctggccaagcgcgcggccaaggcggcgacgaccgactttgaccgctacaaggcggcggtgcagaagatgaagcgcagcgcgcaggtgcgccgcgccttcaattcgctgaagaaggccgccaagtgagcggagctcctcgcagccgcagcagccgcccaattcattgcgcccggctcgccccctggtgtaatgtagcacgcanaa

SEQ ID NO: 5636 - DNA, 433 bp, Chlorella sorokiniana
  Clone ID: LIB3602-080-Q6-K6-F7
gccgctgccacacccagcttttccagcagagccacagagcacagcccgcagcggcgggggatgcatgcatgctgcatcgctcgccatatgcagcaacagaccagttttgcagccagagtttgattcgatcgccttgcaaggccccagcgatttccgtttccactgcccatatatgggcgtatatactatccatccctctcagcccagatcttgaacaggcgcactaggcagccgcccttttcctcgagcccgatccgctacttatgtcttaccatccgagacgaaccagaaaccgcatccgctctcaagcccacaccgccttccgcagtgccacccacacccgctgcgcccagctgcaaacatgctggcccttttcctctcacgcgtctcgtcatgtgtacattactgcatccccatgcaaacaccaccacgc

SEQ ID NO: 5637 - DNA, 344 bp, Chlorella sorokiniana
  Clone ID: LIB3602-080-Q6-K6-F8
caaacgccgtccgccgctgcaccacctgccgccccctcacccgcacccatcttccacccgccacctttcctgccgctcaccgtcgcacatcctaccttccacaccttactccatgtccacccttcacccgcgcttaacacagcggctgctgccatgcaaagctgctgccaaacccatccatcatgctcgcacacccactcacccacacgatccaacgtatcccagcacccattttcaaggcccgactgtacagtgcctttttgcgtccttatgccgatctggttccagcacttaatgtgtaacaaatggtatgtgataaaaaaaaaaagaacaggtactagact

SEQ ID NO: 5638 - DNA, 579 bp, Chlorella sorokiniana
  Clone ID: LIB3602-080-Q6-K6-G1
ccacgcgtccgtaaaaaaaaaaaaaaaaaaaaaaaaaaaaaaaaaaaaaaagaaaaaaaaaaaaaaaaaaaaaaaaaaaaaaaaaaaaaaaaaaaaaaaaaaaataaaaaaaaaaaaaaaaaaaaaaaggggcggcgttcttagggggtccatgtttacgcccccttccatacaaccagatgccctttttataggggaggcgggtgccatttactgggcctgccttgctcccccccccaaccgtggaaatacgccgtgttgccccacttaactccgttggcccctctttcccttttctttggtggggtgtttctcactcgggccctatcgtatccccttcacgaacgttggtttttccccttggcccattggtcccctctttgtcctggtgcctccctcacccaccttttggcggacaccccccttgcttcccgttcccttggccgggcccttagcgcccgtttttttggtttttttcccttcttttttaccaaatttggggggttcccccttgaggtcccaaatttgcgggccccttttggggtccccattttttttttttaggggcccttaacccca

SEQ ID NO: 5639 - DNA, 104 bp, Chlorella sorokiniana
  unsure (1)..(104): unsure at all n locations; Clone ID: LIB3602-080-Q6-K6-G11
ccctgctattctgcctgctgngnacattgcaagaggcctggagttcctgcactcctgctccatcattcatnnggcgacctgaagccgcagnaacgtgccctgct

SEQ ID NO: 5640 - DNA, 170 bp, Chlorella sorokiniana
  unsure (1)..(170): unsure at all n locations; Clone ID: LIB3602-080-Q6-K6-G12
ccgggtncgaaccccagcgtccgntatcgaccagcgcccagcatgagccttgcgcgctcaactgccctcctgctgttggcaggcgccctgctgttggccgccgcgcgcccagcagnaggccaacatttggnnagcgacattggaaaacgctttcggcgaacgcctgggca

SEQ ID NO: 5641 - DNA, 463 bp, Chlorella sorokiniana
  unsure (1)..(463): unsure at all n locations; Clone ID: LIB3602-080-Q6-K6-G4
tgnacaaccaccctgctgcaagccagccctctggcagactgcgccagcagcagcctagccgccttcgggtgttcagccgacggtgggggtcgagcgccggcacgtgccggccgccttgcctctttgaaacttgaatccttgccgcgcagcatcacactgtttctacctgcttcctctctgcattttatgtgccgcaacactccgctggccttttcttttgatccttgatctttccgtgctgcgcccaccgaggcgcccgccgcccgtccccgcccgacccatcccgggccttccccgcccgctttgcggcctgcccagcgcggcccgcattgcatgtaacgctgttgcgtgcaaaaaaaaaaaaaaaaaaaaaaaaaaaaaaaaaaaaaaaaaaaaaaaaaaaaaaaaaaaaaaaaaaaaaaaaaaaaaaaaaaaaaaaaaaaaaagggcggcgggttttaaa

SEQ ID NO: 5642 - DNA, 200 bp, Chlorella sorokiniana
  Clone ID: LIB3602-080-Q6-K6-G5
cccacgcgttccgtaaaaaaaaaaaaaaaaaaaaaaaaaaaaaaaaaaaaaaaaaaaaaaaaaaaaaaaaaaaaaaaaaaaaaaaaaaaaaaaaaaaaaaaaaaaaaaaaaaaaaaaaaaaaaagggggggccggttttaggggttcccaattttacgtccccggtgcttgcggacgtattagctttttttttggggccc

SEQ ID NO: 5643 - DNA, 398 bp, Chlorella sorokiniana
  unsure (1)..(398): unsure at all n locations; Clone ID: LIB3602-080-Q6-K6-G6
ggccccgncaccgcgcagtgggagggagtgggtgactacgtgcagctcatgagggactgctgggctcagcagccggaggagcgtcccaacttcaacgagatagtggcgcggctaggcggcctgctgtcccacgcaggtaccaatgtggacccgcccgtttgaaacgtctcgctggccggcacacctgtactagccgctgcaatacatatcctggcaatgcgccacagctgtctgaattgcaacccacagggtatacctctcctgcccccattccactgttctcctgccaaaaaaaaagtgccgctcggtcttgcttgaacgacactgggtgattattgaactattgaagtcctttgcagccttgttgtcgtgacaggtcaactgtaatgcgatggatt

SEQ ID NO: 5644 - DNA, 588 bp, Chlorella sorokiniana
  Clone ID: LIB3602-080-Q6-K6-G8
gcgtggtggaggagcgtcggcaatgcaaagggctgctgggcggcgtcaaggtcaagaacgtcaagaccggcgagatcacggatctgccgctggcgggcctgttcttcgcaatcggccacgagcccgccaccgcgttccttggcggccaggtggagcttgacgaggacaagtacattgtcaccgcggccgactccaccgcgaccagcgtgccgggcgtgtttgcagcgggcgatgtgcaggacaagaagtaccggcaggccatcaccgcggcaggctcgggctgcatggctgcgcttgaggtcgagcacttccttgaggcacagggcgaggcctgacaggcagctggcagggcagctgagctggcgacggttgcagtggcaagtgctgcgcatcctgctggggcgctgggatgcgctcggcagcagcagcagcagcacgcccggctgtagcagccctctcatatgcctgctctttttccagagcggtctatctacctttcatctttcttcccccttggctgtgctatcctctcgccgctgggtctccctgctatccttccagagtcgcacaaatgaaacaacaacaggc

SEQ ID NO: 5645 - DNA, 210 bp, Chlorella sorokiniana
  unsure (1)..(210): unsure at all n locations; Clone ID: LIB3602-080-Q6-K6-G9
ngaaagaanaactgtggtggtcaagtcggcatcaaccaatcacgcagctggtggagagcggcaggcgcagtgcgtggtgattgcgcacgacgtggcccccattgagattgtggtgtggctgcccgcgctgtgcaagaagagggcgtgccctactgcatcttcaagggcatggttgcgtctgggcaccgtggtgctcagtatgaggtcacc

SEQ ID NO: 5646 - DNA, 599 bp, Chlorella sorokiniana
  Clone ID: LIB3602-080-Q6-K6-H1
gttgtctgcttgcagcccgtcgctcccctgccaagcccctgccagcggagcctgggccggccccccgcctctccagccctgcgcgccgtgcagcagcttacccggcagcatggcgctcgtccagttcatccgtgacaagatccaggcgaacatggaggacccggctgagcgggaccgcaagtgggagcagcacctgcggggcgtgcaggcagcggcggccagcgccaaggccaacatggcgcaccccaccaagaactggggcttctggcggcacgagaagcacctggccaagtacgagcagaacgcagaccccgcggttgcgaagctgcctggccggcgggcgcccaacctctcgtcggaatgaggctgtaccctttgaggcgctgctctctggcctgaataggaagtgctagcctggcaacgcgctttctggcaggcccggccccttgttccatcctgcttgcctgctgtttccactcctgctccctggccgccgctgagcggcggcgttctcctgctcccacctgccgctcccagttcctttttgttgtaccatcacactgccctttgacacaagcttgcagggcacctggcactgt

SEQ ID NO: 5647 - DNA, 119 bp, Chlorella sorokiniana
  Clone ID: LIB3602-080-Q6-K6-H10
ttccgcgatagcggcgctgtgtgtgccttcaagccactcacccacaccaccaagccacatcacccaaccctcatcgcaccatcccttatacccacccacacagctgcatgcgccacact

SEQ ID NO: 5648 - DNA, 133 bp, Chlorella sorokiniana
  unsure (1)..(133): unsure at all n locations; Clone ID: LIB3602-080-Q6-K6-H12
gccgcccttttttttttttttcgtcncacgttttcgtcggaccggccggctctgagaggaccaaattttttttttttccgagtgcgggtaacacgccttgctaaaggcccccgccgggggggtcgcccccccg

SEQ ID NO: 5649 - DNA, 425 bp, Chlorella sorokiniana
  unsure (1)..(425): unsure at all n locations; Clone ID: LIB3602-080-Q6-K6-H3
tcggccgggcaccggcttgcacctggcactcggtcgtcgcctttgctgacagagctgcggcggcgcngaatggagcgggcgtgcagctgaccctgcgcgcccacacctgcttgcaccgttgcccgcctgccggcgagccgcgcctcgtcacccctggctgtgttgtgttgttgcctgcctggcctccgccggggaggcacctgtnacaggcctgcctgttgtgtgtgttttgttcctctttttttcttgtttttcttttttggggtggccgttctggtggttcctttctttctttcgcgtgcttgcgtggtggttgctcttcctttttgtcccctttctcccctcctctggccgtcttttctctccgttttgcctgggttatccttggtgtttcccttttttttcgccttgttgtgcccccccct

SEQ ID NO: 5650 - DNA, 609 bp, Chlorella sorokiniana
  Clone ID: LIB3602-080-Q6-K6-H4
gccactgccgccagcccatctgcaccgccaatcggctctgcagctgcgagctttggcacgaaagcctcggaacccacacctcgcagcaaaatgggcattgacgatgccatgcggcggctgagcggccggccctacagcggggagactgagcccaagtcggcccggacgccccaggccacgtggagggacacagacccaggctacaaccccaacatggccaagacggggcgcagctactacgacacggtcgagaacaagaaggcttagaccggcatctgggactaccacctgcagtctgagaaggctgagcgggaggcgagccacgacgtggcgcgcgccgccttcaagtccatgggcgcctccaccactccccaaggcgatgtgctggatgcctctgccctgcgcaagatgtttgcctcggaccgcgtggaccagctgatggccatggccgacaagaacaaggacggcaagatcgacttcaaggagttctgcgacctgatccgcaagtacccctgcgactgagcgatacataaggcagatgcacggaccaatccctgcaataaatgcaccgattcacaccgggccacggacgcggcgctgattgacgcg

SEQ ID NO: 5651 - DNA, 469 bp, Chlorella sorokiniana
  Clone ID: LIB3602-080-Q6-K6-H5
caacgagcagcctgccaacccccctactcctgctgacggcggcgacgacaacaccggcggcgatggcgctgagcagcctgctgatccccccactcccgccgacggtggtgacgacaccccggccgatgacaccccggccgatgacaccccggcggacgacaccccggccgacgacaccccggccgacgacaccccggccgacgacaccccggccgacgacaccccggccgacgacaccctggccgacgacaccccggccgacgacaccccggccgacgacaccccggccgatgatactccggccgacgacaccccggccgacgacaccccggccgacgacacctccgcggacgacacctcggcggacgacaccccggcggacgacaccccggctgacgacaccctggcctgagacaccccggctgatgaccatttgctgttgagagcctgtccaacaacacctaaacag

SEQ ID NO: 5652 - DNA, 580 bp, Chlorella sorokiniana
  unsure (1)..(580): unsure at all n locations; Clone ID: LIB3602-080-Q6-K6-H6
cccttctccaacccccccntcctacctgagggtgagttccccggtgactacggctgggacaccgcgggtctgtccgccgaccccgagaccttcgcccgctaccgcgagctggaggtgatccacgcccgctgggccatgctcggcgccctgggctgcgtgacccccgagctgctgcagcgcaacggcgtcgccaacttcggcgaggctgtgtggttcaaggctggcgcccagatcttccaggagggcggccttgactacctgggcaacccctccctgatccacgctcagtccatcgtggccatcctgctgacccagctggtgctcatgggcctgattgagggctaccgcgtcaacggcggcccggccggcgagggcctggatgccctgtaccccggtgaggccttcgaccccctgggcctggctgacgaccccgacaccttcgctgagctgaaggttaaggagctgaagaacggccgcctggccatggtgtccatgctcggcttcggcgtgcagggcctgatcacccgcaagggccccattgagaacctggctgaccacctggcggcccccgacgccacca

SEQ ID NO: 5653 - DNA, 325 bp, Chlorella sorokiniana
  Clone ID: LIB3602-080-Q6-K6-H7
ggccagcagtggcggcggcagccacctccaggcttcagcaggccatggagcaccctcttccaccccattcgccctgtttgctgctggcctcgtgctggctgctgtgctcctgcagctcgccacgcactgagccgcacctctctgtccgtgctactgacccttctatctgcgaaccctctgtgcgccccctttggcattgcagcctgactgccgaatctctgccctgttgcatccgttgtctgcacccttgattcgtccgcagttgcgaccgccgcgttcatattgcagggcgataccgccccccaggcctgtagaactacctaac

SEQ ID NO: 5654 - DNA, 298 bp, Chlorella sorokiniana
  unsure (1)..(298): unsure at all n locations; Clone ID: LIB3602-080-Q6-K6-H8
anagcggctacagcagcagcggcagcggcagcagcagcagcaaagcatcagacagcggcagtggtagtgaggacgaagatgcagccgagcctgattttttcagtgctgctgcaataggcggcgagccggcgcagcagcggctgtggcggctgcagcggccagacggcagcagcagcacggtcagcagcctggagctccaggattttgagatagacacaactgcctgggcatatgcccgctggctgtttggccgggtgtaggctgtggtgctgcggctgtgtgttaagcatgcatcaac

SEQ ID NO: 5655 - DNA, 585 bp, Chlorella sorokiniana
  unsure (1)..(585): unsure at all n locations; Clone ID: LIB3602-080-Q6-K6-H9
cgtccgtcaccggcctgctgcntggcgcgccgcgtgctgngccaagctggngcctggacaagcactacgagggcaacaccgaggatgtgggtgaggactacaacgtggaggcggccgacgacgccccccgccccttccagtgcatcctggacgcgggcctgaagcgcacctccaccggctccaaggtgtttgccgcgctcaagggcgcgctggacggcggcctggacatcccccacaatgagaagcgctttgtgggctacgaccccgacgccaaggagttcgacgccgagatcctgcgcaagtacatctacggcggccacgtgggcgagtacatggaggagatgattgaggaggaccccgagaagtaccaggcccactttgccgagtacctgaagaacggcgtggagcccgacgagctggaggacctgtacaccaaggtgcacgaggcgatccgcgccgacccctccgccaagcccaaggcccgcatcaagcccgccgaggccaagcggtggaaggaggtcaagctgacctacgagcagcgcaaggacaagctcaaggccaagctggccgagctggcggccgacg

SEQ ID NO: 5656 - DNA, 596 bp, Chlorella sorokiniana
  unsure (1)..(596): unsure at all n locations; Clone ID: LIB3602-081-Q6-K6-A1
ccanaagccattggcacgggcacctgcnctgacgacaaggcggtcgcagacggcacctttgatttggacaagtgcccctccctgctgggcatgctggaggcgattaacagcggcgccaccgactaccccgtggagtgcgagcccgagtgcatggagaccttctacgcgctgtcccccgagtgccgcgagcccctgatccaggagttcaacgccgacccctcccccatcggcgtgctgggctccctcttcctggccgactgcgcggctgtgaaggagggcggctttgcgcccgcccccgcccccgccgccgccaacgacaccgacatggacatggccatgtgagcctccagtggccagcgctgcagccccgggtgctgcaaccccggtgctgctgcagccgcccgtgcggcggcaggccagttggctcgccgatgtggcttcattcagcggcctgttgcagccgccagcccattgatgccagctgccaaggcagggctgctgcctggcttgaagcgaggcctgggcacggccttctcttgcctgcttgaggccctgaacaccccaaccagattgtcacctgtggtgcacgtcaaaac

SEQ ID NO: 5657 - DNA, 65 bp, Chlorella sorokiniana
  unsure (1)..(65): unsure at all n locations; Clone ID: LIB3602-081-Q6-K6-A12
ggccctatccccctgtcgaccccgcgtccggtnagaaaaaatgaaaaaaaaaaaanttccggcgg

SEQ ID NO: 5658 - DNA, 430 bp, Chlorella sorokiniana
  Clone ID: LIB3602-081-Q6-K6-A2
tcgttcgtggtccgtgggcaacgccgcgcccgtgggccgcatcaacaaaatcctgtcttctgtgcggcattgaggctgaggccgagcgcgtgcagaagctgctggccgagctggtgggcaaggacatcaacgaggtgattgccggcggtaccgccaagctggcgttcgtgccctctggtggcgccggggccgcgttcgctgctctctccgccggtggcgccgctgccgccgccgaggagaagaaggaggagaaggttgaggaggaggaggacgaggacatgggcttctccctgttcgactgagcgcacacggcggttccgggcggcggctgtgcgtccgcgggctgggggcgccttggcttctttcttggggcccctcgtttcacttgactggccggtgtttttacacctgtggtgttttgggaaacccc

SEQ ID NO: 5659 - DNA, 547 bp, Chlorella sorokiniana
  unsure (1)..(547): unsure at all n locations; Clone ID: LIB3602-081-Q6-K6-A3
catcccccccccttctctcatncccctcatctccttacccctccctcccccacttcattaattttcaagccttccnacttacactcttcatacacacccactcttctcccaccactcttcnttctttctntatttcccccatcatacatcccatctcttcnttacttcatcatctcttctttccttaccttctccctcctcttttctttttttcttcctctcccttttccccctcttcnccttttncctcntcttccacctttttcttctctnttctcctttttttctctttttcttctttctcttcttctttcttctttctttccttttttccttctttttttccttctcttcttctctctttttttcttcttttctttctcccctcctttttctctcttcctctttttttttctttttcttntctttttttttttttttcttttcttcttttccttttttttttttttttctcttttcctttttttttctttttttttttttttctttttcttttttttttcttttttcatttttttttttttct

SEQ ID NO: 5660 - DNA, 559 bp, Chlorella sorokiniana
  unsure (1)..(559): unsure at all n locations; Clone ID: LIB3602-081-Q6-K6-A4
tagggcttgggccanaggtgctcaanacccanacctgccgcttcagcggcctcaggatctaccctggcaagggtgtgctgttcatccgcgtggatggccagcaattcctgttcctgaagcagaagtgccgctcgctgttcaaccagcgcaagcggcccgccaagcttgcctggaccaccctgtaccgcaagcagcaccgcaaggacctggaggcgcaggttgcccgcaagaagcggcgcaacgtgaacaaggcggccacccgctccgtggcgggcgccagcctggaggtgatccagaagaagaagagcgagaagcccgaggcgcgcaaggcctcccgcgaggcggcgctgcgtgagatcaaggagcgcgccaagaaggccaaggccgacaaggcggtgcagaaggcgcaggccaaggcctcgggcgccggcaaggctgtcaagaacatgcctaagggcgcgggcaagggcggcgccaagagcaccggccgctaagccagcggcaatgcagcgggcgtagcggcctgctgggccgctgccgttgtaacgcacttcctcgg

SEQ ID NO: 5661 - DNA, 550 bp, Chlorella sorokiniana
  Clone ID: LIB3602-081-Q6-K6-A5
gcgtgacgagcacggcagacacctcaggggcttattggctggctgctctgcgagcccaaccctatcccgctgaacaccgccctggccatgtgtgggcttgttcgcccgattttccggctgccctacgctcctgtgtcgagtgagcagtgcgagcatggtgccaagctgctgcgggcagtgcaccaccacatttccaggcctgcataggcaagtgcctgcgtcatggatgacgaggagttcatcctgatccactctgctggctattgaccgtgtgaccctgtttgacacagaaggggaggttgaaagtccaccgccgctgctgctagcactgtcacgctttgccacagtaatgtacagctcataagtgccacatgtaacctctggaaggccaagcctacaacgcggcgcatcccattctttaggcctgtggcacggccggcgcaccaacagcaacaggctggccggcttctagggacacaagtttcagtacccgtacatgcaacatcatacgcctgttatagttgcacctaatttcaatccacggggcgag

SEQ ID NO: 5662 - DNA, 242 bp, Chlorella sorokiniana
  unsure (1)..(242): unsure at all n locations; Clone ID: LIB3602-081-Q6-K6-A7
tcncggcattgagccaacagcccactgcgtgtccgcagtgcgcgcgtgtgcagctgatcaagaacggcaagaagatgcggcgttcgtgcccaacgacggctgcctcaacttcatcgaggagaacgacgaggtgctcatcgccggtttcggccgccgcggccacgccgtgggtgggggggggggcntgcgctttaaggtggcgaaggtgtccggtgtggccctggtggcgctctttcgcggcg

SEQ ID NO: 5663 - DNA, 503 bp, Chlorella sorokiniana
  Clone ID: LIB3602-081-Q6-K6-A8
tcccgggttcgtaccccgtcgtctcgtttatataaaaaaaaaaaaaaaaaaaaggaaaaaaaaaaaaaaaaaaaaaaaaaaaaaaaaaaaaaaaaaaaaaaaaaaaaaaaaaaaaaaaaaaaaaaaaaaataaaaagggttgtctgttttaaaagatacaaaattgtgggggggcgtggcttgtcctggttttcccttttttttatccctgtccccggggggggggtcctttgtttttccgtttaccaacttggtaaatggcggggccccttcgcctttccccacttttgggggccttgccccctttcccccctttttgccgtttggggttaaaggcccctttgcccctgcccccgttggccttttcaaacatctggccccggcctgtttgggcccttggcccgcccccttgtatttgggcttttgagcggggccggtttggggtttcccccccctgtccctgttgcttttgccggccccctggcccccgcccttttcctttt

SEQ ID NO: 5664 - DNA, 518 bp, Chlorella sorokiniana
  Clone ID: LIB3602-081-Q6-K6-A9
ggtcgacccagcgttcgcgcagaggtacatacgcatgcatcatttgcagactggcggcctgcactcatccaacctttagctccctgtctgggcgtaccggctacaacgtgatcacctggcactatgggagactcattaacggtgatagctcaaggcgcccatagccacctgattgggaccaagcttgcgcccctggcgggcgtggacggtgaggggatagcgaacgagcacggccaccaggggtctgctcgtccggtcgagaagggcgcccacacgctgatgaaagacgacgctcggaagattgggccgggctacatgaaggctccctaggctatccacacaccacctggctgaagacgccaatggcgaccatgcgcccgcctaccaattaagccccgactctctggctggaaactcttaacctgaactgctgcctttctacatcaatggcggtcagcttacttgcaaaaaccgaactctcaactctgatttctttgcatggctgttgcagggaggcc

SEQ ID NO: 5665 - DNA, 502 bp, Chlorella sorokiniana
  unsure (1)..(502): unsure at all n locations; Clone ID: LIB3602-081-Q6-K6-B1
gcgttcgcggncgcgtggggnagcagaacacgaacgtcaaggtgatcatggcgaccaaccgcgctgatacgttggaccccgccctcctgcgccccggtcgactggaccgcaagattgagttcccgctgcccgaccgccgccagaagcggctggtgttccaggcctgcacctccgcgatgaacctgagcgaggaggtggacctggaggactatgtggcccgccccgacaagatcaacaacgcggaaatcgcgtccatctgccaggaggcgggcatgctggcggtgcgcaagaaccgctacgtcattctgcccaaggactttgagaaggcgtacaagaacgtggtccgcaagcagtcggacagctttgagttctacaagtgagagcgggcggctgtgcgccggcgcagggcaaaggaggaaaaaatcggcgtgcggcggtatcctccgcctgtgcacttgcacccctgctggcccttgcacccacctgccatgcatgcctgcac

SEQ ID NO: 5666 - DNA, 66 bp, Chlorella sorokiniana
  unsure (1)..(66): unsure at all n locations; Clone ID: LIB3602-081-Q6-K6-B12
tgcgcacgtggcgtttgcgtacccgcacgcccanagtgaaggtgttccgccacttcagcctgcgcg

SEQ ID NO: 5667 - DNA, 359 bp, Chlorella sorokiniana
  unsure (1)..(359): unsure at all n locations; Clone ID: LIB3602-081-Q6-K6-B2
gcgttctggcctctccacctcgcgcctcgactgtacgagctggcggcgctggcggcgcggctccccaacgagacggctgaggagtacaacatgcgcctggacaagtcgcggccagagatcaaccgccgcctgctcacgctggtgcacgcctgcttccaggcggcgctggccatgggcctgctggagctgcgcccctggagcccgcgcaccgtgggcgccatcggcaccgtcaccagcctcatgaactgctacatgctgtaccccgcggtccccggcgcctggaagctgctcagcggctggnggcgtcacgcagcnctngcagcgccccaagcccctgcccttgtaaagtctttgcgtaa

SEQ ID NO: 5668 - DNA, 115 bp, Chlorella sorokiniana
  Clone ID: LIB3602-081-Q6-K6-B4
gactagttctatatcgcgagacgggcgcccttttttttttttttttttttttcttttccatcgtacttttttggtcttacggggggcctggtcacatccacacaaaaattttttt

SEQ ID NO: 5669 - DNA, 397 bp, Chlorella sorokiniana
  unsure (1)..(397): unsure at all n locations; Clone ID: LIB3602-081-Q6-K6-B5
tttgtcccagcgttcggtaaccgctgaaacccacggtttgggtttgatgccgccagcctgcacagggctttgaggcagcgcaactgaccgaccaaagcggcgcaatcaaggtcatgtttgacatggctccaacagcagctgagactcagctttgaacagctttgactggaccgcatggtgtgcctgaatgggtgcacctgtgcaagctggcggtgctcttgtgctagctggcgggggtggcagttgcccggcgcagtgctgcagacagccaacctttcagctgagggctggtgccatgcatgtgcacgcttcgtggcaatgcgttcttacatttcaaagattgcttggggcagctggcgtttgggaggggattcaagcgtgtgtaacttgcacangc

SEQ ID NO: 5670 - DNA, 508 bp, Chlorella sorokiniana
  Clone ID: LIB3602-081-Q6-K6-B7
cgttcccttagggcacgcacaccacgtttattcccacctgttggctttcatcatcacatatgcgggctgtgtctcccgctccaacggtaacctagcacttactgtgatgcctgcttgctagagctgcacagcaggcgttgccctgcacttgccccttctgttttacagcagcgtgtgggcaacaaacgctcgccgctgcctgtgtttgctggtagtaccccctgcctgctgttgcgccatcccatcccatccttttcatgcaatcgccaaatacccttagcgctgccttacctcctgcactgctcccaccctgtaaataagagtgctgcgctaaaaaacacttgaaacatggggactctttgcttgcctgttttggggcctcatcggcgtgaacgcccgccgccagggctacttcaactgagcgctgccccatttggctcccagctcggattcattgctcaaacttgccgtgtgcacgccatgtgcaatgttgaaactctctacgcat

SEQ ID NO: 5671 - DNA, 456 bp, Chlorella sorokiniana
  Clone ID: LIB3602-081-Q6-K6-B8
gcgttcggtctcggcacgctgctgctccgtgttggcttccgccgccgcccgtcatcgccgccgctgtgcgctcccgagtccctggcgcttgctgtctggcgctttttgcggctgggtgtttgcgtcgtcgcgagcccaagtcccccgcccccgagcaagccgccgcgtgctgccctggtcttggccccttggtcttggctccccaccgcgtaccggcgccagctgccagctcccgcggcgctcctgcagctgctgaactatttggtccctgcttgcgctctgctcccctgactctcacgctccactatcctgttgggtctgtctgcggtctgccgtcccccgtgcgccaaacgggccacgccgggctacgcacccaggtaccctgttgggctctgcttgcatgcatgcactgcctgcgcctgcgcgccagtgctgcccctgtaagcacccctcccc

SEQ ID NO: 5672 - DNA, 589 bp, Chlorella sorokiniana
  unsure (1)..(589): unsure at all n locations; Clone ID: LIB3602-081-Q6-K6-B9
cacgcgtccgnactgcacgaacganaacactggtgcaccccgccccggctgctgtgccttgcaggcgctgaaggagcagttttgatgattgatacaacggcgaaccgggcctgcaatcgcagcatcctgaattcatacgccctacctccagcacaagcagtattacaacgacgtcaagaagttcctgcagtacgccatgaccaagccgggcgtgtgggccgtctcaatgtcccagctgctcgattggatggaaaaccccgcaccggcagcggcgatgcccgccttcatggccaagtacaagtgcgtgctgtgaggcagcaccgggtggcacctgccttggacaattgcagccccacctgaacttggggcaacaagaggtgccccttaccgggcggcaccccatgccgagccacttgctcagcccaagaaccttgcttgcttgagtaccgccctccaataatgccttgcaatgcgtgaggccaagctacatgtcctctgattcgtgctaaccaccaagattgcttattcttcgaccccatcaatcgctgctcctgctctaaaagcgcaacatctcacatgggcatgcaca

SEQ ID NO: 5673 - DNA, 471 bp, Chlorella sorokiniana
  unsure (1)..(471): unsure at all n locations; Clone ID: LIB3602-081-Q6-K6-C1
aaaaaaaaaaaaaaaaaaaaaaaaaaaaaaaaaaaaaaaaaaaaaaaaaaaaaaaaaaaaaaaaaaaaaaaaaaaaaaaaaaaaaaaaaaaaaaaaaaaaaaaaaaaaaaaaaaaaaaaaaaaaaaaaaaaaaaaaaaaaaaaaaaaaaaaaaaaaaaaaaaaaaaaaaaaaaaaaaaaaaaaaaaaggggggggggaaaaaaatttttaaaaaataaaaaanttgtggggattagagggaataaantttttttttttatttttgttttttaaaatttgttttaatagggggggggggnnntaaagagggggtttaaaaaaattgggtgtggnatttttaaatatggggggagattatgtttttgtngtattttgggggttgttttttggaggtttattanatttttttttttttnttttttnngggtttttttttttggntttttttaaannttttttttangttttttt

SEQ ID NO: 5674 - DNA, 161 bp, Chlorella sorokiniana
  unsure (1)..(161): unsure at all n locations; Clone ID: LIB3602-081-Q6-K6-C2
aaaaaanaaaaaaaaaaaaaaaaaaaaaaaaaaaaaaaaaaaaaaaacncaaacacaaaaaaaaaaacaacgcaaaaaaaaaaaaaaaaaaaaaaaaaaaaaaaaaaaaaaaaaaaaaaaaaaaaaaagcaaaaaaaccaaaaaaaaaaaagaacggacac

SEQ ID NO: 5675 - DNA, 313 bp, Chlorella sorokiniana
  Clone ID: LIB3602-081-Q6-K6-C3
ccgggtcgaccccgcgttcggtcacaacgcctgtcagctggcgcatgggtggaaatcggaagcggctatttcctgtacgacataatcatctgcctgctcaagttcagcgacaacggcttcgaattcatgctgcacgccgtcgtctgctgctccgtcttcctcaccgccaccgccaagggtgtgatgcactactacggggccggcttcctgatgtgggagctgtccaccccgctgatgtatgtccggtggctgatgctcaaggccggcctgggcaaatccgttttgatgccgtttgttaatttcgcctttatgc

SEQ ID NO: 5676 - DNA, 453 bp, Chlorella sorokiniana
  Clone ID: LIB3602-081-Q6-K6-C4
tccgggcgggtctgaatcacgaaatccaacaacttaccactaatggacacgatacacgattaaagttcaaaaaaaggcattcctagaggaaactgagcggataggcggtagaagctatctgatgaggcgcattgttggacccccagagcacaccccgccagcccgcagctccccactcgccgcccgttgagcggtggcggcttgtaaacccagcccagttccgtggctggctgtcctattctttgattgcagctaaaccttcccttgtgggctgctcgcggccggggcggcagacagcgctttcccgccccctgctgcgctgcacccggccaatcttatcatcccttaccgaaaaagaatcgctcaatattctaatgacactcctccccctgtgtaagcacttaaatatcaaggggaattagggataacacaaaaaaaaaagggtctgccctt

SEQ ID NO: 5677 - DNA, 430 bp, Chlorella sorokiniana
  unsure (1)..(430): unsure at all n locations; Clone ID: LIB3602-081-Q6-K6-C6
gctgaggtcaggngnacaagacggccgcctggccatgcttgccttcatcggcttcaccatggctgcccaggtgacgggcaagaacccgctggcggcgctgcgcgagcacctggacaaccccctgggcaccaccatcttctccaaggccgtggtcgtgcccggccaggcggtcgtgcccccctgcgccatccccgacaccatcgagttcaacggcatcactatcccggctggctgcttcctgcactccctctggccttgagcatcacataaggccagagctgtaactcttggtggcggcgtggcgccggccagctgagcggcactcactagcgtcggcggctggggctgcgccacgcggccattttactcnccaccgagatgagaacttatccctttccttgctgctctctactggaatgcttcgcccgtc

SEQ ID NO: 5678 - DNA, 582 bp, Chlorella sorokiniana
  Clone ID: LIB3602-081-Q6-K6-C7
gtctcttcgtctgtcacaatgctgccagcacgctggtatacctcaagctcttaggcgcaatgatgcacatccggaaattcgactgggtgtgggcggtgcgcattagaagtttactggcgcactggagtttggttgcatgttaatttacggactgacaaggggagtttctgactgatgcagtgcggctgggtggctctccaccgcatgggggcacatgcaagccggcctgtttgctgccagttccacctacgctgagcaggcggatgcaaccaacctgcgcaggtggatttagacacaattgtcatgaaccacagcatcccgctggagacattcttagatcctcgctatgacctggtgatatctagagattgcaacggcatcaactgtgggaccatgttcatccgcaactccacctggtcccttatgctgatggcggagatgtacatgcataatggcgacggcctgcgggatgggccagggcaatggccaaaatggtggatatatcgtgagcaagcggtgctgtggaaacttctagaggacgaccgcgttcgcaaccacgtaaaagttgtccctcagcggctg

SEQ ID NO: 5679 - DNA, 543 bp, Chlorella sorokiniana
  Clone ID: LIB3602-081-Q6-K6-C9
ccacacctggccgtgcaccgcgccagcacttctctcgccgccaagcaggccttgacgtgtccacagcggcacgtgctctgtggtgggcggcctacccccgcgtgaccatcctgccgctctatcccagcacgggcccaacgctgccaacacagcctcgtagccacgccgacatcgatgccctgaccaagcgcacccaagacctcgggccccaggtggcgcacgccaaggccggtaaggactccgccaccctgtccatggtgtacaccgccgcgctgttcgcggacgcttgactctgcggcctgaacggcgacccctatgtatacgcgtgatcccccgcgccctccagcacccccgcggcgccctacttctttaccaacgttaagctgagccagaacggcctggatctgatctacttcctgagccgatttgatcgactctccaactgctggcctccacgctatgacgtcccgatctgatgctgtgcattgataacgcattctctctacgcccaggcccagctcctgcccatgttgtctaagcccg

SEQ ID NO: 5680 - DNA, 393 bp, Chlorella sorokiniana
  Clone ID: LIB3602-081-Q6-K6-D1
cccggccctaggcgcgccagctgtcgcgcccaaacctcgtgtacctgtgtgcgcactgccagtgagcgcagctgccctttttctcccccttccctgtgtgagacgcccgcttttgcccactccaccactcacccgccgctggcggtttctctctcaagcccctgccaccttaccactcgccatgccatgccgacggcacccccgccctcggcccaccactgcccctgcaacccaatccccaacaaaccgaaaccaactgcgctttcattgtggccgcctcagtcaagcgggcccctttcgttcgccgcttgggcaccattttcaacaaaaggtttcccaaacacttgcaccctgctattcccaggctgagattgcatactcctgcagtgtatc

SEQ ID NO: 5681 - DNA, 136 bp, Chlorella sorokiniana
  unsure (1)..(136): unsure at all n locations; Clone ID: LIB3602-081-Q6-K6-D10
cgnagttgctngaccctgnagagttgttggctgcgcttgcatttcagcggagtcgcggagtgatcatgtgatgcatgcagctagccctctactccattgagctgcgtgctgtgtttggcctccatgcatgccccct

SEQ ID NO: 5682 - DNA, 311 bp, Chlorella sorokiniana
  unsure (1)..(311): unsure at all n locations; Clone ID: LIB3602-081-Q6-K6-D11
cggttccggccatancccgggtncggacccagcgtccgcgcaccggtcagagcagccggncaccagggggcagtgtctttccttccgtcggcgntgcagcgacgccaccagagcccaaccaagccagcggnnagcctggcggcacccgcccgggcgggcaagcgggtgcaccagctggnccgggnaggaggacccctccccncccccgcccccggggccccccctttttttgcccccgccccccgcgggggggtgcccccggggggggctctttcccccccccccggggggggggggcccccccccccccc

SEQ ID NO: 5683 - DNA, 154 bp, Chlorella sorokiniana
  Clone ID: LIB3602-081-Q6-K6-D2
gcggtcttggtgcagccggtctggctgctgttggacagccacattgcggcctactttgtagccgcttcggcatgctgtctgtaggctggccaagcacaccaaactggatggtgtgctgcgttgctatgaatcagcagtgcaagcactgtgcatg

SEQ ID NO: 5684 - DNA, 472 bp, Chlorella sorokiniana
  Clone ID: LIB3602-081-Q6-K6-D4
ctgactgggactgcggaagtgtgatagctcatcaccttgatggaggatggggtggcagtgcgatagtcggctgcttcgtgtgagatctccgccagtgcagacgttgcgcgatgcgaggtgtctggaacgtggcgttcaccaacatgcacgtaactgacgccgctaccgacactatagttgggcgtactaccggactgctggggaagcagtgctgatggcaccataagcccgctaagcttttcattgatgaggccctaccacgacgaactgtgcgccaagatagccctgtagcgccatgtgagaactgagcccgccttaacccagatcaccgatgactactacatctggcgctgtggctcaccgagcagaatctgtagtccacagagcacctccatgtgctggacgtgacgtgcgagctgacagtgcatgtcacgccgccggggtacctcaacacggatgcatggtacacgca

SEQ ID NO: 5685 - DNA, 499 bp, Chlorella sorokiniana
  Clone ID: LIB3602-081-Q6-K6-D6
aaaaaaaaaaaaaaaaaaaaaaaaaaaaaaaaaaaaaaacaaaaaaacaacaagccaaagccgccacgcagagcgggagcgggagagaaaaaaagaaaagaaccccccaaagacgaacacaaaaaacaacccacccaccacccccccaacccccaaaaggaacaaaaaaaaaaaaaaaaaaaaaaaaaaaaaaaaaaaaaaaaaaaaaacaaaaaaaaaaaaaaaaaaaaaaaaaaaacaaaaggaagagcgaaaacaaaaacaagcacccaaaagaaaaaaaaaaaaaaaaaaaaaaaagggagagcaacgggaaaaaaaaaaaaaaaaaaaaaaaaaagaaaaaaacaaaaaaaaaaaaaaaaaacaaaacaaaaaaaaccaaaaaaaaaacaaaaaaagaaaaaaaaaaaaaaaaagcaaaaaaaaaaaaagacaaaaaaacaaaaaaaaaaaaaaaacaaaccaacaaccacccccgacccaaaaacacgaccag

SEQ ID NO: 5686 - DNA, 563 bp, Chlorella sorokiniana
  Clone ID: LIB3602-081-Q6-K6-D8
gtggaacccctccaaggagcaggacttccccggcgtggtgctgcgctatgaggacaacggcgacgccgtgaacaacctggtggtgctggtgcagaaggtgggcaagaacaacatcgacgagctgggcagccccgacaagttcctgcaggacaacgcctacctgttcggcgagtccgcggccttcaccggcgagaccctgtctgagggcggcttcctgcccaacaaggtggccgccgccagtgtgctggacgtgcaggaggcgaccgacaagaagggcaagaagtactacaagtacgaggtgctgacccggtccgccgacggcgatgagggcggccgccaccagctgattgccgccaccgtgtccaacggcaacctgtacctgatcaaggtgcagtgcggcgacaagcgctggttcaagggcgccaagcgggaggccattggcgcctgggactccttcaccgtggtgtaagcacttgcaccgtggtgaccccgccgcagtagccgccgcagcagcagcacagcacacgagaagaaacaccccccccccacactttcccttgctt

SEQ ID NO: 5687 - DNA, 392 bp, Chlorella sorokiniana
  unsure (1)..(392): unsure at all n locations; Clone ID: LIB3602-081-Q6-K6-E1
gcgttcgggcctggttgcagcgggncccagcgggcgaagcagcgaagcgccagcgccggcgccagcgcaggacgacagcggcagtgaggaggagctgcttgcggaggcagaggccgaccccgcggcgctggatgccacagatgcagagcagcagcaggcagctgaggagcagcagcggcggtagcctgaggcggccaggaggctggcttgcaagcacactcgcccgcaattgctgctggccaatgctgaacctccatggaagacacagacttcaagctttgattcaaattatgatgaactaattgcacttgctgctgtaactgattctctgctgatctgtttgctcggtaccctgttgcggttgtgtcgacaccatgttagcagtggctgtg

SEQ ID NO: 5688 - DNA, 150 bp, Chlorella sorokiniana
  unsure (1)..(150): unsure at all n locations; Clone ID: LIB3602-081-Q6-K6-E11
cggtccgcattcccggncgaccatttttctttcagtcccacagcggggggccacggggaagcggggcagctgcctcgacggcaggcaagctcaaggccaagctggnccgngncttggcgggcgncgagtaagcgcctcccctttggggcg

SEQ ID NO: 5689 - DNA, 95 bp, Chlorella sorokiniana
  unsure (1)..(95): unsure at all n locations; Clone ID: LIB3602-081-Q6-K6-E12
tccgcggncgcgtgggcggncgcgtgggcgcagccgcaccacnaatcccgcgggagcgtgggcagtcatgcagcagcagctggnatgcagcgccc

SEQ ID NO: 5690 - DNA, 263 bp, Chlorella sorokiniana
  Clone ID: LIB3602-081-Q6-K6-E2
aaaaaaaaaaaaaaaaaaaaaaaaaaaaaaaaaaacaaaaaaaaaaaaaaccaaacaaaaaaaacacgggacgggcgcgcccccaaagcaggcccccccgccacccccccccaccccccccgccgcgccggcggcgccccgcgcgccgcggagggaaaaacccggcgcggccgcccaccccccaccggcccgcgcgggcgaccccccccgcccgccgcccgcccgccgccggcagggcgccccccccccaccgccccccgccc

SEQ ID NO: 5691 - DNA, 474 bp, Chlorella sorokiniana
  unsure (1)..(474): unsure at all n locations; Clone ID: LIB3602-081-Q6-K6-E4
gggaggccaagtgccaccagcgggcatgctggaggaagacccggacctcgaggcgtacctgcaggtggcgatctctggatcggcgcccggcagcacaggtggcgatgagtttggtggtgaggacgatgatgacgacgatctagatctggactcgtacatcaacgagctgtcagcagaagtggaggcagcagcggcagcccaggcagacggcggtgcggcggcagcggcaggcgaagcgccaggggagcaggcggacgcggaggaggcggcagcggcagatgcggatgcagcgggcgatgcagcagaggcgccggcggcagcagcagctgatgcaggcaaggagagtaaggaggactaatcaacgtttgtatcaaacatttgcccgcccttctgccctgctgtatactcgcggtagtctctaacattgtttcgcgtcnnaaaaaaaaaaaaaaannaaaaannaaaaannnnnaa

SEQ ID NO: 5692 - DNA, 443 bp, Chlorella sorokiniana
  unsure (1)..(443): unsure at all n locations; Clone ID: LIB3602-081-Q6-K6-E5
cgcggnggtgccaccagctgcccccgcagttggtttggcgccggcagtcagcttggcacccgctccggcgctgcagccagcagcaccctctgtgcgctttgcagcaggggcgccgcaggcagctgcggcggcggctcaagcggcggtggcaggggcaggaggagcaggggcggcagctgccaatggcgctacctgaccaggattcgtgagaatcacgccggctgctgtagttgttcattgagcacacgactttgttccatcattgatgttgggcagtgcaatttgctggccatttcatgcatcactgtacgttattgtacgctatccttcatgtacctttgattgcaaaacgttacatgccnnanaaaaaaaaaaaaaaaaaaaaaaaaaaaaaaaaaaaaaaaaaaaaaaaaaaaaaaaaaaaaaaaggggcgggccgtttt

SEQ ID NO: 5693 - DNA, 492 bp, Chlorella sorokiniana
  unsure (1)..(492): unsure at all n locations; Clone ID: LIB3602-081-Q6-K6-E6
gtgggnacgcagcggncagagcagccggtcaccatggtgcagcgcctcacctaccgccggcgtcacagctacgccaccaactccaacaagcagcggatcctgcggacccctggcggcaagctggtgtaccagctggccaagaagaagacctcccaccccacctgccccatctccggccagcggctcaatgggctgcccgcggtgcgccccaacagcctgcaccgcgtgaccaagagcaagaagacggtgcaccgcgcgtacggcggccacctggcggcgggcgtggtcaaggagcgcatcgtgcgcgccttcctggtggaggagcagaagatcgtgaagaaggtgctgaagctgcaggctgccaaggaggctgcgcagaccaagccgcggcggcaggcagtaagggcaagaagaattccaagaagtgagcggcgcacgcgaacggacaggttgcgccccatgctccccgctgtaatgcacccctcgatgatt

SEQ ID NO: 5694 - DNA, 86 bp, Chlorella sorokiniana
  unsure (1)..(86): unsure at all n locations; Clone ID: LIB3602-081-Q6-K6-E7
naaaaaaaaaaaaaaaaaaaaaaaaaaaaaaaaaaaaaaaaaaaaaaaaaaaaaaaaaaaaaaaaaaaaaaaaaaaaggggcgggc

SEQ ID NO: 5695 - DNA, 582 bp, Chlorella sorokiniana
  unsure (1)..(582): unsure at all n locations; Clone ID: LIB3602-081-Q6-K6-E8
cgtagctgagtgctccancgcggcagcctgctgcgccaagtgccaggctcgcgccgactgcgccgcctggacgtttgatgaaaacaactccgcatctagctgccccaactgctgcttcctgaaatccgcctccggctggagccgccagcagccgcccggcctcgcctcgacttcgggcattgtggcggggcgaggtgcctctccagcttccccctccccctctgctctctcacctggcgcctccccgccgcccccgccaagcaacagtggcagcggcagcagcggcggccagcaatgcaccatccttcagaacaacaacctcggtccagccaccgtgctggccacaaccagcgccggcagcgccgaggcgtgctgccagcagtgccggcagcagcagggctgcaacgtgtttgtttggtgcccagaagcctcgggctgcgacaacggggcgggaactgtcttccccagccagctgtgcaccctgaagcagcagcccaccggcagcgatggccgcccctccctggattcctatggctccggcccaggggtgccctggacatctggatacctggcctgagtggc

SEQ ID NO: 5696 - DNA, 357 bp, Chlorella sorokiniana
  Clone ID: LIB3602-081-Q6-K6-E9
ctgtctcatagcctgcttgcaggaagtaccggcgccgaggcacaaggctgccacacaggagcggcttctgccacgacgctgttgcgcgccaggctccccatgctgttacgaagaagaagacctgtggtcgtcaagtgctgcataaaccacatcacgcatccgcgcgccctgttcaacggccctgcgtggcgattgctcactacttgaaccccattgagattgtggtgtggctgcccccgctgtgcacgcaagatggcgtgccctactgcatcgtccactgcacggcgcggctgcgcaccgtggtgcacaaggagacgcgccccgcgctggccctgacggacttgtagaatgaggacc

SEQ ID NO: 5697 - DNA, 583 bp, Chlorella sorokiniana
  Clone ID: LIB3602-081-Q6-K6-F1
ctgcggcccttcatacctttgtacctttctgtatcatcttgcagcaatggcagccggctgcatctttctaacatcgtcaccggcccactcgtttgtgccatgcccacctgcctccaacgtcacccttcatcaaccctcacccaacccatccacctgccacccatccactcaccttccctccgccacaacctctgccacccactcaccacccatcacccgctcaacgccctccatgcaccatcctccccatccaccaaatctgccaccccaaacgcacgtccgccgctgcaccacctgccgccccctcacccgcacccatcttccacccgccacctttcctgccgctcaccgccgcacatcctacctcccacacctcactccatgtccacccttcacccgcgcttcacacagcggctgctgccatgcaaagctgctgccaaacccatccatcatgctcgcacacccactcacccacacgtccaacgtatccagacccattttcaaggcccgactgtacagtgcctttttgcgtccttatgccgatctggtaccaggacttaatgtgtaacaaatggtatgttaa

SEQ ID NO: 5698 - DNA, 128 bp, Chlorella sorokiniana
  Clone ID: LIB3602-081-Q6-K6-F11
cggtcgcgtgcgcggcgcgtgggccctgaaactatggaggaccctccctgtagcggtggccggcatgggcacaggtgagcactgtgcaagcacatggctgccggctgctcaactcctccaccaggcat

SEQ ID NO: 5699 - DNA, 535 bp, Chlorella sorokiniana
  unsure (1)..(535): unsure at all n locations; Clone ID: LIB3602-081-Q6-K6-F2
cgccgggagaggggaggaggacgtggacgccacaatcgccatgatgccagcagctgaagaagcggcgcctaagctcaggctgacgctggggtgcagcacgtttgtgcccaaagcccacacacccttccagtggtatggagtgagcggcgagggcgagaagcggctgaagaagctggagaaggcgctgggcagggagggcatcgagttccgcccagagtcgtacaagtggagctgcgtgcaggccctgctgtcgcgaggcgaccgccgcctgtcgcgcctgctgcttctagtgcgtggctacggagactcgctgggcagcttccgccgcgcgttcaaggagctgcagggcgaggtgccgccgntggagcactatgtgagcacccactacgacccagacacaacagtgctgccctggagccacctgcacgggcccctgccggcngccacgctggtcatgctcctgcgggaggcgcaggcccacatgtgacacgcacatgagtgccagtcagctatgactcatgttgaccatgtgtat

SEQ ID NO: 5700 - DNA, 445 bp, Chlorella sorokiniana
  Clone ID: LIB3602-081-Q6-K6-F4
gagagggaaaacacagagcacagctgaagccggtacccgcacctgcggccgcaggcgcagcccggagcctcccctcccgctcctgaggccccgccagcagcaacaggaagcgccggcgcctgccccgacggcagccgccccccagtcaagccccctgcctgcgcaacctgccaacggcgctgccgcgcctacccctgcagaggatcaggacgatcatgaggcccgtcaaccagatcagcacgcaaccaggagcagcagcctcagcagcatcagctggagctagatcaacatggattccagtcacaaaagcgaacaaagcgcacaatgagcaatgcggtcacacgcacagcacgcatcaggagcagacagcggcgcaacaccagaagcagcagggatcgtaaggaccggggccggatccgtaataggaacaaagatcgcaaggacc

SEQ ID NO: 5701 - DNA, 427 bp, Chlorella sorokiniana
  unsure (1)..(427): unsure at all n locations; Clone ID: LIB3602-081-Q6-K6-F5
tgcgccnggnggcccagcgcgggagactacgacgtgcacgttacgctgcgcgcgccgccgctaacacccggcggcccgccgcaggagagcaagggcaagtttgacctgaaggagccgtactaccgccagcagatgcagtggatgatgcagatggcggcggcagcacccacgtggagctgccgatgccggcgcagcggcggctgccgagtcgccggcggtggaggcggcggcagcagtgatgggcgtgccgcagctcctggtggacaccaactaggctggaagaaggatgggcggcatgcttgtgtaggagcaccccagccggattggtacactgcggcagtttcgtcctggctgcgtttttcgtgttgttcctttgcctctccgctcctctgtcctttctgtgtgtttaattggcggtctttttttt

SEQ ID NO: 5702 - DNA, 94 bp, Chlorella sorokiniana
  Clone ID: LIB3602-081-Q6-K6-F6
aaaaaaaaaaccctataatttggtttttttttttttttttttttgcctccttgtgaaagaattttttttccgcgccccccccccccccccaccc

SEQ ID NO: 5703 - DNA, 600 bp, Chlorella sorokiniana
  Clone ID: LIB3602-081-Q6-K6-F7
cacatctgattgtgggacgtcaagggcaccacccacagcaaccgtgaactggtggctctgcacatcttccagggcacctgtgggtggatgacgacgtggcgggccacccgcgggacgccgacctgttaggcagcgggcgagacgacaagaagctgattctgtgggacctgtgcaagccggagggcgcggcgcacgacaaggaggtggaggcccacacggacgaggtcaactgcctggccttcaacctcttcaacgagcacatctgggccaccgtgttcgcatacataactgtggcgctgtggtacctgcgcaacatgaccatcaagctgaacctgtttgagcggcacgacgaggaggtgttccaggtgggctggagcccgcacaacgagaccatcctggcgtcatccggcgcggcaccggcggctcatggtgtgggacctgtctcgcatcggctaggagcaaacacctcgagacgcataggacggcccccccgagctgatgctcatccacggcggacacaccgccaatatctccgactttgcgtggaacgggcaggacgagtgggtggtagccaccgtggcggaggacaacatactgcag

SEQ ID NO: 5704 - DNA, 408 bp, Chlorella sorokiniana
  unsure (1)..(408): unsure at all n locations; Clone ID: LIB3602-081-Q6-K6-F8
ccgctgctctcccctttgcccccgcccatccacccagcacaccagggccaccggggcctgaggccccggccgcccagcctgcacagccatctctttctcgccttttgccagcccacgccgcctctgccgcgccctccggccctccggaggccgcccggcttttcccccggctgcgccctgtaccgtctgcgtccgctgctcccagtcctcgtgacggccatagctcgccgttgacccctttcatgccgttttgtcgacctgccctgtaccatcagcagcttctgtacccgccgcatggcccatatgccttcccttcatcctgcccaccctttagttacgcgctactaaccagccgttgccctgccctgaacgaatgccccctttccacttgtaaaagctagagactna

SEQ ID NO: 5705 - DNA, 445 bp, Chlorella sorokiniana
  Clone ID: LIB3602-081-Q6-K6-G1
gcgttcgcgccacatcaaggcggcccgcgtgaggatgccacccgcattggcagcgccggtgtggtgcgccgccaggctgtggatgtgtcgccgctgcgccgcgtgaaccaggccatctggctgatcaccaccggcgcgcgcgagagcgcgttccgcaacatcaagaccattgcggagtgcctggcggacgagctgatcaacgcggccaagggcagctccaacagctacgccatcaagaagaaggacgagatcgagcgcgtggccaaggccaaccggtaaacggctgttgcgcacccaccaaaacagcagcccgccacagccggcacccctgggcaggatgccagaccgccagtgcagcagcacggtgtggttcagctgctgttatcgtggcaggctttccaattaggcgcgggtgttaggattgtgtaacacagcgcacccaggc

SEQ ID NO: 5706 - DNA, 315 bp, Chlorella sorokiniana
  unsure (1)..(315): unsure at all n locations; Clone ID: LIB3602-081-Q6-K6-G3
cagcgttcggtgcaacaggcaaccatgccgncccanaagcgcttcgccatcaaaaagaagctggccaagaaggccaagcagaaccggcccatccctccttggatccggttccgcaccaacaacaccatccgctacaacgccaagcgccgccactggcgccgcaccaagctgggcatctaagcgcctcccacgaggagcagctgacggcagcagccccggcacggcaggcagtgcgctggccgcgcttgcaaggcagcccgtcagtggcatgatgacagcttaagcttgtaacgatggcctagcagccacacagac

SEQ ID NO: 5707 - DNA, 117 bp, Chlorella sorokiniana
  unsure (1)..(117): unsure at all n locations; Clone ID: LIB3602-081-Q6-K6-G4
actagttctagnacgcgggcggccgctcgcgatctagaacaaaaaaaaaaaaaaaaaaaaaaaaaaaaaaaaaaaaaaaaaaaaaaaaaaaaaaaaaaaaaaaaaaaaaaaggggcg

SEQ ID NO: 5708 - DNA, 306 bp, Chlorella sorokiniana
  Clone ID: LIB3602-081-Q6-K6-G5
aaaaaaaaaaaaaaaagaaaaaaacaaagaaaaaacagaaaaaaaaaaaacaagaaaaacgaaaagacaaaaaacaaaaaaccaaaagaaaacgaaaaaaaaaaaaaaagaaaaagaaaaaaaaaaaaaaaaaaaaaaacaaaaaaaaaaaaaaaaaaaaaacaaacacaaaaaaaaaaaaaaaaaagaaaaaagaagaaaaaaaaaaaaagagaaaaaaaaaaaaaaaaaaaaacaagaaaaaaaaacaaaacagaagacaaaaaaaaaaaaaaaagaaaagaaaaaaaaaaaaaaaaaacaaaa

SEQ ID NO: 5709 - DNA, 470 bp, Chlorella sorokiniana
  Clone ID: LIB3602-081-Q6-K6-G7
atctcaaggagaaaacgtatcacggccgcgccacttgcgaggtggccatccttcggtgacgaggcagctggacacgctgatcaaggccaccatcgcccccagcggcagtgatccgccacatccacaaaaagctcatcaacaggcaaaacccgagggagggccttaccgatgctgccccccctgtaagcacctttcccatgactgcggcagcagcctgacggactggacgatagttgctgccaaaggcacgggatcagccctgccgacctggccgccgcccacccctgacgcgttcagccgcgccggccgtctgacatcactcgacttaacccaccgctctacagaaaatgtgactccaccccaattgtgtatcctctgctatgtctgtatcaccctgccaggcctaaactccttatgctctatttcggggacaccgttttgtctccaccttcttgccttggcccaaccta

SEQ ID NO: 5710 - DNA, 543 bp, Chlorella sorokiniana
  Clone ID: LIB3602-081-Q6-K6-G9
gccccacagtgctgcccgtcacagtgacgcggcgcatgcctacgtgccccgcctgctcatggcgctgcacatgcagggctggcattacagcgtggcgacccccgccgttcgcagcaccgtggaagcgctgctgcgcaagcagcgggtgcagacggagcggatcgtgtcggtgcagcaccccacaccagaggagctgcgcggcaatttgggtctgctggcccacaacctgcagctgctggcagcggtgggcatccgccccacagaccaggacctcaccatggtcctgcgctacctgcggcggcaccagagcgcgctctcgcggccacagatggagcggttgaaggaggccttcgatgcctggcagctgtccagcacggtgcgcaagctgcgcgtgctgcgccgctgagcgcgccgtgcatgctacgtcttttgacctgggcaactgccaaccgcccattgcccacacatgatagtgaattgttttgcatgtcttactgagtgtgtgacccttttgtgcatgttaacaatgccagcctacataat

SEQ ID NO: 5711 - DNA, 584 bp, Chlorella sorokiniana
  unsure (1)..(584): unsure at all n locations; Clone ID: LIB3602-081-Q6-K6-H1
gtgcagggccgcaactgcctgacccanttctacggcatggacctgaccaccgacaagctgcgctccctggtgcgcaagtggcagaccctgattgaggccaacgtggacgtgaagaccaccgacggctacttcctgcgcgtgttctgcatctccttcaccaagaagcgccccggccaggtcaagaagaccgcctacgcgcagagcagccagatccgcaccatccgcaagaagatggtggagatcatgacccgcgaggcgaccagctgcgacctcaaggagctggtgggcaagttcatccccgaggccattggcaaggagattgagaaggcgtgccagggcatctacccgctgcagaacaccttcattcgcaaggtgaagctgctgcgcgcccccaagtttgacatcaacaagctgatggaggtgcacggcgactacaccgccgaggccgccgccgccgccgccgccgcgagcgagaagctggagcggcccgcggaggagattgtgggcatggcgcccgaggaggccaccgcctgagcttgagccgcagccgccggttggctgggagggcggcgcacggcgcgggc

SEQ ID NO: 5712 - DNA, 81 bp, Chlorella sorokiniana
  Clone ID: LIB3602-081-Q6-K6-H10
ctcgcgcctggccacctctgggcatgcctgatgctctggctcagccctgccgcacgggtgctcacaaggccccgccctggc

SEQ ID NO: 5713 - DNA, 583 bp, Chlorella sorokiniana
  Clone ID: LIB3602-081-Q6-K6-H4
catcgccatcggcaggctgtggaccaagattgacgcgggctgcgcgaggcgggagaggacctgagctacgaggtgcggcccgagggccgccaggtctgcgtgctgctgccttatgacggccacctgtgcatcaagaaggacctggagcagcgggcgctggtggtggagtccaacctgtttgagccctggcaggaccgcgacgagcgcgagttcaggcctttcagcgagatggagtgggatgacgaggacggcgccacgctgccgcagtttatcagcgaggcgctctcacagtacctgaagaagcgggtggaggtgcgcttgtgaggactgaaaaggcagcactggcgcaccgccgtaccgggcaatcgcagtcgccaagctcgtcgccatgctctctgtttggaacgcaacccgttcgaaagcgacccttcccaaacgcatgtccagtgtgcctcgctatcagaggcttttgcaagcgacccctcttgattgtctgcattgtgttgtgtggccagccacgcgcattagcgcaccgttttcccctctcttcatcgcagccggcggcttgatgctgccgcagctt

SEQ ID NO: 5714 - DNA, 592 bp, Chlorella sorokiniana
  Clone ID: LIB3602-081-Q6-K6-H7
gtgtccacaccagacagccagctgcccaccacggcacgagctgccacaccaggtcgtacgcttgagaccccaagctggccatgctacggtgcgcccgtggtggcgcagccagcggcgccacaccagtatgtacagcaagctcaccagccagcaagtgccatgcccgcccatgggctgcatcagcagacgcaaccggtcacgcctggggccgcactggggctgggcggcccgttctatgaggccagcagcagccccagcacatggtggcagccacaagctgccaattcgaacctgaatgcactcaacacgccccgaccgcgcaacgcatctgccaaagacaagccgatgacggcggatcccacccagctggactaggcggcgcttgctgcatcctgcgcagaatacatccagcagacggctcgcatccgacccaagccgatgccggagatgcaagagagttctgactctctgctgtgacgtaagggcgggcaatgcggagacaggcggctaggccaacatatgggccatggctgggcagtcggcagttatcgtaatgggtcatgggcccacatcaatgtgcactgctactttg

SEQ ID NO: 5715 - DNA, 542 bp, Chlorella sorokiniana
  unsure (1)..(542): unsure at all n locations; Clone ID: LIB3602-081-Q6-K6-H8
aaaaaaaaaaaaaaaaannnnnnnnnnnnggggggggggggggggggggggcggggggggggggggggggggggggncggggggnngggcggccggggggggncgaaggggggggggggggggggggggggggggggcggggggggggggggggggaggggcggggggggggggggggggggggggggggggggggggggcggggacagaggggggggggggggggggggggggggggggggggggaggcggggggggggcgggggcagggggggggggaggggggggggggggggggggggggggggggggggggggcggggggggggggggggggggggggggggggggggggggggggggggggggggggggggggggaggggggaggggggacggggggggggagggggggggggggggggggggggggggggggagggggggagagagaaaaaaaaaaaaaaaaaaaanaaaaaaaaaaaanaaanaaaaaanaaggaatgggtttttntgtggggggggggggggggggggggggg

SEQ ID NO: 5716 - DNA, 72 bp, Chlorella sorokiniana
  unsure (1)..(72): unsure at all n locations; Clone ID: LIB3602-081-Q6-K6-H9
aaaaaaaaaaaaacanaaaaanaaaaaaaaaaaaaaaaaaaaaaannnaaaaaaacccncnaaaaaaannnc

SEQ ID NO: 5717 - DNA, 569 bp, Chlorella sorokiniana
  unsure (1)..(569): unsure at all n locations; Clone ID: LIB3602-082-Q6-K6-A1
tcgnaaaaaaaaaaaaaaaaaaaaaaaaaaatgaataaaaaaaaaaaaaaaaaaaaaaaaaaaaaaaaaaaaaaaaaaaaaaaaaaaaaaaaaaaaaaaaaaaaaaaaaaaaaataaaaaaaaaatgggttgtttttttttaaaggttcaaatttttttagggggggtgcttgtttaagtgtgtacctttttttttggggggggggttttttgaatttttttgttttttttttttccccctttttgttttttcaacgccttggtttttcccctttttttcggttggggaacccttgtgctttttcgcgctttttgtggttttggggaaagtggcccttttctcgtgggtttttgcttaatggtgtggggctcttgatgggtacctttttcccccccttttgttccggttttttttggcctttggggtttttttttttttcgccctttttttgcctttttcattttggggggggtttcttctcccttcgttcctttttttttttttttgcgcgtctttttttccgcgcccgttttttttgggttttttttcccctttttttttttttaaa

SEQ ID NO: 5718 - DNA, 84 bp, Chlorella sorokiniana
  unsure (1)..(84): unsure at all n locations; Clone ID: LIB3602-082-Q6-K6-A10
tccgggtcgncccagcgtccggtctgcttctacttgccagtgcagcccagattttggagacagagacgcccagccaaggtggtg

SEQ ID NO: 5719 - DNA, 580 bp, Chlorella sorokiniana
  unsure (1)..(580): unsure at all n locations; Clone ID: LIB3602-082-Q6-K6-A2
gcgttcggtggaatgggcaattcattcgccgaggtgaacgtcccgaagacaacaagccttctgcaagggcaaggagtgccgctagcacaccatgcacaatgtcactcagtacaagaccggcacagcgtcgctctacgcgcacggcacgcggcgttacgaccgcaagcagtccggctatggtggccagaccaagcccgtgttccacaagatatgccaagaccaccaagaagattgtgctgcgtctggcctgcaccgtgtgcaaggcccagcacatgcacgccatcaagcgctgcaagcacttcgagatcggcggcgacaagaaggtcaaggggctatactagtaaaaaaaaggagagcggcaggcggagagcatgaccgagaaatggaggcagcggcgcccgctcaccctgggcggcctgctccccgcccggcgcctcgctttggccgcctctggccactcgtacgcctccttgtccatgcccttgtgcttcctgatctttccaagctggcatgcaagcagcctggccgtctgtaatgccattggcgtgtgaaaancnctctcctcgtttgttctttcgat

SEQ ID NO: 5720 - DNA, 572 bp, Chlorella sorokiniana
  unsure (1)..(572): unsure at all n locations; Clone ID: LIB3602-082-Q6-K6-A3
gcgttcgctcagaagccagnagctgcaggcggccacgtttacgcgcgacacggagcggctgcaggccaacctagaaaagaccgctccgagatccggtacgaaatcgacaagctgaccgcctcgcagcgcctggacctgaatctggagaaggggcgcatgcgggacgagctgcagtcgctgcgggacaagaccaacgaagttggagatcaagatggacaaggaggtgaactccctcaaggcagcgatggagcagagcaagaacgacaccgtcaagtacgtgctgggtctgatgctggcgctgatgacggcaggcctgggtgccgcacgcctgctcatgcactaaagagggcaagcgacgcccgcctgctgctgcacccgaaaattgaggctgcccgcccgctcatgccctgaagcagcggctgctcttcatggagcagggttgtggctgcatcatgctggtcatgcactagttctgcggctgctcgtcaatgccgctcagccgctcagccgggcagccgggcagctgggcctataaacccggcaccactattgacggtcaggcagggctatac

SEQ ID NO: 5721 - DNA, 90 bp, Chlorella sorokiniana
  Clone ID: LIB3602-082-Q6-K6-A4
aaaaaaaaaaaaaaaaaaaaaaaagggacggccgaatctaaaggataccaaacttacaaacaacgtgcatgcaaaaaaaataacatatta

SEQ ID NO: 5722 - DNA, 452 bp, Chlorella sorokiniana
  unsure (1)..(452): unsure at all n locations; Clone ID: LIB3602-082-Q6-K6-A5
gcatctcacccagcatgcctgctgcgcatgatcactcccgcccacatgccatgtacctgtttgttatcacttgccggcnnnaaaaaaaaaaaaaaaaaaaaaaaaaaaaaaaaaaaaaaaaaaaaaaaaaaaaaaaaaaaaaaaaaaaaaaaaaaaaaaaaaaaaaaggaccccctttttgggggggggagttttcttccctggcgtctgcggtatttttttttttttggggggtctcctatttattctgaagtgcgcggctttttacagcttgcggttgtggaaaccccggggcgtcccccttttttcgggttggggtcgatttccctttttctcccgcgggttgtttggcctgggggcccctcccgttgtccctcttccaaagttgcgccccctgtggggggtttggggcccgccctctgtgggggcttttttcccgtggggggtgtggt

SEQ ID NO: 5723 - DNA, 576 bp, Chlorella sorokiniana
  unsure (1)..(576): unsure at all n locations; Clone ID: LIB3602-082-Q6-K6-A6
cggtcgcgtgggcggccgccgagtgcgggaccgagngggcttcaacgccatgctggacgcggcgctggccaagtcgccgcacagcagcttcctcatctaccccgagggccaccgcagcctgctggacgcggcgctgcccctcaagaccggcatgctcaagtatgcctacagccggcgcatgccggtgcagacggtcatctccgccaacaaggaggcggtgtgctcggagcgccagactgtggcgcgctttgggcagaccgtggtgacggggtttggcgagactgtggatccagccaaataccccacctttgaggacttcacggccgaggtgcagcgcgtgtgggatgccgagtgggtccgcgtcctgtccgcagaccccgcagagggcaagccactgcctgcacccatcgcggacatggcagccgccgctgctcattcggctgcgcagctcggcggttgcgctgctcaccacggcactcctcgctgccggcctgctgctgatggcacgcctggcgctgcgctttgcagcctggcagcccctggtcgcagcgatgttggcgggcagcctggcagctt

SEQ ID NO: 5724 - DNA, 484 bp, Chlorella sorokiniana
  Clone ID: LIB3602-082-Q6-K6-A7
ggctagggcttggtgccgaccatgcgagagtgacatagttcatataccctactatggtgtgctcggtctacatgagaggcaccgtgaagtgattgagcggggcgtgtaccatgcgctggccttgttgcatgccctcagacctgaccgcacgctattgaatgcggatgggataaaacctttttttacgtgaatatccctgcccatttgcgcccggaggagcacctaccaatgtaacatttatgttgtcaaaccgcatgccccaaaagccacggccgcgccctgctgcgccagcctttgcacacaacccctagccgtcagttcatgcaaccccaaccataagccgttgcaccgtgatacccccgttgcaccaatcctgcccgccagagagcgcgctgctctcacgcccacatttcaagctaacactagaccctgtactttgtgccgcccataataccctccgtcaatgaaactaatgttatactgc

SEQ ID NO: 5725 - DNA, 248 bp, Chlorella sorokiniana
  unsure (1)..(248): unsure at all n locations; Clone ID: LIB3602-082-Q6-K6-A8
cacggntgaccctaccgcagcgctagtgacagtgtggctgagcagccgcagtgcaagtgaggtgcagcacagctgatggcagactgctggcctggctatcacacagccgccgcgcaagtgagggctggctgaatggctggcttccacacaagtggcgaggcggtgctgctgcgtttatgctggactgctagcgtgcctgcactcgactgtacactttcagacctcttaatgttacaacaagggcatgt

SEQ ID NO: 5726 - DNA, 55 bp, Chlorella sorokiniana
  Clone ID: LIB3602-082-Q6-K6-B1
gaaaaaaactgaggacacaaccttaaaaaagggaccaaacaaagcgaacaataag

SEQ ID NO: 5727 - DNA, 76 bp, Chlorella sorokiniana
  Clone ID: LIB3602-082-Q6-K6-B12
gcccagcgtccgcccagcgtcgtccaccgccttgcgcccgctggcgggggggcagggcgcagccttgtcgccgctc

SEQ ID NO: 5728 - DNA, 541 bp, Chlorella sorokiniana
  unsure (1)..(541): unsure at all n locations; Clone ID: LIB3602-082-Q6-K6-B2
gcgttcggcgggcagcaccagccagcactgtaggcagcgttcagtcggtggcggcagcgcgccgcgagtgcagccaagtggctcggcagtgccagcgtgtgctggatgagcagcgcagcagcagcgcgtcccggctgccgccggcagagcagctgcgcatgcgtgagcagcaggcggcgctgggcgcggccggcccgtcagcaggctgccacgctggccactgcagcgcagcgcttgcaggagggcatcgacagctccaatctgcaggtgctggcagccaacaaagtggtgttagtggctgtggccggcacgtttgctcgttgactgcggccctgctgcccgcctaccgcgtgcgcctgcgcaaggcacacgtgctgcttgtctttgcgcaccacgacagcacagcctgctgatggctctgacagcgacccggcagcagcagaaggaaaacaaaaaaaaannaaaaagggggggggtggnnngaggngggaaaaaccccccactctcccccccccccccccccccccccnnacccccnnna

SEQ ID NO: 5729 - DNA, 302 bp, Chlorella sorokiniana
  unsure (1)..(302): unsure at all n locations; Clone ID: LIB3602-082-Q6-K6-B3
aacaggcaaccatgccgncccanaagcgcttcgccatcaaaaagaagctggccaagaaggccaagcagaaccggcccatccctccttggatccggttccgcaccaacaacaccatccgctacaacgccaagcgccgccactggcgccgcaccaagctgggcatctaagcgcctcccacgaggagcagctgacggcagcagccccggcacggcaggcagtgcgctggccgcgcttgcaaggcagcccgtcagtggcatgatgacagcttaagcttgtaacgatggcctagcagccacacagac

SEQ ID NO: 5730 - DNA, 602 bp, Chlorella sorokiniana
  Clone ID: LIB3602-082-Q6-K6-B4
ggcgagcttctgccagcagaactgcaagcgctgtgagagcgctcccaccagcagcggcagtggtggaagcgccgctgctgcacctgcttcccccgcacctgcctccccagccaccgcctctcaagccagcaccgcacccagcctcagccctgcgtgcacatgctccgatgtgccgcccagccgctactcctgcaaggacgaggcagcctggggcaagtgcggcgccgggtacatgcaggcgaccagccaactgctcgaaggctactgccaaatctcctgcgggcgctgcgcctgccccaccgtggctcgctgctcctgcactgacctccagccgcccacgggcaagacctgcaagcagtacagggagtggggcgcgtgtggccagcaatggatgtggcagttttatccggatcggcctactggttactgccaaaccacctgcgggcgctgctcgtgctgaacaaaacacgcgagaccagaccccctggaatgctatctcgcaatccctttgaattctgctgcatttcgtagaagtctgcttgtttgcgcctttgcctgtcgtatcctgccattttagcactgcaacaaccctgcgcctatgc

SEQ ID NO: 5731 - DNA, 511 bp, Chlorella sorokiniana
  unsure (1)..(511): unsure at all n locations; Clone ID: LIB3602-082-Q6-K6-B5
cccccgcccgacaagacaaccngcaaacgcagcaggagacagaggccctgtcggggcagccagctgcgtgccgccgcaggcactgttgcagcagttgctgctgtttcattccgtcttgctgcgcgccctgccaggtgctgcaggaggctgcgctctgctgtgctgccaagcacgctgctgagcacgagtgattatcctgcacagctgccacagctgagctggcatgctggcngaggctgccgagctggcgaccaagcaggctgccagctgcagggcgcccgcagggttggtgcacgattgccaagtggaaggcggcgcacagtcggcccatgccggcgcggcgtgcggcggcgtggcggcngctggccttggtcgccctgcccctgtgtcctcttcctttgtntttcacctggcggcctcggcccaccccccggcgccactgcttgccctctgcgggctcccactcactcgcacccagtcttgggccgaccctttcgcctgcccgtggccc

SEQ ID NO: 5732 - DNA, 309 bp, Chlorella sorokiniana
  Clone ID: LIB3602-082-Q6-K6-B7
gcagcagcagcagcagcagcggggcaagggcgatgcgggaggggcggcagaggggcaggaagcaggtggggtcaaggtgctacgcacgtatggccagcggcgacccaaggcagatccggtgacagatgccgccgccccgacgctctcaaagggctgctgcagctgatcgcaggcaagaagggcagaggcggcggcggcggcagcggcggcgcggactgagggtcgtgcaagcacgatgtcactgtgtctgagcagtacaacgctcatactaatttctgtgtgcagcagtttgtgtaaggtcgccgcttt

SEQ ID NO: 5733 - DNA, 581 bp, Chlorella sorokiniana
  unsure (1)..(581): unsure at all n locations; Clone ID: LIB3602-082-Q6-K6-B8
ggcccagccccccaccgncgccggcacgcagcagcggcgggctgtcgccagcagcagacggcaccccgcggtcagcgctcaccgctgcgttgcggcaggcagggctggcaggagcggcgccgctcgcaagcggctgagccgcaggtcggcgctcccggttgccccatggctggctgcgcgagcacaggcctgcgcaccccacatgctcgtgggcagttggggagtcaaaagtagatccctcctttgcggccaactggtagctggtcgccaaattttccacacattttcccggtacacctgcatccagtctttagtacagctccgtagcagtccgccgccctgcttgtagagtagccgggccccaccgccctccccagttttgccccaagtgcagccacccatcgccagcctagcctggccccttgacattcgcttcccttgcatacgtacggtctgagagcagcgttatgcacgctcgccaagccgcatccataatcctctctcccttctgccgcaccctttcatgtctgtacacccgccctgcgctctctttgactaaccgcaaacacgacccctccggc

SEQ ID NO: 5734 - DNA, 531 bp, Chlorella sorokiniana
  unsure (1)..(531): unsure at all n locations; Clone ID: LIB3602-082-Q6-K6-C1
cgcagttgcggnagtgctgggggccatcatcggcacgtaccgagagctgttcaaggcggcaatacaacgttttcaacacactgctgcaccatccacccattgcgcagtggcggaggtgctgcgggccatcattggcacataccgagagctgttcaaggcgccggcgctcacagaggcggtgctcttctccaattacgcgctgacggcactggtggtggatgaagtgtgcagagagggactggtggagctgaccgatcggctgagcatacagaaggccattgctatgcggctgccctacgagccgccggcagagaagagcaagggcacgcttgccaagctcatgagcagcaaggcctccccgcagaccaaggcgcagtcgtgatgcacggcgccgtccgtggcagcagtgcgtcgcagggtaggcaggagaactgtacatgtacactcaggatttaggtagagcagggcagcgcacacatctgagcatgccagcagacattgtgcagtaggcatcagtaacattgcgagctc

SEQ ID NO: 5735 - DNA, 61 bp, Chlorella sorokiniana
  unsure (1)..(61): unsure at all n locations; Clone ID: LIB3602-082-Q6-K6-C3
tgcagtttgtagcgacacccaccatccacttgtcgtgtacacatgttaaggcagnagtggg

SEQ ID NO: 5736 - DNA, 394 bp, Chlorella sorokiniana
  unsure (1)..(394): unsure at all n locations; Clone ID: LIB3602-082-Q6-K6-C4
cgnaacgtccaccctggccgaccccggcgtggtgcaggtgctgctggagctgcgcggcaagtaaactgcgatagtatgcacttacgcgagtgacaccggcagcccggctgcccgcccgcccaacagcgatacacagagccggccccccacgaacgggcggcggttgaacgagccacccctaacctcatgcaccctgaacccaatgcctttgcctgtttccgtttccctgccgctccgctctctgaccgctcagtctctccgggggctttgtcgcacgcactcgagttttccccagtggggggcgcggaccatgcgcccgcccctcgagccccattttgtccttcagccactgtagattccaggcccagagtacccccactgttgtaacaattgg

SEQ ID NO: 5737 - DNA, 118 bp, Chlorella sorokiniana
  unsure (1)..(118): unsure at all n locations; Clone ID: LIB3602-082-Q6-K6-C5
ctacctgccttgcccttgccccggccttttgccccatcctgcccagccggcctgtcggtagcgctgaatgccttctggttacatatgctggtgcctgcctgtaaacaaaacgtggnct

SEQ ID NO: 5738 - DNA, 355 bp, Chlorella sorokiniana
  Clone ID: LIB3602-082-Q6-K6-C7
gcgtgcggccgccgggggggcgctggtttttttttttgtttttgggtggtttgtttcttttccggcgggctgtttgggtggcctcttgtgcccttcggggttcactcgcggtctggcgggtggtggtccgggcctgctgggtccggggtcgcggcttcttggccgggggggggggggttggccccgggggggttaacgggggccctcccttccggggaggcgggctgagcgtcttttcgggtgcttttttctgtgggggggggccgtcctcccgcgccttgaggcgcagcagctcccacaggtgggggtgctgccccgccccgccgccgccgctcgtcttgtgggggggcgccct

SEQ ID NO: 5739 - DNA, 283 bp, Chlorella sorokiniana
  unsure (1)..(283): unsure at all n locations; Clone ID: LIB3602-082-Q6-K6-C9
tcccggngtcgaacccacggcgtccgcttacaagggcagctgcgacggcagcacaagaaagctgcacatagccgttcgggcccaccgcagggggtggcactcactacgcacgcggtcgcggtccagggcacgcgtccctccaacatgtcctgnacttccaagtggaacgggctgacactggccggccgggccacgcgatcggtccccatggcgcggcgtattgccccgatcacatgcccgcaaggccagnactagctagcctggactgggcctcaccctcgcc

SEQ ID NO: 5740 - DNA, 600 bp, Chlorella sorokiniana
  Clone ID: LIB3602-082-Q6-K6-D1
ttcgtacggcctgctctgcggcccttcatacctttgtacctttctgtatcatcttgcagcaatggcagccggctgcatctttctaacatcgtcaccggcccactcgtttgtgccatgcccacctgcctccaacgtcacccttcatcaaccctcacccaacccatccacctgccacccatccactcaccttccctccgccacaacctctgccacccactcaccacccatcacccgctcaacgccctccatgcaccatcctccccatccaccaaatctgccaccccaaacgcacgtccgccgctgcaccacctgccgccccctcacccgcacccatcttccacccgccacctttcctgccgctcaccgccgcacatcctacctcccacacctcactccatgtccacccttcacccgcgcttcacacagcggctgctgccatgcaaagctgctgccaaacccatccatcatgctcgcacacccactcacccacacgtccaacgtatccagacccattttcaaggcccgactgtacagtgcctttttgcgtccttatgccgatctggtaccaggacttaatgtgtaacaaatggtatgtaaaaa

SEQ ID NO: 5741 - DNA, 624 bp, Chlorella sorokiniana
  unsure (1)..(624): unsure at all n locations; Clone ID: LIB3602-082-Q6-K6-D3
aaaaaaaaaaaacaaccaaaaaaccagacaaaaaaaaaaacaaaaaaaaacaaagcaaaacaagaaaaaaaaaaaaaaaaaaaacacaaaaaaaaaaagaaaaaaaaaaaacaaaaaaaaaaaaaaaaaagagaaaaaaaaaacaccgaaacacaaacaaaaaaaaaaaaaacaaaaaaaacaaaaaaaaaacanaaaaaaaaaaaacaaaaaacgcaaaaaaaaaaaaaaaaaaaaaaccaaaaaaaaaaaaagacaaaaaaaaacaaaaagcagcaaaacaaaaaaagaaagacaaaaaaaagaaaaaaaaacaacaaaaaagaaaaaaacagaacaaaaacaacgaaccgacaggtgccaaaaaaaccaaaaaaaaaaacacacaaaaaaaaaaaaaaagaaaaacccagaaaacaaaaaaaaaacaaaaaaaaaaacaaaaacaaaaaaaccacaaaaaaaaaaaaaaaaaccaaaaaaaaaaaaaaaaaaacgcaaaaaacacgcaaaaaagaaaaaatacaaaaacaaaaaaaaaaaaagaaaaaaaaaaaaaaaacaaacaaaaaaaaaaaaacaaaaaaaaaaaacacaaaaaaaacaaaaaaaaagaacaacaac

SEQ ID NO: 5742 - DNA, 556 bp, Chlorella sorokiniana
  Clone ID: LIB3602-082-Q6-K6-D4
ctttctgtatcatcttgcagcaatggcagccggctgcatctttctaacatcgtcaccggcccactcgtttgtgccatgcccacctgcctccaacgtcacccttcatcaaccctcacccaacccatccacctgccacccatccactcaccttccctccgccacaacctctgccacccactcaccacccatcacccgctcaacgccctccatgcaccatcctccccatccaccaaatctgccaccccaaacgcacgtccgccgctgcaccacctgccgccccctcacccgcacccatcttccacccgccacctttcctgccgctcaccgccgcacatcctacctcccacacctcactccatgtccacccttcacccgcgcttcacacagcggctgctgccatgcaaagctgctgccaaacccatccatcatgctcgcacacccactcacccacacgtccaacgtatccagacccattttcaaggcccgactgtacagtgcctttttgcgtccttatgccgatctggtaccaggacttaatgtgtaacaaatggtatgt

SEQ ID NO: 5743 - DNA, 400 bp, Chlorella sorokiniana
  unsure (1)..(400): unsure at all n locations; Clone ID: LIB3602-082-Q6-K6-D5
aaaaaaaaaaaaaaaaaaaaaaaaaaaaaagaaacagagggggagagnnngggngnnncccgaggggcgggaaggcggggcgccggcggccgcgccagacacccccaagaaaagggaaccacaacaaaaacacaaaaagaaaaaaagagaacaaaaagcaacaaaaaaaaaaaaaaaaaaacaagaaaaaaaaaaaaaaaaaaaacaaaaaaacgacaaacaaaaaaaaaaaaaaaaaaaaaaaaaaaaaaaaaaaaaaaaaaaaaaaaaaaaaaaaaaaaaaaaaaaaaaaaaaagaaaaaaaaaaaaaaaaaaaaaaaaaaaaaaaagaaaaaaaaaaaaaaaaaaaaaaaaaaagaaaaaagaaaaaaaaaccaaacacccaacaaaaagcaagaag

SEQ ID NO: 5744 - DNA, 588 bp, Chlorella sorokiniana
  unsure (1)..(588): unsure at all n locations; Clone ID: LIB3602-082-Q6-K6-D7
ggccaacggccagcttcgaacccccgtggcggcatgtgtgctgtgcaggcgcacagacatcctcgacctgctgctccaggcggtgccaactgcagccacagcccatgcagccatgcggctggccatcggccacttccagtcgtgggctgtcgagtgcctgctggcagttgtgccctccgccgccagtaccgtactgagccatgatacacggcagaccatgctacactttgcagcggaatggggatcagcgcccatcatctcggctctcgttaaaaccgacccagcagctgctgctttgcgtgacgcttatggccacacacccttcagcctggccacgagtgacgctgccatgagtccgttgataccgttcactcctgccagcgaggtgctgcagcgtctgcgcatcccgacttacccagacccttggcattatgcacctggagttgccgtcatgccgcagttgaaatttgatctgatttgcgagtgtgtcgctgcccacatcccgctcacctctgacgattgggcgctcgtgcccgccaactgccnatggcctgggcgcgtgctgcctcgtgctgtagccatttcagc

SEQ ID NO: 5745 - DNA, 400 bp, Chlorella sorokiniana
  unsure (1)..(400): unsure at all n locations; Clone ID: LIB3602-082-Q6-K6-E1
gcattgactgcgtgtggtagccttcgatgccccttctctcgttgctagtgcaataacccccttgtttgttttgccgattggatttgcatcacccgtgcctcacaatccagacacgccacctcccccacccccacggacacccgcagtgccttagccccgcgctcccgactcctcttttcctgcttgagctctcactgcgcgcctgcgccacactggccggccctgccctccgctcactgctcttccaattcctttgccactccctgggaggcgtgcgtcgctcaatgcccttgtaatgagcgatgatgaaaaaaaaaaaaaaaaaaaaaaaaaaaaaaaaaaaaaaaaaaaaaaaaaaaaaaaaaaaaaaaaaaaaaaaaaaaaaaaaaaaaaaaaaana

SEQ ID NO: 5746 - DNA, 476 bp, Chlorella sorokiniana
  unsure (1)..(476): unsure at all n locations; Clone ID: LIB3602-082-Q6-K6-E2
cccgggttcgtacccatgtcttttttttgttgtttgtttccgtcgcacctccaagctgccgggggccgctngagnggcagagggagcactgctggcggagtcggccgctctgtcacgcctggcatctgcctacctggcggcggctcccacctggggccacctgccaagttcgtctgggaggcatccttcgcagccgcacccctcgcttgacagcgcccagctgcaggcagaggcaaccctgtcgcctccagccgcagctgtgccagcagccccaagcgcacctgcccagctggagccaccttgtgtacctctgcccggcctgcagcagcagcctgccggcagtctgggtgccacccctccgccgcccagcttccgcgctcggccaccggcactgccgcagccggcagcgggcatttcgcgacgcatgacggcaccaccctcgctgctgcctccggcgcccagccacgccgagaggg

SEQ ID NO: 5747 - DNA, 420 bp, Chlorella sorokiniana
  unsure (1)..(420): unsure at all n locations; Clone ID: LIB3602-082-Q6-K6-E3
ctgtcagcctggcgcatgggtgggaaatcggtgagcggctttcttcctgtnccgagcatantgcatctggcctnggctcaagttcagcggacagcccggcttcgaattcatgcctgcnatcgccgtcgtctgctgggctccgtcttccttcaccgcctccgtccnnggtngtgtgatgcactatctacgggcgccgggcttgctnnggtgtgggagcttgtcctcctccgctgntgtntgtgccggtggcgtggctgctcctgtgccggtcctggtgcttttccgctttgtttgccgctggtctttgttcgccttcttgcttcgtcttcttctgttgccgtttcgtgtggggccccttcttgtctctgcgcttctggctctacggctgttctgcttctggccttctcctctccttctctg

SEQ ID NO: 5748 - DNA, 347 bp, Chlorella sorokiniana
  unsure (1)..(347): unsure at all n locations; Clone ID: LIB3602-082-Q6-K6-E4
gnacggccgcctggccatggtgtccatgctcggcttcggcgtgcagggcctgatcactcgcaagggccccattgagaacctggctgaccacctggcggcccccgacgccaccaacttctgggtggactacgcccccaagtccgccggcatcggctactaagctgtttccgtcgcttgactggcgccgcccgctcgcccgcccgctgagtttacggccactcgcggcaacaggcagcagcggcgtctgtactttctgactcctccggcgattgctggtggcgcaccttgcttgctttgatgcttgcttcgggggcctaggcaccctcccatgcaacacatgaaccccc

SEQ ID NO: 5749 - DNA, 569 bp, Chlorella sorokiniana
  unsure (1)..(569): unsure at all n locations; Clone ID: LIB3602-082-Q6-K6-E6
gctgaggtcagggagacaanacggccgcctggccatgcttgccttcatcggcttcaccatggctgcccaggtgacgggcaagaacccgctggcggcgctgcgcgagcacctggacaaccccctgggcaccaccatcttctccaagccgtggtcgtgcccggccaggcggtcgtgcccccctgcgccatccccgacaccatcgagttcaacggcatcactatcccggctggctgcttcctgcactccctctggccttgagcatcacataaggccagagctgtaactcttggtggcggcgtggcgccggccagctgagcggcactcactagcgtcggcggctggggctgcgccacgcggccattttactccccaccgagatgagaacttatccctttccttgctgctctctactgtaatgcttcgcccgtcaaaataaaannaaaaattggatatgttgtttgtgaaaatattttttatttttatttttatttttttattttataatgaaataaaaaaaaggggcgggccgttttgggggttcctggttttcttccccgtgcttgcaacgt

SEQ ID NO: 5750 - DNA, 320 bp, Chlorella sorokiniana
  Clone ID: LIB3602-082-Q6-K6-E7
aaaaagagctgtttgcattgcctaattgtaaattaatgattaatacaacgaataacggagtaaagtacaggccagcagtgtacaaggtcaagcatacaaagtcagtctcgccgcagttggcaccgggggggtcaacaggggcactccaatccagcgagtcgggctaaacaacttttcaggtgctatattctctcagggagtgccgtactcacgccccatgaggcgcagcagctcccacaggtgcgggtgctgaaccaccacgccgccgccgccgggcttgtgaaagggcaccgtattgttgcagtcaccaatcagcacca

SEQ ID NO: 5751 - DNA, 576 bp, Chlorella sorokiniana
  Clone ID: LIB3602-082-Q6-K6-E8
gctccatcctatcggcggcagtgtcaacgtaactttggcagcagctaaggccctgccgagcacaggtcgtctttctgtcaacacctcttccccatcagcatggcagcagccgcacttgcagcctcagcatctcggctagccggctgccgggcagccccgcagcggcggccgctgcggcgcagggcagcagccgtgcgggcggcagccacgccggagcctgagggcggggcggcggggcccctccaggactttgcccgcagggcggagcaagtactggagcgctacgattttgtgtcggctgggctgggagccatggcagtcaccggcttctgcgtgatgcgcgggcaggacgtgggcactgcactctggatcaccgccgccagcgcagtagtggccatccttgtgaatgacatgctgcctgaggagcactgagcgacgcctgcctttgcagcagctgagcggggcgtccgcagcagcaaacgcacccagcggctgcctgcttgggccaagtttagttcagcaagcaccgtaacctgcacattgctatcacgcaataaacctggagacctcgccctc

SEQ ID NO: 5752 - DNA, 550 bp, Chlorella sorokiniana
  unsure (1)..(550): unsure at all n locations; Clone ID: LIB3602-082-Q6-K6-E9
ccaccctgggcgtggtgcgcgccaataccttcttcgccganaagcaggccttgatgtgtccaaggtggacgtgcctgtggtgggcggccacgccggcgtgaccatcctgccgctcttctcccaggccgtgcccaacgccgccaacaagctgagcgacgccgacattgatgccctgaccaagcgcacccaggtacggcggcaccgaggtggtgcaggccaaggccggcaagggctccgccaccctgtccatggcgtacgcgggcgcgctgtttgcggacgcttgcctgcgcggcctgaacggcgaccccgatgtcgtggagtgctcgtacgtggcctccagcatcaccgaggtgccctacttcagcagcaaggtcaagctgggcaagaacggcgtggagcagatctacggcctgggcgagttgaacgactacgagaaggcgggcctcaatgccatgatgcccgagctgcgggcgtccattgagtaagggcatctccttcgccacggagagctcctgcacagctgccctaagccgcctgccctgccccgctg

SEQ ID NO: 5753 - DNA, 88 bp, Chlorella sorokiniana
  Clone ID: LIB3602-082-Q6-K6-F1
aaaaaaaaaaaaaaaaaaaaaagggagggcgcgctctagaagaatccaaactaacataacgcgagcatgcaaaaaaaataaaatataa

SEQ ID NO: 5754 - DNA, 491 bp, Chlorella sorokiniana
  Clone ID: LIB3602-082-Q6-K6-F2
taccggtttttttaattttttttctttttatgtctttctggtgcggagccggcagctgtgcctcctgcggccccacggcgggccccagcggcggtggtgcggcgcaagcggctggcgcaccagcaggcaaaggcgcaggtgctggcggtgccagtggcagcgtggatgtggcatctctggcgcgcgctctggcgggagcaatgggcggcagcggcggcgccgccgccagcgcggccggggctcggccggagggggcggctgcaggcgccggcaggcggcgtagagtgctggtgaccccgcagaagctggccagggtgctggagcgctgcctggcagaggcgggcattggacaggtggcacagcaggcgcagcaggcacatcagccacagccgggcggcgaagggggcggccaaggcggcggccagtcatagtggaccgctgctttttggttgctagtacactggcacacctcttgcgaagcacatcagctc

SEQ ID NO: 5755 - DNA, 105 bp, Chlorella sorokiniana
  unsure (1)..(105): unsure at all n locations; Clone ID: LIB3602-082-Q6-K6-F4
naaaaaaaaaaaaaaaaaaaaaaaaaaaaaaaaaaaaaaaaaaaaaaaaaaaaaaaaaaaaaaaaaaaaaaaaaaaaaaaaggggcgggccggttcttaaagaac

SEQ ID NO: 5756 - DNA, 599 bp, Chlorella sorokiniana
  Clone ID: LIB3602-082-Q6-K6-F5
cccgggttgtcttatgtcgttcgcaaaaaaaaaaaaaaaaaaaaaaaaaaaaaaaaaaaaaaaaaaaaaaaaaaaaaaaaaaaaaaaaaaaaaaaaaaaaaaaaaaaaaaaaaaaaaaaaaaaaaaaaaaaaaaaaaatgaaaaaaaaaaaaaaaaaaaaaaaaaaaaaaaaaaaaaaaaaggggggggcttttttgggggttccctttttttgggggggggggttgccccttttttttttttttttttgtgtcccttattttatttttttggccgggttttttcccctttgggtttggggaaaccctgggtgtcccccctttttttgttttggcgggctttcccttttttccccgtggttttttttgttttgggcccggcccgttccccttttccctcctttttttccccttgttggggtttgggcccccccttttttttgtttttttttttccggggggttggggggtttttttcccggtttccccttctttttgctgggcccttgggtccccttttttcgtttttttcccttcctttccccgcccttttcgtggttttttctcttctggtttttttttttggggggttcttttttt

SEQ ID NO: 5757 - DNA, 395 bp, Chlorella sorokiniana
  unsure (1)..(395): unsure at all n locations; Clone ID: LIB3602-082-Q6-K6-F6
accccccccaaaanaccccaaaaacaaaaaaaaaaaactcccaaggggggnnnaannntgggtgttggggggggggggttttttttggcccccccccccccaccccaaaaaaaaaaaggaacccaaaaaaaaaaaaaaaaaacccggcggaaggggagaaaaaacccaaagagggggggcaaaaaaaaaaaaaagggggggggggggggggaaacaccgcgggggggggaaaaaaaaaagggagagcccaaaaaaaaaaaaaagggggggggaaaaaacaccccccccgcatgggggggggtgggcaaaaaaagaaggaacaaaccccccccccaaaaacaaaaaaaaagcgccgcgggggggggaaaggaaaaaaaaccaccccccagggagag

SEQ ID NO: 5758 - DNA, 129 bp, Chlorella sorokiniana
  unsure (1)..(129): unsure at all n locations; Clone ID: LIB3602-082-Q6-K6-F9
cccccccccccnggggaagaggcccgggggggggggnaaaaaaaaaaggggggggggggggggggaaaaaaaaaaaaaaacccccccccccccccccccccccggaaataaaaaaaagggggggggggg

SEQ ID NO: 5759 - DNA, 506 bp, Chlorella sorokiniana
  Clone ID: LIB3602-082-Q6-K6-G1
cccacgcgtccggacgagcgggcgcactttgtttttttgtccatgttttccgtgcgcgttctcgccactatgtttcatgccgtggtttttagtgtcagtaagggtctttatctccgctgttccacctacctgtccaactacaagctgggtgactatgtggacatcaaggtcaacgccgcggtgcacaagggcatgccccacaagttctaccacggcaagactggctgcgtgtggaatgtgaccaagcgcgccgtgggcgtggagctgctcaagcaggtaaacgggcggttcatcaaaaagcgcatccacgtgcgcatcgagcacgtgacccccagccggtgccacgaggagttcctgcgccggtgcaaggagaacgacgcggcgcggcacacgggcaaggtggaagacaagccgctgacggtgctcaagcgccagcccaagggcccccgcaccgagggcatcatgctggagaacgtgaagatggagaccatgaccggcatccccta

SEQ ID NO: 5760 - DNA, 51 bp, Chlorella sorokiniana
  unsure (1)..(51): unsure at all n locations; Clone ID: LIB3602-082-Q6-K6-G11
naaaaaaaaaaaaaaaaaaaaaaaaaaaaaaaaaaaaaaaaaaaaaaaagg

SEQ ID NO: 5761 - DNA, 94 bp, Chlorella sorokiniana
  unsure (1)..(94): unsure at all n locations; Clone ID: LIB3602-082-Q6-K6-G12
cgcgggcgcgctggcgggcgcgtggggcgcagccgcaccacntatngcccgccaggcgtgggcagtcatgcagcagcagctggttgcagcgccc

SEQ ID NO: 5762 - DNA, 439 bp, Chlorella sorokiniana
  Clone ID: LIB3602-082-Q6-K6-G2
tagttggtagttgtgtttttttccaccggttcaggtagaggagctgcagaccgctgctgttgcggcggcggcggcccacggcttgccagacgccgatgctgtgcatgagtacaagctgcagacagcagctgctgcggcggcggcaacggcctcacccatcaaaaccgaggtagaggccccggagtccgctggccccggccggactgcccgccccgccaaacggcagcgactcgctcagcagccgcagggagagacagtggctgttacgccggctgcgccgcaagtcaagaccgaaatggacgcgccacagcagcccgctgtcctccaggtggcctcccagcagctctgacagctgcagcagcggcagcccgcaggtctcgcggtcctgccccccgcagcgcagcttgcggcggctgagccgctgcacgcacacgcagca

SEQ ID NO: 5763 - DNA, 591 bp, Chlorella sorokiniana
  Clone ID: LIB3602-082-Q6-K6-G4
ccccacccaaccaaccaatccaactcactagcagtgctcgccacgcaaaacaaccctcaaacaagcggcccgccataccaggcgccaaccaacgaacgccccccttgttcttttgcgctcaaacttatttgccacaccgtgcacgtagccgccgcaaaggcggctgcctccctgctgccgcacttgagcctcaatcgatctttgtccctgcccacctcaccgccgccattttgatgcaccgcctgcttctggcccctccctttgtcatgctcctgtgcccaacttgggtggccgccggccggtccccctgcttctgtcctgcgttgggctccccaccctcactcgcacagcagtgccccaacgaacggtgcatccccagaacacttactacaccccgcttgtgtttcattgctttgcacgatgcgctttactgaacccctagctgcgtgggcgccgtccattgaccgaggcgccgtgcagcgggcggataacctcccccccttttcccgcttgtccccctgtgtcccctgctgtcgaactgtccctgcccttccattgtctgtgctttccctgttcaatctgtgcttgccg

SEQ ID NO: 5764 - DNA, 536 bp, Chlorella sorokiniana
  unsure (1)..(536): unsure at all n locations; Clone ID: LIB3602-082-Q6-K6-G5
cccgggttcgacccacgtcgtccgnacgagggcgccctcccacatggnagnncccaccctgctgnnaagcagtgaaggggctcagctggnaccgtgccnnctggctgagnnctgcagcacgctnnggttcacccatggnnatgccatgcnnnaccctgcnnttgcctgccagnngcgcctnngccccctgctgnnncctctgccacacncnnacttactcggcnnnggcagcttggaggagtggaatatgctngnntccgaggncnnaagctgccactncnntggctcnngccgcagnncagccgctttttggtcccnnccacacanngtacctacnnctacccatnntgattccnncccattctnnttttggnncggctcttcgctttgctcnnctccttcccttnnngccctgccccnnccgcatttaccctcctctctcttcccttcgnngtgcgcctnngcgtgtttnnttgtgtgacttaccgtttcatttccagaaccgttcannacgcatctgcaaggggagggaacaa

SEQ ID NO: 5765 - DNA, 316 bp, Chlorella sorokiniana
  unsure (1)..(316): unsure at all n locations; Clone ID: LIB3602-082-Q6-K6-G6
tgggcgctgcgcgccgccgagagcgccgggggccatggtgcaccgcctcacctaccggcggcgtacagatacgccagcatgtcagacgcctcttgtgtgctgggtgccgctggcggagagctgggctaccgcntggtgcaacaacagcacctcccagctcagctgtcccatctccggccagcggctcggtgggttgcccccggggcgcccctgccgcctgcaccgcgtgaacaanacccagaagactgtgcaccgtgcgtacggggttcacctgccttcgggctgcctcaaggatcgcatcgtgcgccccttcctc

SEQ ID NO: 5766 - DNA, 431 bp, Chlorella sorokiniana
  unsure (1)..(431): unsure at all n locations; Clone ID: LIB3602-082-Q6-K6-G7
ncgttcgtaaaaaaaaaaaaaaaaaaaaaaaaaaaaaaaaaaaaaaaaaaaaagaaaaaaaaaaaaaaaaagaaaaaaaaaaaaaaaaaaaaaaaaataaaaaaaaaataaaaaatataaataaaaaaaagggggggtggttttggatggttcttttttttccaccgtgtcttttggggggcattcctttttttttgggtgtgaggttggtttgctttgcttgccccttttgtctgctgtttttggtggggggaaacttttgtgtcgtgcggctttatttcccgttgcagcccttttggcttttgccgggtgtgccttcttgtgggggggcctggaacgggtcgcttttggtactttctggttgggtgacttgtttactggccccttccctttcgcccgcttttttgcctttctttggttggtttctcccc

SEQ ID NO: 5767 - DNA, 571 bp, Chlorella sorokiniana
  unsure (1)..(571): unsure at all n locations; Clone ID: LIB3602-082-Q6-K6-G8
cccggtcgacccagcgtccngagcacgccgacgtggnaagcaaccacctaccacatggcggagcctcagacggaacagcagaaggagccagtgccgctgctagaaacaaccgagagcgcggagctgcaccgcaagcagcggggcgatccggagccaacgagccccggcaagagcgggctggggcgccacgtggatgtggggggtgtgggcgactttgggcccgtgtctgacaaggttgacttccacctgcggggcggatcagagaaaattgagcaccgggtgccctagctacaacaacccgaggagggtggcagatgggtgaatgcccgaacattcgccggcgcgcttttgcacctgtgctcctggcccgctcaccgttccgtgcaacagcagccgtgctgcgcagcgggcaggctggtgcagcaggcagccagccgatgcagttgggctgggcagccgccagcaatgtatgatagcagcaggagcgagcatgcgggacgatcatgcatgcacattccctccacctccctgattttccatcctccccccagtgcactgtaacaactgaagc

SEQ ID NO: 5768 - DNA, 68 bp, Chlorella sorokiniana
  unsure (1)..(68): unsure at all n locations; Clone ID: LIB3602-082-Q6-K6-H10
gccacatctgccgcagnagtttctggnggnacggtcgcgcgnagncgcgcgctgagctggaggacttt

SEQ ID NO: 5769 - DNA, 595 bp, Chlorella sorokiniana
  unsure (1)..(595): unsure at all n locations; Clone ID: LIB3602-082-Q6-K6-H4
gtgagggcanaagacgagcacaggctggcaccggcacccgcacctgcagccgcagccgcagccccagcctcccctcccgctcctgaggccccgccagcagcagcagaagcgccggcgcctgccccgccggcagccgccccccagccggcgcccctgcctccgcagcctgccaacggcgctgccgtgcctccggctgcagaggagcagcccgatcatgaggcccgccagcccgagcagcaggaaccggagcagcagcagcagcagcagcagctggagctggagcggcgggattccaggcacagcagcgagaaagcgcacaagagcagccggtccaggcacagccgcagcaggagcagagagcggcgcagccgcagcaggagcagggatcgcaaggaccggcgccgcagccgcagcaggagcagggatcgcaaggaccggcgtcgcagccgcagcagaagcaaggatcgcaaggagcgtcgccgcagccggagccgtagcagggagcgctcaaggcgagaccggagccggagtccgcggcggcgccaccggagccggtcgggtggtaggtcgtctggccggaggtagagggtcgccc

SEQ ID NO: 5770 - DNA, 544 bp, Chlorella sorokiniana
  unsure (1)..(544): unsure at all n locations; Clone ID: LIB3602-082-Q6-K6-H5
gcggnccagcagggccacagcgcggcagcgtgccgccacccggtgccgagccgcacggctgggaggcggcgcaggaggcgagccgcgacgccgggcgcaagattgcccgcgcgtttgccgcgtccgctgaggagctggacattcctcccggggaggtgcccaaaccttacaccgtgcctccggggtacaaggcgcccacgctgggggagcagttccgttacgcggctaccaagcacccgtacgcgcgctttggatatgcgggcgccgtgctgcttggcctgctgggctgggcaattgcaactgaggagaagaagcacccacatgagcccctgggcgcacacaagcggcagcagcagcacgagggtggcggcatcggcagcaagtaggggcggcagcctcagttctgctagcctcagttctgctcaaagcccgactgctctttccttgtttatttgatgtgatgcagacgctaacatggcgctgcacatgtgttacagtttgcaatgtgnnnnanaaaannnnaaaaaaaaaaaannnnnnnana

SEQ ID NO: 5771 - DNA, 499 bp, Chlorella sorokiniana
  Clone ID: LIB3602-082-Q6-K6-H7
tcgcatgactaatactgcttgttcagaatactgttaagctgtgccgttaaaaaaaaaaaaaaaaaaaaaaaaaaaaaaaaaaaaaaaaaaaaaaaaaaaaaaaaaaaaaaaaaaaaaaaaaaaaaaaaaaaaaaaaaaaaaaaaaaaaaaaaaaaaaaaaatataaaagaaaaaagaaataccatatttagggggggggagaaagaaaaaaaaaaaaggggatcaaaaagggaaaaccttgaagaaaataaatcccttttgccccctggggggttacccctgtgaaaccccctgccttttcccccctttaacaccttcccggccatcccatattggaaaaggcgccctcccccttttggttacatttttaacctgtgtgagttgttggcgttcagtgagcggggttttttttgattattgcccgcgccctcgccccctgtctcttaccccccttattttttctctttttttccccctgcttttggtctcttttcccttt

SEQ ID NO: 5772 - DNA, 427 bp, Chlorella sorokiniana
  Clone ID: LIB3602-082-Q6-K6-H8
cagcacgagcacaggccgctcggcggcagcaggcagccgctgctacaccagcaggcagcaacccagcggccccaaagccgctccggccgacagcggcagcagggctgggcggcggcagcgagcggcacgagcgaccgcgcgacacgctgctgaatgccctgggcagctcagagcgtgcaggcagcgagtatggagagggctttgtccagttccggctgtcgggggagcgcatccatttggatgtggactcgctgaatgagcagctgaaagtgcagggcccagaccggctcaggcacagcatgcggccggacgaggcttttggcctcatattccagttcgacaatgtggttgccaacacaagggagctgcagcgtgcggcctggaaggcggtggcggacgcagaagggctgcccttcccagccatgga

SEQ ID NO: 5773 - DNA, 223 bp, Chlorella sorokiniana
  Clone ID: LIB3602-083-Q6-K6-A1
tccgcagtaattgacatagatctcccagtacgacttttgtcgctatcctgtatagtcaacataacagaatcttacacacatggtagctcaatcaatgcatccgtgcctgtcgtcgcaatgcaccactcaaccactctgcctgctgacggcctcaagtgcctgtttgccagtaacgcgctcatccatctctctaggccttctaaccacccacccgtgtatcact

SEQ ID NO: 5774 - DNA, 601 bp, Chlorella sorokiniana
  Clone ID: LIB3602-083-Q6-K6-A2
gcgtttcgttgagcgtcagtcaacgcggtgccctgtgacacagtgatgattgccacgcccatggacctgcgaaaaacatcaagatcgagaagccggccaccgtggtgagcgtccgactgccgctgctgctgctgctgctgccgcagtttacttgcagctgttgcagcttgttgtgccggtttgcctccaggccgcacaagcggcatccccgcgcatatcaacgttgcgtctcagcccatgtacgctggttacccatcacatgtgcccacctacgcgcaggtgacgtacgcggttgaggaccgggagccgcccttcctgcgggaggaggtggaccgctttgtggcccgctgcttccctgagtccaagtgaaccagcagggagcagccggttgcccgctgcttcccctgctgaaaggagcactgctgcttgcgcactgcccagcataccacacgcttgctgtggctcagtgctgaggtcggcagcagccattgacgccgcacacctgccactctagcgacgggcctggcatattgggcgaggcaccccagctgccacgaagcagcagctgggggtcgcagttttgcaaagcttccacactgta

SEQ ID NO: 5775 - DNA, 293 bp, Chlorella sorokiniana
  unsure (1)..(293): unsure at all n locations; Clone ID: LIB3602-083-Q6-K6-A3
aggcccgcccggcggcgcggnagggccggctctccaagcgcgtgaagctggtgcgcgacattgtgcgcgaggtggcgggccaggcgccctatgagaagcgcatcatggagctgctcaaggttggcaaggacaagcgcgccctgaaggtggccaagcggaagctgggcacccacaagcgcggcaaggccaagcgcgaggagatggccggcctgctgcgcaagatggctgccaaggcgcacaagtaaacgcctgtgcagccacagcagcagcccgcagcagcccccatcgtggcg

SEQ ID NO: 5776 - DNA, 560 bp, Chlorella sorokiniana
  Clone ID: LIB3602-083-Q6-K6-A4
ggcctgccgggtgccctctgcattcgctgcatgacgagcacagaaaagcccgcaggcagcaacccagacctggttggcgccctgcagtggcaggcagcagcccataatcgttattggcggcaggcaggccgcagcccccaggcccaactgacctgctgcgacatttccccccctttctgcccgccccaggtgtacgatgactgagcgtagtccgcgtgggctgagcctaggcagcagctggccaaccctgttctagcgcccctcgagccgacgaagcttcatcgcagccgccggctgggatagcccgccgggctgccaggccgccgccccgccccaatccgcttggccaaacatccgatcctccttgaattcagcgcaatgagccagcttcagcagcagtgctcctcccccgtctgtccatgaggcctttttcggcgccctgctgttctgtctgtattccttcctctcttgtgcctcgccccctctccccgatatgtatcaggaactgagctgcttgatcccaattggttgctttgtggtccggtaacacagcggtagat

SEQ ID NO: 5777 - DNA, 507 bp, Chlorella sorokiniana
  unsure (1)..(507): unsure at all n locations; Clone ID: LIB3602-083-Q6-K6-A5
gtgctgtacgcggngnaagacttcaacctgcccaagcaccccgagnatgatgtgcccaacctggaggtcatcaagctcatgcagtccttcaagtccaaggagtatgtgaccgagcgctacgcctggcgccacttctactggttcctgaccgactctggcattgagtacctgcgcgagttcctgaacctgccctccgagatcgtgcccgccaccctcaagaagagcacgcgccccctggagcgcgagggcgcgcgcccgccccgccgcgacggccccccccgccgcttcggcgaccgcgagggctaccgctccgagaaggcgggcgcccccggcgagtaccgccccgagttccgcggcggcttcggccgtggcgccgccccccagtaagcgtccgcttcctggagcagcgccccctgggctcggcaggcggcggcgggtgcggcggccgcgaggagtggcagagtgtgcgtgccagctgcatgcaggctactgtaacctccgccgaca

SEQ ID NO: 5778 - DNA, 496 bp, Chlorella sorokiniana
  unsure (1)..(496): unsure at all n locations; Clone ID: LIB3602-083-Q6-K6-A7
tctgtcggcattgagccaagcagcccaactccgctatccgcaagtgcgcgcgtgtgcagctgatcaagaacggcaagaagattgcggcgttcgtgcccaacgacggctgcctcaacttcatcgaggagaacgacgaggtgctcatcgccggtttcggccgccgcggccacgccgtgggtgatatccccggcgtgcgcttcaaggtggtgaaggtgtccggtgtgtccctgctggcgctcttccgcggcaagaaggagaagccccggaactaaacggcccgcgcccagcagcggcagcagcggcgcgcctcggcaacggggggcgccgcgtccgccagcactgcacctgcctggcggcggcttgggagggcgtgcagcgcatgcagcgtgcaccgccgcggccctcccgatagtttaggaccccacaaccagctccctctgctcccactactgatgtaacacgcaactgccnnnnnaaaaaannnnnctnnnnnnna

SEQ ID NO: 5779 - DNA, 508 bp, Chlorella sorokiniana
  unsure (1)..(508): unsure at all n locations; Clone ID: LIB3602-083-Q6-K6-A8
gtaggcgggaacacagtcggtcgtgaaaacgcgcctccccacatggccggcgagcgtgtgcggctctacgtcacgggccagttcctgggctacaagaggagcaaggccaaccagtacaaccacaccgcgctggtgaaggttgagggcgtgaacagcaaggaggagaccgagttctacctcggcaagcgcctggcgtacgtgtacaaggcgaagaccgagaagaagggcagcaagtaccgcgtgatctggggcaaggtgacccgcgcccacggcagcgtcggcaccatccgggccaagttccagaagaacctgccccctgcggccatcggcagcaagatccgcgtgatgctgtacccctcccgcgtgtgagggtcggttgcttcccggagcagcagcggtgcggcacggcgcggcggtgacgagtcgtggcagtgcgaccccgctcggcacggccgcccgggtggcgccgccgtcgcctccatgtaacccttgattagccaaaanaaaa

SEQ ID NO: 5780 - DNA, 272 bp, Chlorella sorokiniana
  unsure (1)..(272): unsure at all n locations; Clone ID: LIB3602-083-Q6-K6-A9
ttttccagcgtccgccacccgccacctnncctgccgctcaccgccgcacatcctacctcccacacctcactccatgtccacccttcacccgcgcttcacacagcggctgctgccatgcaaagctgctgccaaacccatccatcatgctcgcacacccactcacccacacgtccaacgtatccagacccattttcaaggcccgactgtacagtgcctttttgcgtccttatgccgatctggtaccaggacttaatgtgtaacaaatggtntgt

SEQ ID NO: 5781 - DNA, 211 bp, Chlorella sorokiniana
  Clone ID: LIB3602-083-Q6-K6-B1
ctttgcattccttggctcggggcggcgactggtggcgggccctccggccgtgcctgcctgccgccccgcagcgcaccctcactcaccccacttcacccctgagaagaaatcaactgcccaactcttgttttgttgccgctcctacgcttccgtgtgcctcttgtatgggataattgctgctacactcctgacagtgtaactctccgctgcc

SEQ ID NO: 5782 - DNA, 593 bp, Chlorella sorokiniana
  unsure (1)..(593): unsure at all n locations; Clone ID: LIB3602-083-Q6-K6-B2
gcgttcggctgggnaaacctgcagcggcggccagcagaaacctgagcgcgctgaccagtggcatgagcctgaccctcaacccctgcaagccagctggcaagcgaaggatgcgccagagggaggcacaattgaacagattgaaaagattgtgcacgtgcggcagccgggcagcctggagatgcggcagcgcagcgtgcgccagctgtcgggcggcgagcggcggcgggtggcgctcgccctggcgctcggcttcagcgagctggctgcccagcgcgggcgcctgcgcagcaacctggtagtgctcgacgaggtgatgcagcacttagatggcgagggctgcctccgcgtcgcacagctgctgaagcagcttccctacagcagcgtgctggtggtcgcgcaggcgcactccctgcaaacccaggtgtttgacgcgactgatgtcgtggtgaagagcggcgggtgctcaacagtggagcagggcagcagcgcggccgtcagctgacgggcatgggaagcgcttgcagctgtggcgccggggagtgaattaggaagtttcggcgcggtgtgatcgtgctgctgcacactctcgctcg

SEQ ID NO: 5783 - DNA, 528 bp, Chlorella sorokiniana
  unsure (1)..(528): unsure at all n locations; Clone ID: LIB3602-083-Q6-K6-B3
tcggctggntgcgctgttcgagagctgttcagggtgctgaagacctgttcatcatctgggctgatgcagttggatgctgctccactctcgcgacgtcgttttcagggagaaatttccactgttgttccctgggcttcggctgctgagcaagttcgtgcatctcatcagtatcgagtacatggaggacattgcagcagagcttcgactgctgctgcgcagcagtgcgctgccaccccaggaacgcctgcgtgtgctgctcaccgcggtgaatattgtgcagcagcagggtgggaccgtagtagccgagcatgacggcttctactcggagctgtacgccgcactgaagcacatcatgttggtgccgctgctggagggttcgccgncgcgcagcagtagtggcgctgctgggccggaaccttgcgtggtggaatggttcagcggcgctgctgcggctgctcaggctcatgccgactgccttgttgtccatgtgtcctgcctggcctgccaggctctggggccgcttttgct

SEQ ID NO: 5784 - DNA, 591 bp, Chlorella sorokiniana
  Clone ID: LIB3602-083-Q6-K6-B4
tggagactgccgtttgcatgttgcagaggagaaccgtgccggaaagccagacctgcattgtttcactcagttggccctgctcacccagctgaccttaggcatgctccccgctcccctgctgcccattctctccagatgcacgacggcccggtgcgcatgctggccaagggcacgctgcgcggcatcgtgccctggcgccaggcccgcgcctttttcgccgcacgcctgcgccgccggctcactgaggaggcgctggtcaagcacattgcgggtgggtgggctgtgcgtttgcataattggcagaggccatatcctgcaatgagaaacttggggcttgatgcctctgcgagtgtgatatcaaggccatcttgacagccgtcaccttgtcactcacaacacctctccctgacccccctcctcctgcccccacagccgcggacgagagcgtgagccggcatcaggcgctgcgcctgctgcggtcctggtacctgtccacatcagacagcacggcgtgcgccctggccgacagcagcggcgacagcctggcctccgccctggcgcccgcgggtctggaagacagcagtgccactg

SEQ ID NO: 5785 - DNA, 465 bp, Chlorella sorokiniana
  unsure (1)..(465): unsure at all n locations; Clone ID: LIB3602-083-Q6-K6-B5
cgccccagccccttctttccagctgctcttgccgctgcgtgtctgcattacgtccgtgcccatagcactgttttgtttgcccctcacgctcgtctgccgctacagcctgccgctgccgttgctcatcccaactgaccccccctctgacctagccgctcaacgccgccggcgacaggtagggctggcaccagcaacatcctgtttctgctctccactcgtctagctgtcctgaactggtgcatgcttggcacatgtagccttgctgcatgcagcacctggtgtgttggcagtcttgtaatgtgctgctcgcaaaaaaaaaaaaaaaaaaaaaaaaaaaaaaaaaaaaaaaaaaaaaaaaaaaaaaaaaaaaaaaaaaaannnnnggncgcncgaaaaaaaaaaaaccaaccttactttcgcgtgaaagcaaaaataattgcttttgtgtggtgtcacttaaattca

SEQ ID NO: 5786 - DNA, 494 bp, Chlorella sorokiniana
  Clone ID: LIB3602-083-Q6-K6-B6
ccccggcgactgcgtcgtcgcgctgcaccgcatcggcaacgccagcgtcatcaagcttgtggatattgccggcaacaagtaaacatgctcattcatggagccgccgccgccgcagctgtcggcgccacccagccagcttgaagcggcagggcagcgccacggcagctgcctgttctgagggccgctgcagcagctgacttcctgctgcgttgcagcaccccccatggcctgttcactcgtgcctgagagcgtgtcattttattgcagcaccgcacccgttcatttgccgtctgtgtgtacctgtcccgtgccccgctgtgcccccctgccttccatgcaaattcctgctcgctttccccgctcggcgccccctcccgcccctctgcgtggtcccattcccctctgctatgcctcccgccctgtgtcgcacactgcatatgcgcccctgcctggccagctcagcaacacgtcctgtaactgcctttttgcctgac

SEQ ID NO: 5787 - DNA, 606 bp, Chlorella sorokiniana
  Clone ID: LIB3602-083-Q6-K6-B7
ggggcgaggagcaggagcccgcagcatggccgctcagctgggcttccgcgcgagtggcttcatcggcagtggccgggcgattcagccgcggcggcaggtggcggcgccatgccgagcaatgccggtgcaggcggccgtgattggccctggcaagaagtgggagcacactgagacgaaccagaacggcaagccggtgcgcgtgtccatgcacgtgcggaagggcgacaccgtgaaggtgattgccggcggcgacaagggcaaggtgggcacggtgctggacatcaacaccaagcgcggcgaggtggtggtcgagggtgtgaacatcaagaccaagcacgtgaagccggcggcgcagggcgaggagggccagattctgaagaaggagttccctgtgcaccactccaacgtggcggtctactccacggcgcagcagacgcactcccgcgtgggcttcaaggtggtggacggcaagaaggttcgctacctgaagaagacgggcgaggtccttcctgagcggctgcctgagaagaaggctgagtaggggccacgttgggccacacgcgcagggcacattgctcctggctggcccaatcccatcacctgctg

SEQ ID NO: 5788 - DNA, 306 bp, Chlorella sorokiniana
  unsure (1)..(306): unsure at all n locations; Clone ID: LIB3602-083-Q6-K6-B8
gncctcgcgaaaggctcaagtactcactgctgtcattccacccctgcttcacccctgcagttcctgcccctggcctgaacgccgtcgtcaacctggagcgacctgggcatcccatattaacggcggccagccggttttggacaagcacacacaacatatgagattcccaacctccctgcgcactgcttgtaacaatcctggctccctcttgtacccttgacccgcactcgggcgtggatatgtaacgttccgcgggaaaaaaaaaaaaaaaaaaaaaaaaaaaaaaaagggcggacgatataaaaa

SEQ ID NO: 5789 - DNA, 440 bp, Chlorella sorokiniana
  unsure (1)..(440): unsure at all n locations; Clone ID: LIB3602-083-Q6-K6-B9
gtttngaagtagacggcgcggcggcacggctgccgccccccttgcgccccctccccctctgccgggccaacctctctctgttcaccttggcgccccgctgccaccacctcccaccttgttgagcgcagcaggccctcttactctccttctctccctccgcccgcccccagcattggcatgctattcaccacaattgaacccatgtgttcccgcatttcattccggtttagtcgcactgcagcacgaaaccacgacagctgctgttgggttgccctccggcacgcctcccccctatcaaccaaatgcactctgattcaaacggcccccctcagtacacacacaggggccacccgtctccctctgtctgcgcactcctccccccactgcccttgtactgctgcccttgcgggcaccgcctgtaagagccggacctcannnna

SEQ ID NO: 5790 - DNA, 480 bp, Chlorella sorokiniana
  unsure (1)..(480): unsure at all n locations; Clone ID: LIB3602-083-Q6-K6-C1
gccagcccagccagcccagcccagcccaagcggccagccagcgccgcagctgtgcaagcccggacggcacaagcggccggcagattaggcagcgcagctgggcaggcagcgggcagcttgatgcgcctgtgaacaaccaccctgctgcaagccagccctctggcagactgcgccagcagcagcctagccgccttcgggtgttcagccgaacggtgggggtcgagcgccggcacgtgccggccgccttgcctctttgaaacttgaatccttgccgcgcagcatcacactgtttctacctgcttcctctctgcattttatgtgccgcaacactccgctggccttttcttttgatccttgatctttccgtgctgcgcccaccgaggcgcccgccgnccgtncccgcccgacccatcccgggccttccccgcccgctttgcggcctgcccagcgcggcccgcattgcatgtaacgctgttgcgt

SEQ ID NO: 5791 - DNA, 70 bp, Chlorella sorokiniana
  unsure (1)..(70): unsure at all n locations; Clone ID: LIB3602-083-Q6-K6-C12
cgcccccagctgcccgcctcatggtcggcaggcgacctcaggggnagcgtgacgggcagctgctggcggc

SEQ ID NO: 5792 - DNA, 599 bp, Chlorella sorokiniana
  unsure (1)..(599): unsure at all n locations; Clone ID: LIB3602-083-Q6-K6-C2
gcgttcgcccaccaagngttcttcaccgacctctaccactacaccatcatcgatgcccccggccatcgcgatttcatcaagaacatgatttccggcgctgcccaggccgacgtgtgcctgctcatggtgcccgccgacggtaacttcaccaccgccatccagaagggcgaccacaaggcgggtgagatccagggccagacccgccagcacgcgcgcctgctcaacctgctgggcgtgaagcagctgattgtgggcgtgaacaagatggactctgacaccgccggctacaaggaggagcgctacaacgagatcaaggacgagatgaagcacatgctggtgcgcgtgggctggaagcccgactttgtggagaagtcggtgcccgtcctgcccatctccggctggatgggtgacaacctgatcaagaagaccgagaacatgggctggtggaagggtgtggacgctgtcgccgccgacaactccaccgtgcacatcgacaccctgctggacgcgctgaacaactacgtgaaggtgcctgagcgcaagaccgacgcggccctgcgcctgcccatctccggcatctacaagatcaagggtgtggg

SEQ ID NO: 5793 - DNA, 581 bp, Chlorella sorokiniana
  unsure (1)..(581): unsure at all n locations; Clone ID: LIB3602-083-Q6-K6-C4
cgatactgctggagcaagtgaacaccccaacggcgacggatacgtgtggatgattgaccactggtgtcacaagcagaagtcctggctgggctacccctgggaccttgactactgcaaggactaccaccacgactaccccagctactcgaagtgcgactggtgcagcgactgcactgaccagtactgcgactcctcgagcggtggcaatggcggcaacggcggcaatggcggcaatgccaacggcgacaattcgaccggcggcgatggcggcaacggtggcaatggaggcaatgccaacggcgacaatgccaccggtggcgatggtggcaacggcggcaatggcggcaacgccaatggcgacaactcgaccggcggcgatggcggcaacggcggcaacggcggcaatgccaatggtgacaatgccactggtggtgacggcggcaatggcggcaatggtggcaatgccaatagcgacaactcgaccggcggtgacggtggcaacggcggcaacggcggcaatgccaacggtgacaactctactggtggcaacggcggcngcggcggcaacggcggcaatgcca

SEQ ID NO: 5794 - DNA, 306 bp, Chlorella sorokiniana
  Clone ID: LIB3602-083-Q6-K6-C5
ctcacagctgacgtgctgcacacgggcgactgaccagggctcccagctggctgcgttttattctatccacttgctacctgtccagccgtaccagcttagtactgctacgggtccctatttttccatctgttttgcatgttatgaagtctttcaaaaaaaaaaaaaaaaaaaaaaaaaaaaaaaaaaaaaaaaaaaaaaaaaaaaaaaaaaaaaaaaaaaaaaaaaaaaaaaaaaaaaaaaaaaaaaaaaaagacaggaaaaaaaaaaaaaaaaaaagattaccaaaaaggaaaaattaaaaggaaa

SEQ ID NO: 5795 - DNA, 566 bp, Chlorella sorokiniana
  unsure (1)..(566): unsure at all n locations; Clone ID: LIB3602-083-Q6-K6-C6
tccgctccacacccgcagtggctggagactgtggaccccacccccgccaacgagttccccttnctggaggtgctggctgctggtggtgccgccggcctggcgggctccttcgtgtcctgcccttctgagcacattcgtactaagatgcagctgcagcgccgcgcggcactggctgcgcagatgggcttgaaggcgcagggcctggagacctacaagggcagctgggactgcgcggtgcagatcctgcgcaaccacggcgtcaagggcctgtaccgcggcatgacctccaccgtgctgcgcgacatccagggctacgcctggttcttcctgtgctacgaggccacgctgcacgcgctggcaggccccgcgcaccagcgccaggagctggactacaagcacgtgctgggcgcgggcgtgatggccggcttcggcctctggggctccatgttccccatcgacaccatcaagtccaagatgcagggcgactcgctgtccaacccgcagtaccgcaacaccatggactgcctgcgccagtccgtggcggtggagggctggggcggcctgtt

SEQ ID NO: 5796 - DNA, 593 bp, Chlorella sorokiniana
  Clone ID: LIB3602-083-Q6-K6-C7
cggccgcgtgggcgcaccggctccaagtcagcgccaccagcccgcacaacctggagctctacatctacctgctgtccaggctcaccaggggcgagaccaaccgcaacttctatctgctcaacaagactgacgccatggtgggcgaccggaccagcgacccatctcaccctgccgactggtggcgcgcccagaaccaccgcggcatggcgctggatgccgacgggcgctgggactacctgcctcaaaagacccagcagctgggcgcggcagtggcggctgctccggcaaaagtggcggctggggccgctcaagcgaaggcgcaggcgtgagggatttgattgcactgctgccgccggccactgactggctggtgggaggaagtatggccgcggcggccgcatacgaattgccccccaacgctgctgtcctgttggctcgctgttgatccgcaaatcttatcctaagctgtgcttggcctgcgttgccacagttagcgcattcctgtgtgatcggttgtcatgctattaatatgagatgcactgtacttgcccactgccgaagcaagacccattgctgcaccgcttttaccaccc

SEQ ID NO: 5797 - DNA, 237 bp, Chlorella sorokiniana
  Clone ID: LIB3602-083-Q6-K6-C8
cctgggcatcccatattaacggcggccagccggttttggacaagcacacacaacatatgagattcccaacctccctgcgcactgcttgtaacaatcctggctccctcttgtacccttgacccgcactcgggcgtggatatgtaacgttccgcgggaaaaaaaaaaaaaaaaaaaaaaaaaaaaaaaaaaaaaaaaaaaaaaaaagaaaggacgatctaaaaggaaccaaactaacta

SEQ ID NO: 5798 - DNA, 526 bp, Chlorella sorokiniana
  unsure (1)..(526): unsure at all n locations; Clone ID: LIB3602-083-Q6-K6-C9
gnccgccatcgcttctggcctcaccgccaagtgcagcggcggcaggctgcggcccccgtggcccgcacccgcaccaccaccaaggcgctggccgacgtgaacctggtggtcggcggctgcaccgtgggcgccctggcgctgggccgctttgtgttcctgcccttccaccgcgcctccctggccaaggcgggcatgcccaagcagaacggcatgacccacctgcaggctggcgatgctcgcgctgaagaggcgtctttcattctaaagaccaacgaccccgccggcttcaccgtcgtggacgtcatggcctggggcgccctgggccacgctgccgccttctacatcctcgcaacctccagcctgggcctcgaccgcaaccccttctaaaccagtccacggccgcagcctgcgcccaggccacaaccccatcccgagaagagcatttgtccggcgctgtgcctttttctgttgggcatggcgactgcagccacgcatgtgatactgctatgtaaacgaccgcttgtac

SEQ ID NO: 5799 - DNA, 439 bp, Chlorella sorokiniana
  Clone ID: LIB3602-083-Q6-K6-D1
aaaaaaaaaaaaaaaaaaaaaaaaaaaaaaaaaaaaaaaaaaaaaaaaaaaaaaaaaaaaaaaaaaaaaaaaaaaaaaaaaaaaaaaaaaaaaaaaaaaaaaaaaaaaaaaaaaaaaaaaaaaaaaaaaaaggaaaaaaaataaaaaaaatacaaattttaaaaaagaaaaaaaaaaaaaaaaaaaggggggttttttaatgtagaaaaaaaaaatttttttgggcggttgttttaaaattgcttttttggaaaaccccggtttttaccaaatttagggccttttgaaaaaatcccgttttggccaatgggggggttcacaaaaggggttggccgtggggatttccccttttttcccaatttagttgggaaaatggtaccccccctttctggcttttttaatggttgggtagtgggattttcctcgttttttccccttt

SEQ ID NO: 5800 - DNA, 451 bp, Chlorella sorokiniana
  unsure (1)..(451): unsure at all n locations; Clone ID: LIB3602-083-Q6-K6-D3
gcgtttcggggcagnatcaatccctggnacaggactacctgttctccctggcggtgaaggagtaccagattgtggacttcttcctgggcggctccctcaagnacgaggtgatgaagatcatgcccgtgcagaagcagacccgtgccggtcagcgcacccgcttcaaggcgtttgtggtggtgggcgactacaacggccactgcggcctgggcgtgaagtgcgccaaggaggtggccaccgccatccgcggcgccttcatcctggccaagatggccactgtgccggtgcgccgcggcttctggggtttcatgatcggcatggtgcacaccgtgccctccatggtctccggcgtgtgcggctgcgtgtccgtgcggctgttccccgccccccgcggtgccggctttgtggcggcccgcgcccccctgtaggtgctgctgctggctggtcttgt

SEQ ID NO: 5801 - DNA, 324 bp, Chlorella sorokiniana
  Clone ID: LIB3602-083-Q6-K6-D4
gcaagggccctgggtctgagcaacaacacaacaagcacgcgccctgcggcgccagcctgttggccagccagctggcacgagagcagcggtactgtgggcccgccgggacgggcagcacgcccacccatgtggcggcccctgagcagttttgacatcgttccaccatttacagagcacactagcagtcggcatctctcccttattttcctgctgcggcggggcaggcgataatgcggctgatcctgctggttttcgcagttacatgcagcgatacgtactgtaatgctgcccatgctaaaaaaaaaaaaaaaaaacaaaacagaa

SEQ ID NO: 5802 - DNA, 394 bp, Chlorella sorokiniana
  unsure (1)..(394): unsure at all n locations; Clone ID: LIB3602-083-Q6-K6-D6
gcacccccgcgcgtttgcggtgcactcgccgcacccccgcgcccgcacctggnaggtcacccacaagaccggcctgtgggaccagctggccgagatttacgaccaggccaaggagggcatgttccagggcacctacctgcccgtctccatgtactcgtgcgggggccacacagcgggcccgctgatgcgccagcggccaaccttcctgtcggcaacggcgtagcggcaccccgcctcttcaagcctttgattcatcgtggccgcccgaccggtcagctagcctcagcctgcttatctctattcaaactcaaactcgagcctcaaactgatacgtgatgtatgtaagaataagagcgccaaataaaaaaaaaaaaaaaaaaataaaaaaaaatag

SEQ ID NO: 5803 - DNA, 604 bp, Chlorella sorokiniana
  unsure (1)..(604): unsure at all n locations; Clone ID: LIB3602-083-Q6-K6-D7
gngaccggngccggcagttgctatggaggcggacgagggcgaggccgacgtcgctgctcgggcggcggcaagcgaggaggcagacctggtgtttgtggtgacagaggatggcgcggccgagctgattgaggaggacaaggcagcagcagcagtagccgaagttgctgcgcccccttccccgcctgcactggatgccgaggcggcggcggcagcagaggagacactgacggcactctctgctgaggcattggcagatgcgctccccgagccggcgcccaagccggcgacgcccacagcaagcgagcctgagatcgtgcctgcgccacgcacgccggcggcaagcattgtgggaggcatgcgggtggcggcagcgagccccaagaagaagaagcgcaacccgatgcacaaggtgcagaagatgctgggcctcaagccctctggggcatccagcagcaagtcccgccgctgagcctcagcagcggggcggaaggcaggcccttgcaggcagcctgccaggctccacaagcaagcagtgtgcagctctggtgcccctgccaccaaaagcagcacgaatgttgccgactcgtgttggttttggccggcg

SEQ ID NO: 5804 - DNA, 540 bp, Chlorella sorokiniana
  unsure (1)..(540): unsure at all n locations; Clone ID: LIB3602-083-Q6-K6-D8
cctgataaaacctanagcagtgtgactgccgcccctctgcctgccgtggcaggggcggcacgcctgcctcgccattccttgtttgtttgttccctgttcccgtctgcccgccagcaattctgttccgagtgttctcccatgcccgccccctttttcgtgggggccgggctgccagttttcggcactgttttcacccgagagccgcaatttcgctgacgcaccaccactgccctgtaaacacactacctgtnaaaaaaaaaaaaaaaaaaaaaaaaaaaaaaaaaaaaaaaaaaaaaaaaaaaaaaaaaaaaaaaaaaaaaaaaaaaaaaaaaaaaaaaaaaaaaaaaaaaaaaaaaaaaaaaaaaaaaaaaaaggggggggccgcttttaaagaaccaaattttacttccccgtgtttgaaaattaaaattttttttttggggcccccaaaataaaataaacggcccgggttttaaaaacgtgggactgggaaaaaccttgggttccccaaattaaatccctttgaaaaaaatccctttt

SEQ ID NO: 5805 - DNA, 581 bp, Chlorella sorokiniana
  unsure (1)..(581): unsure at all n locations; Clone ID: LIB3602-083-Q6-K6-D9
ggngngcggcggtgtggggcacggcatcggcgcggacgcgccccaggcagtgcccgcctcgcctccagactacatcgaagagccagacgatgaacccatcattgaggagcctcccgaggtctcggcggcagcccgggtccgcggctttggggcgcagggccggcccgccagccggccgctgccagcggcggcgcgcccgcgcagcaccccgatcgagatcctggacgacgacgacgatgacagtcaagtgctggccagcagcctggggcggcggcgaccggggcgcgtggaggaggtggcagacgacgagcacatgcacccggttggatcagtggaggatgaactgggcggcgcggccgccatggggcggcgcgtgcgccgcaaccggcggcggctggcgggcgaggttgaccgcgatttggagctgctgggccagcggtttggcgtgatggatgagttccagcccgcccccacggcgcagcagcaccaggcgcagcagcagcagcagcgggacgacgatgaggacttcgccgacctgccagcggatgtggacctggaggagcagcgcatgctgatggcgg

SEQ ID NO: 5806 - DNA, 541 bp, Chlorella sorokiniana
  unsure (1)..(541): unsure at all n locations; Clone ID: LIB3602-083-Q6-K6-E1
gcgtggggcatacagacggggctgagtgcgngagtgatcccgctctcccggctgcatggagccgcagtagtgtgcctggttggcatcggcaaaccagagaacgtggcgcggcagctgcagcggctgggagcggcgcacatagagggctgcggcacgtacgacgatcaccacatgttcagcttggaggagctgcaggcagccatagggcgggcagaggagctgcagcgcagcgggcagtaccgccatgtgtgcctggtgatgaccgaaaaggactatgcgcggcaaaccgacctgttcgacgcagtgttcagccagcaggcggccagccccagcagcagcagcggcgaggaggggagcagcgggtggggcgcctacgtgctgcaggcgcggctggaggtggtggagcacgacaggcggttcagcagccagaccgcgacgcttaacgccctgctgcggctggcagtcgacaacttcaggcggggcagctacctgtctgtcggatgatggctgggctggccttcctgctgctgcattggtctcg

SEQ ID NO: 5807 - DNA, 463 bp, Chlorella sorokiniana
  Clone ID: LIB3602-083-Q6-K6-E2
ggcaagcgcacgcggcgcgccgcaagcacgcgcgcgcgtaagcagcccgccacccgcgcagcagcattgttgaccactgttgttaccctgcgtctgggcccgctgtgggcagcgctggggtggtgcccaccctagcgtgtctcgcagcggcgccgcccattgttgtacagtgccgaacgtctgcccttgcggcgtcggtgcctgtctcgtgccagcaacccccctcgtgctgtcgcattttccattctctacaaagcagtttcatgaacccaccctgccaaattgctttctttggatgccgcacatggcgtgtgtgcctgcacgtctgtgcgtgccggcgcgccgccctgcacagcctgcccgcttgacctgcccttgcctctgctgctcagccccgaagcccggcagattttcctcgtcagcggctcgggcccgcacctctcaacactgtaaagacccctcg

SEQ ID NO: 5808 - DNA, 456 bp, Chlorella sorokiniana
  unsure (1)..(456): unsure at all n locations; Clone ID: LIB3602-083-Q6-K6-E3
tcggtgtcaaggccggcgccgnagatcttcggcgacgacggcatccagtacctgggcatccccggcctgatcaacgccaagtccatcgtggcgaccctgatcgtgcaggtggtgctcatgtcgtatgttgagggctaccgcgtcaacggcggcccggccggcnccggcctggacgctgtggtgggggggggcaacttcgaccccctgggcctggctgacgaccccggcgccctggctgagctgaaggtgaaggagatcaagaacggccgccttgccttgctgtcnctgttcggcttcttnctccaggccctcgtgaccggcgtgggccccttcttgaacctgaacgaccacctggctggcgcctcggctttcatcttctacgccctgttcgcccagttcctggcttttgcgcttgtcgttcgaacgtgcgaggccctcgcgcggttgtgcgcccct

SEQ ID NO: 5809 - DNA, 606 bp, Chlorella sorokiniana
  unsure (1)..(606): unsure at all n locations; Clone ID: LIB3602-083-Q6-K6-E4
ggngcatgcgcagnaacgcggcgccaccatccttgcagagtacctcggcggcgcggtgacgtgcgacgcgcaccacatgaccgaccctcaccctgagggcctgggcgtgtccacctgcattgagctggcgctcaaggatagcggcgtcgagcgggatgaggtcaactacatcaacgctcacgccaccagcacccttgtgggcgacaaggcggaggtgaaggccatccgcaaggtgttcaatgacctgtcccatgtcaagatgaacgccaccaagtccatgatcgggcactgcctgggcgcggccggcggcatggaggccattgccaccatccaggccatccgcaccggctgggtgcaccccaccatcaaccacgagaacccgatcgaggaggttgcgggcatcgacgtggtcgccaacgtgaagcagcagcacaacatcaccgcgggcatctccaacagctttggctttggcggccacaactcggtggtggtgtttgccccctacaaggcgtgattcgcacatttgcttcttcaagttgtgacgggctgcggcgccgcaccttgtgcacctcgctgcccggttgccctgagctgactctgaacata

SEQ ID NO: 5810 - DNA, 464 bp, Chlorella sorokiniana
  unsure (1)..(464): unsure at all n locations; Clone ID: LIB3602-083-Q6-K6-E5
ctagttctagnacgcgggcggccgctcgcgatctagaaccgcagccatttatgaattggttgaccaagtacgctctctgattcctctattctgcgcacttcccctaagtaccgcttttgactcatttccacctgtcacaacagccgtactagtctccctgcctgtctctcatctttctcattcttcatccccagttcatcgcgctacgtggcgaggcgcgcaacacataaagtgttgcacgcacgtgagctgaatagcgacctcagcggtaaatagtaactataaaaaaaaaaaaaaaaaaaaaaaaaaaaaaaaaaaaaaaaaaaaaaaaaaaaaaaaaaaaaaaaaataaaaaaaaaaacaagcttccttcataaaggggccggcctttttaaagggtccaagctaacaaccaatgtcttttaaagtgtcacctatttttatagggtcgccaaaggtaaaac

SEQ ID NO: 5811 - DNA, 494 bp, Chlorella sorokiniana
  Clone ID: LIB3602-083-Q6-K6-E6
gccgaaaaatgcttacagtcggcattgatcgctcggcagggcatcgctcatcaaacggagatgttgagggcaggcgtatcattggtaggggcgttcaaaggcaggggttgcatgcaacgaaattggaggatacacgtgaccaggattgggagggattggtgcaggccccaggttggcggccctcaaggcaaggcagccagcaggcaggggcagagggccggctgggaggcaaggaaaagcgggcttacttgggagcctgaagcggaaggcagcgggtacaacagagccgggaaaagcagccgggaaaacttggcagcgagcgaggggctagtaaagcacagggggcgctatggcaggccggcgggtgggcagttgcgctaagggcggctggcctggctggcgtggcaggctcacggcatcgcaggcgcccagggcgctgcattggcacggggcatggccagcacgcctgccgcattggcggcgttgacccccgt

SEQ ID NO: 5812 - DNA, 515 bp, Chlorella sorokiniana
  unsure (1)..(515): unsure at all n locations; Clone ID: LIB3602-083-Q6-K6-E7
ggctggggcaccaccctggnagcgctgcagaagctgaaccccgatgtgaagaaccccgacctcatccagcccggcaccgagatcaagctgaaggagtgctaagctgagcagctcacgtgagcagcacccgcgcaccacagcttgatcagctgtggactcaaaggatgtgatgcgcccgaccgccagcagcccgcccatttgcggcgctgtgcggctgcaccgcagacacatggaatgcaccctcccacatcccctctctccgcacatggggcggggcagctgtgccgccccctctgatttgctctgaactacacgatttgtcgtgacgcctcccctctgctcccccctcccatgcccacccgccccgccgccatttcacggcaggaacctgtgcgccattcctcaccaccctctgcacacccgatctgtcctccctcagccatggcccacccctccctgactctcgctgcattttgcatcagcttcacctgcacattgcaacatgaggcatcccc

SEQ ID NO: 5813 - DNA, 582 bp, Chlorella sorokiniana
  Clone ID: LIB3602-083-Q6-K6-E8
tgccgcgcaggcagccaccctgctgctcgccctgctgcgcgacctacgtggcgagctgcgcgctgcgtgccgggcagcagtgacagcgcagcagctgcgggcggcggcggcggcggtggagcggcggggcgacatggatgcggcagaggtggcgcggctgctgcgtgcggctgctgcgctggtgtgagggtgcaggttcactgttgttgatttagttgtgtttattggtctgtaatgctgacttgttaaaaaaaaaaaaaaaaaaaaaaaaaaaaaaaaaaaaaaaaaaaaaaaaaaaaaaaaaaaaaaaaaaaaaaaaaaaaaaaaaaaaaaaaaaaaaaaaaaaaaaaaaaaaaaaaaaaaaggggggggccgttttaaagaaccaaattttacttccccgggcttgcaaagaaaaagtttttttttggggcccccaaaattaaattaacgggccggggtttaaaaacgtgggaacgggaaaaaccctggggtccccaaattaaatcgctttgaaaaaaatccccttttcgccagtggggtaaaaaccaaaaaggcccccaccaatcgcctttccaaaaa

SEQ ID NO: 5814 - DNA, 519 bp, Chlorella sorokiniana
  unsure (1)..(519): unsure at all n locations; Clone ID: LIB3602-083-Q6-K6-E9
ggtaagcgccgcggtacgcgcgaggcgcgcctgcccaccaanatcctgtggatccgccgcatgcgcgtgctgcgccgcctgctcaagaagtaccgggacagcaagaagattgaccgccacctgtaccacgagctctacctcaaggtgaagggtaacgtgtacaagaacaagcgcgtgctcatggaggccatccacaagcagaaggcggagaagatccgcgagaagaacattgcggaccagctggaggcgcggcgcgccaagaacaaggcggcgcgcgagcgcaaggcggcccgccgcgaggagcgcttcgcgcagggcgtgaccgccgccaccgagagccagaagtaagcggctccgtctcggcggcagagccgcgggggcggnggncgacgcagngngctccccccgccgccgcgcgttgntcttgccgcttgcnggctgggcggccggccgcggggcngccccgccctggactctgtgttttgttcgcgcccgctgggcctcctgcgccggcgcccg

SEQ ID NO: 5815 - DNA, 578 bp, Chlorella sorokiniana
  Clone ID: LIB3602-083-Q6-K6-F2
ggctatcctcccgcacccagttacaacaacccccgacccgcacggtccttcccgacgtgcttgcgtcgcgcgttcccggctggtagcgccagtgtaggcggctcagggattgcatgggtgatgccggcggcccgtttgtggcaccgccgccgccaccgccgccgccaccaccggctgccggtgcgcgccttagggcaagccgtttctggctcctcatgttgtcggtattgtgcctcccctttgcgttgttcaacacagcggctaccatgatggaggatccagcgctgccgcggcaccatcttacagtcaggctgcattcggcacagttggacacgccagcaccgctgcttgagcggcaggagcagcagcagcagctggtgtgcgtggcggagattgagcggtttgggcggctgcgcgctgaggcctgcgcaagcagcagcgcggaggccatcctctgcgagtttgaggaggaatttgagtttgtggtcagccctactttccggtcgcagcacctgaagctggtgctgtttgcgctgccagagcaggggcagcagtccgtggcgggcgggaagcttggg

SEQ ID NO: 5816 - DNA, 441 bp, Chlorella sorokiniana
  unsure (1)..(441): unsure at all n locations; Clone ID: LIB3602-083-Q6-K6-F3
ccggtttgacccagctttttgggggctcgntcttgtcaacaccgtgcgggggctggtcatgactgtgattgcctggcggttcnnacttcctcgagaggccgcctttgccctggcgcgtgctgcatcgcacgcaggcacaggcggcgggggcggctgcctgcggctgccgttgctggtggggcgcncctgcgagcgggtgggggcgggcttgctgctggtcccggccggccttgttggagagggggagctgctgcttctgcctggggcttggtcgagggcggtcgcgcgctcttgcgtggttggctcggggcctggggcgcagcgggggcggccgcgtgcggtgtctgttggcgtggtgctggcgtctcctctggcggcttgtcggctccggtgttgttcctgctgctgtgcctggtcgcccctgccttgcgtgcctctgct

SEQ ID NO: 5817 - DNA, 480 bp, Chlorella sorokiniana
  Clone ID: LIB3602-083-Q6-K6-F4
gcgcggctcacgctctgcccctccagaaaactgtcgccaggagcggctcagcacagaaggagattgaatgggtgaacgcttaccaccagcaggtctgggattcgctgtccccccggctggcgggcgaggaggaggagctggcctggctcaaggaggccacctcacctttgcgaacttgaagcgtgtgaatggctgctgccaactgcctggcgtcattcggccagcagcagagctggcctggctcaacgaggccacctcgccgctgcgaaacacgtgccaattgccgctcaacatggtagccagctgaccgtaacagtgccgctttgtaccaacaaccagcagcctacctgctgctgctgctgctgctgctgctgctgctgagtcgcccgatttctttcatctgtttcctcagctcgccacttgtaccctgaatccacactcgattacatcagttgctctgtgcgaatgccaaacttgcca

SEQ ID NO: 5818 - DNA, 536 bp, Chlorella sorokiniana
  Clone ID: LIB3602-083-Q6-K6-F5
aaaaaaaaaaaaaaaaaaaaaaaaggggagaaaaaaaaaaaaaaaaaaaaaaaaaaaaaaaaagaaaaaaaaaaaaaaggcaagaaccatccaaaagaaacaaaaatttctatgggggcccttgaaaaagaattaactttttcttatggggggcgctgctttttattgggttgaccctttggttttcccggggggggggcggcttgaaccccttttttttccccgccctgttgggctttgttgcggggccggcctttaccccactgggctgtgggacaaatccggcccttctcccctgctgctttttctcgcgcgggtggccccccctttttcccccttggggacccgtcgtgggggggccctttacgcccgcttcttccgtgggtcccccccttcgggccggtttcgcttccccccctctttggcccccttctttcgggggtgtgccgttttttccccgcctgttgggctgcttttccggggttgcttttagggcggggtggtctttttgggccccctttttttgcctgcccggc

SEQ ID NO: 5819 - DNA, 456 bp, Chlorella sorokiniana
  unsure (1)..(456): unsure at all n locations; Clone ID: LIB3602-083-Q6-K6-F6
gccagctgtgcaggcggcctgggctgtgatgcggcacgcggcgtgagctcaccgactgcagccgccgcagagtgtggcagagccacggctcgccgccgcgactttagcgtgctgctggactgcggctgcgagcccaagcagcagttgaagcttgcgggtgaccgccaatcatcctgacctgaggtggtttgcaagtgtgctgctgccctccgcagccgctgccaaaaacccaataagccttttgtacggaggttgccgcagcgcgcttgcttgatgcactctgctcccaccggccccatgcgccagtgccacccctgcactgtaccacattgttttgtactgccaatcggcgccccgcccgctttgcatgctttgctagcgcccgctttcttcccactgtgaacgagtgagtgtcnnnnnnnnnanannnnnnntnnnntntnnnntttttnttat

SEQ ID NO: 5820 - DNA, 516 bp, Chlorella sorokiniana
  unsure (1)..(516): unsure at all n locations; Clone ID: LIB3602-083-Q6-K6-F7
gcggggggatgccacgctcaaccagntgttcagcggagccatcatggcgcagagcgagcaaatagagaagctgtacgcggatgcggttgaggccacgcacaacatcagccgcgccaacgtgcagctggacaaggcgatacgcaccaaccggtcggctcgcaagtacatgatcgtcttcttcctggtggcctccctagccctgctgttcctggactggtggaactcgtgagggggcaggaagagcacagtcagccgattgctaatgcaagcggcagtttaggatctctctgcagcagctgcggcagctcacttccaaaccaaacgatctctgccaacccggcagtgccaacggctgctgaaccgaccgccactgcaccttgccacgtgtttgctccatgtgttgcacagcaaaacggttacacgaaccttcaacataacatgtcgatggctgcaaataggcgcggtaaagagcggtttacanaaaaaaaaaanaaaaaaaaaanaaaaaaaaanaaa

SEQ ID NO: 5821 - DNA, 603 bp, Chlorella sorokiniana
  unsure (1)..(603): unsure at all n locations; Clone ID: LIB3602-083-Q6-K6-F8
ctgnagcagnacggcctggnagtggcgggcaagcgggtgctggtgcccggctgcggacggggctacgacttggttgagtttgtgcgggcgggagctgcagcggcggttgggctggagctggccccaacagcgcagcgcgaggcagcggcatacctggcagacaccctgacgccggccgagcttgcaaatgcagaggtgcacacgggtgatttcttcaagtgggagcaccccacgcacgcagcctgggacgtcgcttacgactataccttcttctgcgcgctgcaccccgccatgcggcgggactgggcggcgggctacgcacgcctcctggcccccggcgccctgctggcctgcctggccttcccaatcgtgccggcgggggagcacccaaccgggccgccttggccggtcaagccgcaggactatatggatgtgctgctgccgctgggcttcacgctcgtcaaggagtacgctgtgcctgctgagctgtcgcaccctggccgcggcggcaaggaggccatgctgctgttcaggaaggactgatgccagctagccctgactagcgggagagcgacatgagagcgagacgagaagcgcacgccg

SEQ ID NO: 5822 - DNA, 539 bp, Chlorella sorokiniana
  Clone ID: LIB3602-083-Q6-K6-G1
tcgtaaaaaaaaaaaaaaaaaaaaaaaaaaaaaaaaaaaaaaaaaaaaaaaaaaaaaaaaaaaaaaaaaaaaaaaaaaaaaaaaaaaaaaaaaaaaaaaaaaaaaaaaaaaaaaaaaaaaaaaaaaaaaaaaaaaaggggggggccctttttgggggtccccatttttcgtccccggtcttggcaactttttgttttttttttggggccccttattttaattcctggggcggtgttttaccaccggggggttgggaaaacccttgggtttccccatttttttcctttgggaaaaattccctttttggcgggtggggtttttaggaaaggggcccccccggtccccttttccaaaaatttgccaaccttattgggaattgggacccccctttttaccgcccttttaaccggggggggtggggggtttccccccaggggaccctttccttttgcaggcccctttgccccgttttttttggttttttccctttctttttcccccattttggcggtttttcccctaaattttttaattggggg

SEQ ID NO: 5823 - DNA, 393 bp, Chlorella sorokiniana
  unsure (1)..(393): unsure at all n locations; Clone ID: LIB3602-083-Q6-K6-G3
agttctagnacgcgagcgggcgggctttttttttttttttttttttttttttttttttttttttttttttttttttttttttttttttttttttttttttttttttttttttttttttttttttttttttttccgggggggggtttccccccctttttaaggccccgggggggggggggcccggcgggtttttggcccttttgggggggggggccggttttttgggtttaattggggttgttggggtcttgtttttttttttgcgggggggcgtgggggtgtttcccccccctgttggctccgcgcccctctcccccttttttttttttttccgccggtttttttcccttttgggggggcccccccccctctttttttggcttttttcccttt

SEQ ID NO: 5824 - DNA, 574 bp, Chlorella sorokiniana
  unsure (1)..(574): unsure at all n locations; Clone ID: LIB3602-083-Q6-K6-G4
ggtgggcggcctgtttngagaccgcaagcgcctgaccaagtcggcgagccagccgcaggtggcggcccctgccaagtgatgtggctgcggcccctgggcatgctgcctcatggccctgcctgcttggcatgctgccccgaagtatagaaaagaatgaatgctgcgggtgcggctgatgcccgcccgcccaccctgcccccatcagacggtctatgccggtgaaacactgccgctgctgatggactgacgatttacttgtgtggttttaagcctgtcgggcacactcgtgccgctgtcctcaagactgtcagcttggctcgccttgctcttttgcccgtctttatgtgtggtgtgcccccgtcccactcttgcccgacccgcaccaaacttatgcctacactgccctgtacaccagtcccttccaattcgcgcccttgccagcagattcgttcccctctgtttgattgccagccgccgacggccggccacccacccttacgcgtcccttccacctctgtcccttcgattagatcggttggtgggccctgccctctctgtaacacatgcacgtggg

SEQ ID NO: 5825 - DNA, 508 bp, Chlorella sorokiniana
  unsure (1)..(508): unsure at all n locations; Clone ID: LIB3602-083-Q6-K6-G5
gcagggagccccctccncgaggagtgaagcctgggatgatgagtgtgccgcttcacaggtgctcaggaagagtgagcacctcgcctcgtccccaatgctcagtaggagcgagtgcctgtggatgagtggaggcctgctccccgcccgggcaaggctggcccaccggctgggcatcgctctgtgttccagcccggggcgcccaaccacctctcccaaccgactcgcttcctgcctttaaccgcggctgttggtaatgcgccgcaccgcttcccacctcccacctgactgacgactgcacgtgctgtgccagcttcgaccggcgcgtgccgcctctcccgctgacccttttgccagactgactgacgctgccatgctcttgtttttgggcccattgccgtccttccaccttgtgacgaccgctccgctgctctcccatgcctgtttgacccacgccccgacccggacaagccactgtgctttcccatgagcactgtaaatccactgtttg

SEQ ID NO: 5826 - DNA, 465 bp, Chlorella sorokiniana
  unsure (1)..(465): unsure at all n locations; Clone ID: LIB3602-083-Q6-K6-G6
acaggnatcggaccctgcctcccagttcccttacggcacttgaggggccgctccgagcggcactggagcgcatctcagccgctccctgacagcggcaggtgggcgctcatcagcccaactgccagccagccagccgcacctgcaccccagcagccagctgttgtagcagcggcgtgcgccgcaggagcttgcgccgcttgcgccgccctgccgctgtgcagctgactgcccgtgctggtagcggccggcgttgctgcgacccccttacccagcccctgcccagccccgcaccctgtcagtggggccctctgtaccatcaactgcccgcatagcgccccatctctttgtctgcctttcgtccctcctggccgcctgcctgccgcgatactacccctgacccggatcggttgacgtcactcccaccacgcacctgctgctcttaagccatgtaatgtgtgaactatt

SEQ ID NO: 5827 - DNA, 582 bp, Chlorella sorokiniana
  unsure (1)..(582): unsure at all n locations; Clone ID: LIB3602-083-Q6-K6-G7
gtggcgcctgtgtcaacanagcgggcatcatgggtatctcccgtgattccctgcacaagcgccgcgccacgggcggcaagcagaaggcatggcgcaagaagcggaagtatgagctgggccgccaggccgccatgaccaagctgtcctccaacgtgtgcgtgcgccgcgtgcgcgtgcgcggcggcaactccaagttccgcgcgctgcgcctcgaccacggcaacttctcctggggctctgaggccgtgacccgcaaggtgcgcatcctggacgtgaagtacaacgcgtccaacaacgagctggtgcgcacccagaccctggtgaagggctgcatcgtggaggtggacgccgctcccttcaagcagtggtaccagcagcactacggcgcggaggtgggccagaagaagaaggccgccgccgccgcgcccgccgagggcgaggccgcctcccagagcaaccacgtgaagcggaagctcaagcagcgcaaccagngccgcaagctggaccagatgctggacgaccaattcgccaccggccgcctgtacgccgctctgtcctcccgccccggccagtgcggccgcg

SEQ ID NO: 5828 - DNA, 554 bp, Chlorella sorokiniana
  unsure (1)..(554): unsure at all n locations; Clone ID: LIB3602-083-Q6-K6-G8
gccgcactgccctgccatnactcgcgttgcaggggtgagcgctcaagcgcgccccccaacctgccagccgtgagcgctgtccaacaccacggcagcaaccacagccggcatcaggcacaaattgcacttccttgctcatcaaccttcctgcaccccttgcatctcaccgttccctctgcccgcccgctctgtgatcacctgccttgcttcctgccactctgtctcaaggccctatgctgcctttcattttatgcatgcatgccgctatcccagggccggaaggcagccaaccgcgcccagtttgtgcaacaccatcccaacagactccctgtttcagcctgccggcccaaggcgcagttttcctccacctctagcgcaactgtacaccagcctagcctgtatcaccagcgaaagcatccaacaatcgccttctccccttgcatcttgctggtgcaccccgcctccgtgggcgcccacccctacccagccacgcctgttgcccctaaatctgcatccaatcagcacagctgctgaatgcatcgacgctgtaacat

SEQ ID NO: 5829 - DNA, 408 bp, Chlorella sorokiniana
  Clone ID: LIB3602-083-Q6-K6-H1
gccaggggcccaggacctgcaatgtcgccagcctggtggtcgagaaccatcaccatttaccaccagcccgccggttgcctggcacttgcattccattaccgcctgcccgacattacggcttgcccagagttgattgtacctgcatttcaatccagagacacaccgcgcctgccaatcctcgcactgccggtttagtaccctgcaagttctgcatgctcttgcctgcaatgccggaccttggcgtagaagcagcaccagttgtaagtgagtgttgtgagcccagcacaaggcggcaggggcacatatgcccaaccttggtgtgaagcagcaccagttgtaagtgagtgttgtgaaaaacaaaacaaaacgaccttacaaacaatatgcgcaacctgaaaggaaaaatgg

SEQ ID NO: 5830 - DNA, 385 bp, Chlorella sorokiniana
  Clone ID: LIB3602-083-Q6-K6-H2
gcgttcggcagttatcacagtttgctcgggagcgctgccaagctcggcaaccaccagccctgcccacgcatgtaccattgttaggagccagtgagcagccaaaaactgctgtgcattcacacgccccgccagtgccatctcttcatgtgtacagaacccgctatacgcttctcttgctttgtgggggggcttccttgtgtgtgtccatctacctttgttgcaagtatgtctgtgcctgcttgcacttgctctccaaccaaaccgtgctccctacccatgtcccgctgaaaccgctcccacgcccccggcccatcctgccacctctcgttcccactctcttcccatgctcgcctcttcggccaacaacgctgctgtaatgcacgaa

SEQ ID NO: 5831 - DNA, 536 bp, Chlorella sorokiniana
  unsure (1)..(536): unsure at all n locations; Clone ID: LIB3602-083-Q6-K6-H3
gccggcgacgcccacagcaagcgagcctgagnacgtgcctgcgccacgcacgccggcggcaagcattgtgggaggcatgcgggtggcggcagcgagccccaagaagaagaagcgcaacccgatgcacaaggtgcagaagatgctgggcctcaagccctctggggcatccagcagcaagtcccgccgctgagcctcagcagcggggcggaaggcaggcccttgcaggcagcctgccaggctccacaagcaagcagtgtgcagctctggtgcccctgccaccaaaagcagcacgaatgttgccgactcgtgttggttttggccggcggggcccaatgcagcaggcggcgaaccacctgcctgtccgcggcacagtcttgctgcctaccaagaaactccaataagcaatctgtttttgttgcacacttttgtactacgctagtatcatagttacttcccttccaagaggtgtgtccttctcgtccccccttcctcctatttcatgctgataataacactgggtttgtagcaactatgtg

SEQ ID NO: 5832 - DNA, 459 bp, Chlorella sorokiniana
  Clone ID: LIB3602-083-Q6-K6-H4
cccagcgtccgcttgcggtgggacaggggctggcagatgaccgcttgcgtcgcacaaaagaggcctgctgctgcgcctgcgcacagcagaggagcagctgctggcaacctaccgggacgaagctgccactgacctcattcaggcgctggctgaggcgcgcgtggaggcggcacagcgcgactttgagatcatggagctgcaggggcaggtgcggaagaaggatgcgctgatcgataagctgcgagcgcagctgacacgtgcagaggccaagtatcgcgcgcggctggatgcagcacactcgccgggccccctagccgcagccctctctcctgcctcacgtggccttccgccgtcgccgtggcgagacgaggctgattctccggctgcgccgcagcagtctcaggcaggcagcagcgcggcagtgggtgcaatgcacgacagcccagcagcactggaggt

SEQ ID NO: 5833 - DNA, 514 bp, Chlorella sorokiniana
  unsure (1)..(514): unsure at all n locations; Clone ID: LIB3602-083-Q6-K6-H5
gcgccgcgccagggcggcaagcagnaagcatggcgcaagaagcggaagtatgagctgggccgccaggccgccatgaccaagctgtcctccaacgtgtgcgtgcgccgcgtgcgcgtgcgcggcggcaactccaagttccgcgcgctgcgcctcgaccacggcaacttctcctggggctctgaggccgtgacccgcaaggtgcgcatcctggacgtgaagtacaacgcgtccaacaacgagctggtgcgcacccagaccctggtgaagggctgcatcgtggaggtggacgccgctcccttcaagcagtggtaccagcagcactacggcgcggaggtgggccagaagaagaaggccgccgccgccgcgcccgccgagggcgaggccgtctcccagagcaaccacgtgaagcggaagctcaagcagcgcaaccagggccgcaagctggaccagatgctggacgaccaattcgccaccggccggctgtacgccgctctgtcctcccgccccggccagt

SEQ ID NO: 5834 - DNA, 583 bp, Chlorella sorokiniana
  unsure (1)..(583): unsure at all n locations; Clone ID: LIB3602-083-Q6-K6-H6
cccgggttcgacccacgccgtccgtggtccaagctcggcgtgggggcaccagcagcgcgccaccatgggtcgcatgcacagcaatggcaagggcaagagccgctcggctctgccctacaagcgcagcccccccctcctggctgaagatcacccccggcgaggtgtctgacaccatcgccaagatggccaagaagggcatgaccccctcccagatcggcgtgatcctgcgcgacagccacggcatcgcccaggtcaagtccgtgaccggctccaagatcctgcgcatcctcaagggccagggcctggcccccgagctgcccgaggatctgtaccacctcatcaagaaggcggtggccatgcgcaagcacctggaggccaaccgcnnggacaaggacggcaagttccacctgattctggtggagtcccgcatccaccgcctggctcggtactacaagcgtnccaaaaagctgccgcccaactggaagtacgagtccgccaccgcctccgcgctggtgcagggctgagcgctcgcctcgcgcgtgagctgacggctgccgccccggctatctccaactggtgtgcc

SEQ ID NO: 5835 - DNA, 331 bp, Chlorella sorokiniana
  Clone ID: LIB3602-083-Q6-K6-H7
ccgccaaatctgctcctttcgacatccccttctctatcatactgaacgtggcggttggcggcaagtgggcgggtgcaccggacgcagcctcctacttcccagcaaccatgctggtggattacgtgcgtgtgtggggcactccttccaacaacaccagctccggtggcttcatttgggatatcctgaacaacccctcctgattcctgcacatttgtcattctcttggatggcccagcatttgggccggctgcacttgcacacccacaggcaggcaacgactgaccaatgccactactctattagctcaccagacgctgtaacatgttcttgc

SEQ ID NO: 5836 - DNA, 597 bp, Chlorella sorokiniana
  unsure (1)..(597): unsure at all n locations; Clone ID: LIB3602-083-Q6-K6-H8
gnacggctctcgcacagcttgaagcggggcctgacaccatctagcagcagcggcagcagcagcgatggacgaccaggtgctgctgccacccaacatagaggacatccctccgccagggctggcgctcgttgaagagctagacaagctgctgctggtgcagttgagagatgggcggaagatcatcggcacgctgcggtcatttgatcagtttgcaaacctggtgctccaaggggccaaggagcgcatcattgtgggggcgcagtatgcagagatccccctggggctgcacgtagtcaggggtgagaatgtggtgctgctgggtgagctggacttggctcgggagccaccggcggggctggagctggtcagcgaagcagccatcaagcaggcgcagcgtgcggagcgggaggcggacaagatgaagggcacgttgcgcgcacgctttgacttcttggatgacatataaaagggattgcagccgtagcagcgacaacaactgcttgtcgtatttcaatttgagcctgctgcacctctctgtttgacctgacctccgtttgaccgcttgaccactgacgcactgtaatgcaaacacactgc

SEQ ID NO: 5837 - DNA, 561 bp, Chlorella sorokiniana
  Clone ID: LIB3602-083-Q6-K6-H9
ccccgcgtccgcgcagccgcagcgggggcggggcggcaacaattacccgccctaccgcgggcggcgctcgccgccacctgcagccaccttcaggcgcgatcgctcaccggcgccggcgcgtggcagccaactgcttgtggctggccttcccttcatgatgaacgagcgggatgtggatgacaagtttgggcggtatggccgcctcaaggacgtccgcatcgtccgggacaagttcacgggagagagcaaagggtttgggtttgtgtcatatgacaatgacgacgatgcagccgaggccattcgcaagctggatggcaccgactggaacgggcggcgcctgctggtggaggtggcaaagcgcccaatgtgatcaacggcagcagggcgggcagcgggcggcggcttgccggcagctggcgacgcaacgttgcggcgaaccttgtacggtctgcatgcacctgcacgtgggaagcgccgcatggacggggtgcatacagtctggccgcatgttttctcttagggtctgctgctgaaccctagtttgcgcggcatcagctgcgc

SEQ ID NO: 5838 - DNA, 414 bp, Chlorella sorokiniana
  unsure (1)..(414): unsure at all n locations; Clone ID: LIB3602-084-Q6-K1-A1
ggtgacagctagcgcctggatgcgcgaagctggaaaaaaaattcagcggcaaggagtggtgattgtgggcgtgcgccgaatcctgccgcccgtcaagcacagccgcaaggcggagcggtcgtgcacccgtaaccctaacctaggggcacgaggtgtacatggacgacctggtgtaaaacactcgagacgtcgaaaagagcatcctttaccggctggacggtttcaaggtgttcaaggtgctggtggaccccaaggaccgtaactcttccgagtacaagaccaagacctttgggagagtgtacaagcggttgaccggncaataaatggcctttgagttggtggttagngagcagtaagagggttagaattgtttgggggtataggttgtgatnttatgtttgttttgacttgctt

SEQ ID NO: 5839 - DNA, 535 bp, Chlorella sorokiniana
  Clone ID: LIB3602-084-Q6-K1-A10
gccgaaacaagcgggtgcaccgcaccgctcccaagagcgagaacccctatgtcaagctgctggtgaagctgtaccgcttcctggtgcgccgcaccgagagcgacttcaacaaggtggtgctcaagcggctgttcatgtgcaagaccaaccgcccgcccctctcgctgtccaagctcgccaagttcatggccggcaaggacggcaagattgcggtgctggtcggcaccatcaccgacgacgtgcggctgtttgaggtgcccaagctgcgcgtgtgcgcgctgcgcgtcaccgagaccgctcgcgcccgcatcctcaaggctggcggcgagatcatgaccttcgatcagctggcgctggtggcgcccaccggcagcaactgcgtgctgctgcgcggccccaagaacagccgcgaggccgtcaagcacttcggccccgcacccggtgtgcccggctcccacgccaagccgtacgtgcgcagcaagggccgcaagtttgagcgcgcccgcggccgccggaagagcaagggctacaaggc

SEQ ID NO: 5840 - DNA, 481 bp, Chlorella sorokiniana
  unsure (1)..(481): unsure at all n locations; Clone ID: LIB3602-084-Q6-K1-A11
cttcccagtctaacagccggtaacccctccctcaagatgcctttcgagaccctgtggaacctgcaccccaagcgtatggctagggctcccgcccctaccacctgtactccaggggggggggggtgcaccncgagtacagcatgaacatctgccatgagtgcttacccgagttcaccaacgccattggcttcctcaagtaccggtaaacggctgaacgtcatcagtgtggccagtgccgtccaccggaatcatgtccgctttcgaggcgacccagcggcgggcggaactgcctgccagtactttcctacctacaacctttattgtgttacagacttaccttctctaaattaatttgatctgtacaacatttcattggatgccgtgatggcatgacaaaaaatagaaaatgcagcgcaaaaaaaaaaaaagaaaaaaaanaaaanaaaagggggggcctttttaaaaggaacaaattttaatt

SEQ ID NO: 5841 - DNA, 527 bp, Chlorella sorokiniana
  unsure (1)..(527): unsure at all n locations; Clone ID: LIB3602-084-Q6-K1-A12
ggggcaaccatnaccaanaacggggggagggggggcggcagcaagcacggccgcggccacgtcaagcgcgtgcgctgcgagtcgtccgccgccatggtgcccaaggacaaggccatcaagcgcttcatcgtgcgcaacatggtggacgcctcggccatccgcgatctgcaggacgcctgcgccatcgacggctatgcgctgcccaagatctaccgcaagggctactactgcgtgtctgccgccatccactccaagattgtgcgcgtgcgctccgtcaaggaccgccgcaaccgcgagccgccccgccgccccggctttggcgcccgccccgagcgcaagtgagcgtcggcatggccgcagcagcagcagccgctgaggagcagtgagggcggcgctctgcagccgcgcctcgtcctgcgatgagtcagcaccgcggggccgcccggcgcacggcacgccacccggcaggcagcttatttatgtgcgctgggccgcgcgccggcgccccctgtaaatcgcgatatgag

SEQ ID NO: 5842 - DNA, 402 bp, Chlorella sorokiniana
  unsure (1)..(402): unsure at all n locations; Clone ID: LIB3602-084-Q6-K1-A2
cagcaggcgcggctggccaagaagctgacgcaggcgcagctggctcagatgatcaacgagaagccgcagctgatcaacgagtacgagagcggcaaggcgatacccaacccgcagattctgtccaagatgtcccgtgtgctgggcgtgaccctgaaaaanaaccccggcaagaagngagactgcaggcgccggcatggcggtagtggtaggcccatacttnggctgntgcagnccggatncggnacccnttgcctngctggagcatttgattttntncatgtagttggcattggtgtgnccgnttggttacctgtgtgcttgtaccaccatctggggcgggtgngatgcacgcgcgccgtcgttggttagacctgcagtgagaaacattttgtaaggctgatg

SEQ ID NO: 5843 - DNA, 569 bp, Chlorella sorokiniana
  unsure (1)..(569): unsure at all n locations; Clone ID: LIB3602-084-Q6-K1-A3
tcgcggncgcgtggggcagctgcagcagctgggtgggcagcgctngacacggcaagccgtgccttcagcagcggcagctgggcgggcggcgccgcagctggcgcagactgcagaggggcaatcgccccacagcctgttgtgcagcctgcaactaacgcagatcatgggagcagccatgcgccatgccacctattgcgggctcccgcttattcacaaacccaaacagcgcttctccctcccgcctttttctcctccctcggattgatgcaagcaccgcttttccctgcggtcccaagtgccgctgtcgtttgattgcaagcacccacggctgaattttagcaccgtcctgccacttgcagcctgctatccgctatccccacctcaggccctttcattctattgctgtcgctctttcattggtggcggctgcgccacctgactctgtcgttttttgcctgctgctgttcattcagcaccccacctccggaaacacaagccctcggtgcgcctctgctgccagcgccctccgaaccgccatctctgctttttccacccttttgcaccacccc

SEQ ID NO: 5844 - DNA, 563 bp, Chlorella sorokiniana
  unsure (1)..(563): unsure at all n locations; Clone ID: LIB3602-084-Q6-K1-A4
ggncagcctgttccaggctttggctcgggcacgggcggcacccacacgccgtgctcagctccaccgaatcatgtccaccgccatgcgcagcctgggcaacattgaggacggcttctacatcgcccctgccttcctggacaagctctcgattcacattgccaagaacttcctggacctgcccaagatcaaggtccccctgattctgggcatctggggtggcaagggccagggcaagaccttccagtgcaacctggcgtacaagaagctgggcattgcccccattgtcatgtccgccggtgagctggagagcggcaacgcgggtgagcccgccaagctgatccgccagcgctaccgcgaggcctccgacatcatcaagaagggcaagatggcgtccctgttcatcaacgatctggatgctggtgccggccgcatgggtgacgccacccagtacaccgtgaacaaccagatggtgaacgccaccctcatgaacattgccgacaaccccaccaacgtgcagctgcccggcgtgtacaagaacgaggagatcccccgcgtgcccattg

SEQ ID NO: 5845 - DNA, 487 bp, Chlorella sorokiniana
  unsure (1)..(487): unsure at all n locations; Clone ID: LIB3602-084-Q6-K1-A5
agcgtccggngnaaaagcggnaggcgagaagatgcggcagnaggcagaacgcgctcttgcagacgcggtcgacaccacagcagtgcagccatactttgttggcaatgcgccggcagggcacgtgcagctgggcgacggcacgaccttcttccataggtgccagctcatacagggcgtgccgatgctcaagggcggcagcggctacaccgagcatgtgtgggtggccaaggacgagatgggcgactacatcaaggagccggagctgctgcagctgctgcagaagatgctctagtgctaggcgctgccggcctctggcactgcctgcctccagtgcctctagttccaggcgctgccggcagaactgcccgcaatgcgactggcgtagcggctgcgttggcgtgccctctgctcctgcatgcgccgtacgcaggagcggacacgctggctgggcctgtgattggttgaaccctgtagcactttgcactgc

SEQ ID NO: 5846 - DNA, 221 bp, Chlorella sorokiniana
  Clone ID: LIB3602-084-Q6-K1-A6
agcgttcgtattgcccacagcccaaggcagtctttgttttctctttgccccgacaacaacagaaaatagcacccaacccaaacgtactaacacagcaagtgcacgtttgcctttgcagcttgttgttatgtaccatgcttggcgccgcccattggcagctttgtacagaacgccgaggtttcccttgacctgtacatgcttctgtagtttgttgtcacttg

SEQ ID NO: 5847 - DNA, 61 bp, Chlorella sorokiniana
  Clone ID: LIB3602-084-Q6-K1-A7
ccgggtcgacccagcgttcggcgcatgtaacgcactccttccggggggggggggggggggg

SEQ ID NO: 5848 - DNA, 581 bp, Chlorella sorokiniana
  Clone ID: LIB3602-084-Q6-K1-A8
cgaccagcgttcgggctgctggcggccggacgggggggggggggggggggagcaacaagacaagctgatgttgtcgacgcgctcagcgcagctgtgacggagctgcagccacagctggagcaagccgagcgggtgcagcaatgcctggccgctctgcctgccagcctgcaaggccttgcctcccaagccggggggggggggtcggccctgcagagtcgacacggcttcagcttgcacgggctgcagcagctggtggagcggcaaacgggcacggcgccaggcggccagcctgccgcttcaggcgcagctgctgtgcccagcggcaggtccagtggcagcggcagagcgctgagcggcggcctgctgctcacagagcgcccgccgcagcaggaggcaggcgagcggcagcggtatgcagcctcggtgctgcggcgcttccaagccaagctgcggggccagagtgcagctgcggcggatgaggcaggcgcagtacaggcagaagcaggagcagagtctgaggtggcggaggaggtggagcagctgattgcggcggccaccagcgatgacaacttggcccgcat

SEQ ID NO: 5849 - DNA, 243 bp, Chlorella sorokiniana
  unsure (1)..(243): unsure at all n locations; Clone ID: LIB3602-084-Q6-K1-A9
cgttcgggtccggccatgagcacnataccggggggggtgganggggataataaagccgcagctgcgctttttgcctcgccgtgatggcacagtggagagccatagccgtttgtttggctgatcaggagtgtgcgccagccgcgattgtatgcttcaggcttttttgctcnagaactggggggggggcaacctttggcacaatgtttgcactgttttgcagcactttctgtaacatattgcttc

SEQ ID NO: 5850 - DNA, 568 bp, Chlorella sorokiniana
  unsure (1)..(568): unsure at all n locations; Clone ID: LIB3602-084-Q6-K1-B10
ggngtcccctgtagtggtacagccgggcgtgcggcgcgggggtaaaactcgcggtatgggagctggccgcaagctgcggctgcaccgcagggcgagcgctgggcggacaaggactacaagaagtcgcacctgggctccgagtggaagaagcccttcgccggcgcttcgcacgccaggggagcgtgctggagaagatcggcattgaggccaagcagcccaactccgctatccgcaagtgcgcgcgtgtgcagctgatcaagaacggcaagaagattgcggcgttcgtgcccaacgacggctgcctcaacttcatcgaggagaacgacgaggtgctcatcgccggtttcggccgccgcggccacgccgtgggtgatatccccggcgtgcgcttcaaggtggtgaaggtgtccggtgtgtccctgctggcgctcttccgcggcaagaaggagaagccccggaactaaacggcccgcgcccagcagcggcagcagcggcgcgcctcggcaacggggggcgccgcgtccgccagcactgcacctgcctggcggcggcttgggagggcgtgcac

SEQ ID NO: 5851 - DNA, 563 bp, Chlorella sorokiniana
  unsure (1)..(563): unsure at all n locations; Clone ID: LIB3602-084-Q6-K1-B11
gcggtgcacgcccgctttggcgcggggcggcgnggggggnagcctaccagcgctgggcggcggcggcgctgcagcacgacccgggcctagcagcacagtaccaggagctgatggcgtgtgagctggcgcgcacggggcagatgggcgaggcggcagccggcgccgaagcactcgcgcggggagggcagcggctgggctgggccgagtgtaagcgactgctggaaggaacacttcagcatcggctgtgtgtcgctgcacagccatcgccgctgcgcatctctgccgtactagtatgaatctgcactgcgattctcgcgactgccttgcacggcttgatcagtgagtctctggcattccttaaaagtgacatgctnaaaaaaaaaaaaaaaaaaaaaaaaaaaaaaaaaaaaaaaaaaaaananaaaaaagaaaagaagaaaaaaaaaaaaaaaaaaganggggggggggggggagggagggaaaagaggggnaaggggaggaggggagggggaagggggaggggttaaagggggggggaaggggaaaagaaaaaaggggggggg

SEQ ID NO: 5852 - DNA, 52 bp, Chlorella sorokiniana
  Clone ID: LIB3602-084-Q6-K1-B12
aaaaaaaaaaaaaaaaaaaatttgggggggggggggggggggggaaaaacaa

SEQ ID NO: 5853 - DNA, 551 bp, Chlorella sorokiniana
  unsure (1)..(551): unsure at all n locations; Clone ID: LIB3602-084-Q6-K1-B2
cacagtcgatcaccagnctcgcgtgtcggttcttgctgatgccctngaaaacttgtacaatgccgagnagcgcggcaagaagcaggtgctgctgcgcccctcctccaagtgctgatcaagttcctctcgctcatgatgaagcacggctacatcggcgagtttgagtttgtggacaaccaccgctcgggcaagattgtggtggagctgaacggccgcctgaacaagtgcggcgcgatctcgccccgctacgacattgcggccaaggacattgaggcgtgggtgggccgcctgctgccctcccgccagttcggccacatcatcctgaccacctcccagggcatcatggaccacgaggaggccaggcggaagaaggtgggaggcaaggtcctcggcttcttctactgagcggccttgttggatgcgccgnagcagccacggtggaccacagccgtggcggatgcagcacggncggcgcgcccggccgcggtgtttgctgcagcaccggcgggagccctgggtgctgccccccttttagattgctgnaccgcacg

SEQ ID NO: 5854 - DNA, 563 bp, Chlorella sorokiniana
  unsure (1)..(563): unsure at all n locations; Clone ID: LIB3602-084-Q6-K1-B4
gtcgctttctgctgccgcagnacgaaatggctccttctgcggcctcgcacccggcagcaaaccctccaccccggcagcgctgcccngacgggcaggcagcggtgcaggcggcagcgggcccgtcagcggcagcttcgacgccagcatttgagggtgctgtgctgattccaaagagtggccagcagcctaggcgtctgagggtgcaatgctgactccatagagatgccagcagccttagcagcacgggcagtggtaccggcggccagggcagcggacatgtcagcggcagctttaatgctgtcatctgggcactagtgctggctggcaatcaaggtttcccagcaagtacttgcttggctggcaggtgccgctgcctgttccctttgcaatggctgccagttgcctcaaattgatgaggcaacgcatggctgtattgagctctccaaccttctctctgcttgagtggcgtgcgatctgaccttcttcagaccttcttcaacgacccaaacgaacgactgattgaacaaacggatgcctgttcctccttcgagaacgtgtaaatt

SEQ ID NO: 5855 - DNA, 572 bp, Chlorella sorokiniana
  unsure (1)..(572): unsure at all n locations; Clone ID: LIB3602-084-Q6-K1-B5
caccgctgctgccgcgnacgcgcanaagccgccaanaaccccaaacctgaccgtcaaggctggcgatgctgttcccgatgtgcagctggacgagctggtgggtggcgagatcaagcagcgcagcctgaaggagctgttcgccggcaagaagggcatcctgtttggtgtgcccggcgccttcacccccggctgcagcaagacgcacctgcccggatatgtggcggatgctgagaagctgaaggctgcgggtgccgaggtcgtggtgtgcgtggcggtgaacgacgcgtttgcgatggacgcctggggccaggccaacaacacggagggcaaggtggtcatgctggccgatgcgcgcgctgagctgaccaaggcgctgggcatcgagcttgatgcccccgctgtgctgggcaacacccgctgccgccgcttctctgccgtgattgaggacggcaagttcaagacggtgaacctggagcagggcggcgagctgacctgctccctgtccaacgtcatcgtggaccagctgaagcagtgagtgagttatggtggcacgagcggcacgagcagcagca

SEQ ID NO: 5856 - DNA, 537 bp, Chlorella sorokiniana
  unsure (1)..(537): unsure at all n locations; Clone ID: LIB3602-084-Q6-K1-B6
agcgtccggnagaaccggcgcggggtgtacaagtacctcttcagggaggcgtgctgtcgcggagaagattcaactgcccaagcccccgagattgatgtgcccaacctggaggtcatcaagctcatgcagtccttcaagtccaaggagtatgtgaccgagcgctacgcctggcgccacttctactggttcctgaccgactctggcattgagtacctgcgcgagttcctgaacctgccctccgagatcgtgcccgccaccctcaagaagagcacgcgccccctggagcgcgagggcgcgcgcccgccccgccgcgacggccccccccgccgcttcggcgaccgcgagggctaccgctccgagaaggcgggcgcccccggcgagtaccgccccgagttccgcggcggcttcggccgtggcgccgccccccagtaagcgttcgcttcctggagcagcgccctctgggctcggcaggcggcggcgggtgcggcggccgtgaggagtggcaaaatgtgcgtgaccgctgcatgcatgctactg

SEQ ID NO: 5857 - DNA, 538 bp, Chlorella sorokiniana
  unsure (1)..(538): unsure at all n locations; Clone ID: LIB3602-084-Q6-K1-B7
ctggcacgtgggcatcctcatggggcagggggcgcggagtcgagacagcactaaaaggaccccgtggacttattaactaactgtttctcacctctccaggtcggataaggagaatatctcaaccctagctctccaggcggccagtatttcaaccaacaagaacctgggcaaagagcgcgggggagagcaacattctacctgcacaaccgagcccaccccttccactggctatgcatgactacctgctctgctccgcccagggcagtaatgatgcagacaggcatctttcggcaacctactggaagcacattgggcgagctccgtctcgcaacagaccatgcgtggcacaagccctggctcaccaatcccgctancaagaacacgtcactctcccaaaccccgaccagggcctgagggctgccaaggtcaaggtccagccacacctaaagactttgcatagcttgaattggggcttcaattgctagcgggcccatattacttgcctggctaagcgtgcaggagcgcattgtgaatcacc

SEQ ID NO: 5858 - DNA, 457 bp, Chlorella sorokiniana
  Clone ID: LIB3602-084-Q6-K1-B9
ggcgcaggcggcttgcgggggggggggggggggggggcgagagctgcggggcgtgatcccagccgaccccaagcagccctttgatgtgcgggcggtgctggcgcgcctgctagacgggtcccgctttcacgagttcaaagcgcattactgccgcacgctggtcaccggggggggggggggggccgcatgcctgtgggcgggggggccaacaacggcattctgttctctgaggccgcgctcaagggcgcgcactttgcgcagctgtgcgcgcagggccggatcccgctgctgttcttgcacaacatcacgggtttcatggtgggcctgtagttcgggggtgggggcattgcaaaggatggaggcaagatggggatgggggggggctaacgcggtgcgtctcaaggtgacgcttctcttgcggcggcgcgtttgggggtcggtttctacggggtgtgcg

SEQ ID NO: 5859 - DNA, 84 bp, Chlorella sorokiniana
  unsure (1)..(84): unsure at all n locations; Clone ID: LIB3602-084-Q6-K1-C1
naaaaaaaaaaaaaaaaaaaaaaaaaaaaaaaaaaaaaaaaaaaaaaaaaaaaaaaaaaaaaaaaaaaaaaaaaaaaaaaaaaa

SEQ ID NO: 5860 - DNA, 497 bp, Chlorella sorokiniana
  Clone ID: LIB3602-084-Q6-K1-C10
acccactctccctgccgcacccaaaccaacccaaccaaggtaccgccgcaactaagtgcgcctcaactgcatgagccatccagtgcccgctctcttccccaagcgcaccaacgtttttccatcaaggcctgatgcccgtcagcgccgcagggtgcgttgtgctgccgagcttatttccgcgtaacctttttcctacacgactggcatggctgcgcgcgtggccctccaattttttcacgagcatcttttccacagatggctgcactctgctggagttcaccccgcctgttttccgtgttccgcctcccttcaccctcacgtgcccagcactacactctgcccctgcccacccatcttccacatttttgcttccggggtgacatcttggtttgagtatccttcggttcctctcctgcgtttcctttcctgggtctctctaccccatcaggccctccgagaaagcgtgtcttgagcatgctatgtaaccggcagatctg

SEQ ID NO: 5861 - DNA, 305 bp, Chlorella sorokiniana
  Clone ID: LIB3602-084-Q6-K1-C11
ttttttttttttttttttttgggttgttggggggggggggttaatattttttctcatgttttttgttttttcttttttggtggggtggttttatttcatttttatttttttggggggggggggggcaagggtaaccactggggggcaaaaaacaagggaggggggtgggtttgggggggggggagagacccaatggaacgggggggggggaccaaaaagggggtcaaacaaagggggggggggcttctgttccacagggggaaaaacatgggatggagcggtttttttgtcccagaagggggggt

SEQ ID NO: 5862 - DNA, 371 bp, Chlorella sorokiniana
  unsure (1)..(371): unsure at all n locations; Clone ID: LIB3602-084-Q6-K1-C12
cgttcgccgncaccctggctgagctnaagtggaggggatgaaggcggacaaattgccatgctgtccatgttcggcttcttcatccaggccatcgtgaccggcgagggccccatcaagaacctgaacgaccacctggctgacgcctcggctaacaacttctacgccctgtacgccaagaggggggggtgagcacttgtcgtacgaacgtacgaggcccgcgcgcgattgtgcgccccttgagaagatcacacgaccctgtcgcaccgcactgccgcctgtacgcacccaccatgtgtatgtgctagagcctatgaagttttgtgtaagcccttgatactcctaggggaaaaaaaaaaaaaaaaaaataatta

SEQ ID NO: 5863 - DNA, 148 bp, Chlorella sorokiniana
  unsure (1)..(148): unsure at all n locations; Clone ID: LIB3602-084-Q6-K1-C2
ggcttgcgcccgnaaatcggtccggctccaaaaatgaatcgaaaaactgacttgtcacattccattctggtccccttgtttcatgctgcatgccccacttggaattggcaagcaggaaccaatcagccttttgttacaaactgcgaac

SEQ ID NO: 5864 - DNA, 181 bp, Chlorella sorokiniana
  Clone ID: LIB3602-084-Q6-K1-C3
actgggggagcctgcctgcgccttgccacttgtatctgccggccgcactctgagtgcacggtcccatgttgcactataaatcaccaacctgttcaaaaaaaaaaaaaaaaaaaaaaaaaaaaaaaaaaaaaaaaaaaaaaaaaaaaaaaaaaaagggcgggccgttttgagagggacgcag

SEQ ID NO: 5865 - DNA, 542 bp, Chlorella sorokiniana
  unsure (1)..(542): unsure at all n locations; Clone ID: LIB3602-084-Q6-K1-C4
cgctgnaacgtttagcttgtgccgnggtcctgctatggcttgtcttctacgctgtgcacgctgcagccaattgcagttgcaccagtaccgtcttttccgggccagtccaccccacttgcagccatggaaacgttgccgcagcaaccactgttttggttgtcccacccctgccattcagatgaccggcactgaggacattgttgtgcctgccaaggcggccaccaagctggcgggccagatccccggcgcgtggctggcgcagttccccggcacaggccacggcttcatttgggagcgcatggatgaagtgctggctgtgatggaggcgttcctgcaggcaggcagcgctgaggggcaagcggcaggcggtgctgaggggcacgcggcaggcagcgccgaggggcacgcagcaggcagcagcggaggtggcgaggctggccagggcggctccgccgacggagagctgtagccagacggggtagagtgcgtgcctggcgtgtgcatggaagtacagtttggccagcctgttaatgatcaagcct

SEQ ID NO: 5866 - DNA, 558 bp, Chlorella sorokiniana
  unsure (1)..(558): unsure at all n locations; Clone ID: LIB3602-084-Q6-K1-C5
naaaaaaaaaaaaaaaaaaaaaaaaaaaaaaaaaaaaaaaaaaaaaaaaaaaaaaaaaaaaaaaaaaaaaaaaaaaaaaaaaaaggaaaaaaaaaaaaaaaaaaaaaaaaaaaaaaaaaaaaaaaaaaaaaaaaaaaaaaaaaaaaaaaaaaaaaaaggggggggcctttttaggggtcccagttttggggccggggctttccaagtttttattttttttttggggcccctaaatttaattttttggcccggttttttaaaaggtggggttgggaaaaccctggggtttccccattttattggtttgggaaaaatcccctttttccccggtggggttaaaacaaaaggggcccgcccgtttgccttttccaaaattttgcccattttaattgggaaatgggccccccctttttggggggtttttaagggggggggggggggggtttcccccagggggaccttttatttttgggggggttttaggcccctttttttgggtttttttcttttttttttgggggagtttgggggtttttcccggaaagtttttaaatgggg

SEQ ID NO: 5867 - DNA, 347 bp, Chlorella sorokiniana
  unsure (1)..(347): unsure at all n locations; Clone ID: LIB3602-084-Q6-K1-C6
cggncgcgtgggtgcggttgtttcttctgcctctcttgcccatgctggtgtttttgccaagtacatggcgcccctctaccccccgtccacaaccaattgtcgacccatctcttacttcttcatgcgtttgcctgcgagcgttgcatggccatgaacgagcgccgagaaaccttgtaactgtgtccagccaaaaaaaaaaaaaaaaaaaaaaaaaaaaaaaaaaaaaaaaaaaaaaaaaaatataaaaaaaaaaaaaattaaaaaaaaaaaaaataaaaaaaaaataaatatatataaaaagaaacctaaaattaaattaaatgagacaaaatattaaaaaagggggg

SEQ ID NO: 5868 - DNA, 553 bp, Chlorella sorokiniana
  Clone ID: LIB3602-084-Q6-K1-C7
agcgtccggcgcgccctgggtacctgcctgggatgagttgtgggggccatgaaagcagcaggccgactaatacgctggcaccctgcgtgccatcaagtcaaatgtcaagcagtgcggcggtgggtccacccctggcaccggctcatctttccaggagcccgcggagcagtgtgttgctgacttgggggcggttgtgaccggcacgggcccatgtgccaacacccccagcttctcagccacccagtgctgcgccgcgctcaagagcctgggcagctgcttagagcgacatcgtgttcgcgatggctcaccagcaggacaagtatgccgaccagctgaagtggcttgagatgatggcgactcattgcggcaccggtgctaccagcccctctggccctagcaccaactacggcatggacgagcagtgcctccaggggctgatgggcacctttgacaacggaggggcttgcgccagctcctatgcaaccgcgtgctgcaacagtctgacaaacctgggcaagggctgcctggagtctttcctggcgtacgccaagca

SEQ ID NO: 5869 - DNA, 458 bp, Chlorella sorokiniana
  Clone ID: LIB3602-084-Q6-K1-C8
tcccgggtgcaacccacgcgttccgcacccccaaaaaagtgctgacaggaggggggggtggggggatgctacacctgctcccgcggctccacccacaccctggggaacttttagaagggcaccttatacctgctggacaacacctacgggttcctaacccccagactctatacgcgaggacccgttcaccaaaagcccgaggggggggggctcctacttcctggccaagccagtgggtagcaagggctactgagcgggcttcccatgcccgccatcctcagcgcctgggggttaagagcatgagagtaacagcagtaccctgacgcgaggatagattagagggaggaccccagtggccactggggcgctaccctgacacggcaagcctgcgcccaggcacacaccttacaccatgatgatgcattgggagacccgtataacacctaccgcggaaaaga

SEQ ID NO: 5870 - DNA, 289 bp, Chlorella sorokiniana
  Clone ID: LIB3602-084-Q6-K1-C9
cagccaaggcatacggctcgcctagtcgctgcagctggcctggccgcagcagctgccgtgttgcctgcctccctcagcatccgctgctgcttggggggaggcgcctgcagcctggctgcctgcagcagcagcatgtacattgctcttgtgccattgaacttgactacccttgtaacacgtgcccaggatgggctgagttgaaaaaaaaaaaaaaaaaaaaaaaaaaaaaaaaaaaaaaaaaaaaaaaaaaaaaaaaaaaaaaaaaaagggaggttaaaaaaaagagggg

SEQ ID NO: 5871 - DNA, 457 bp, Chlorella sorokiniana
  Clone ID: LIB3602-084-Q6-K1-D1
aaaacagccggggaaagaagaccgggggaggggggacgctgagcaagagaaagagaaaagggagggggaaaggggggggagggacaagagggggaggggggaaggtggggggggggcgggtgggcggggggggggaatgggggggggaggatacaataaagagaagggcagagagaggagggagggggagggggggggggcaaagcagggggagataaaaaagatggggggtaggaaagggggggggggggaaggcggaaagggggaaatggaaaagggaaaaaatgaagtgggaaacaaaaaacgtgtaagaagggaggaaaagggcaaagaaaaaagggggaagggaagcaggagggaggcaataaagaaaaagggagaggagaaaaggtgggggaggggaaagataggaagggtggaaagaggaagaaggggaaagggaaaaaaggggaaaggg

SEQ ID NO: 5872 - DNA, 301 bp, Chlorella sorokiniana
  Clone ID: LIB3602-084-Q6-K1-D11
ggagagccaagtgcgcttgctggcagagagaaattcaagtagctgggaaggaaccaggtggatcattcacctaaggctccgctttctagaagggagtgttctctgtgagagatctagtgttgctaactactcagtgactttgacgttgctgccttgtccccgaagacgctcatgtaacggttacacccgtgcggggtataagaaattacttaaaaagtgaacatgctaaaaaaaaaaaaaaaaaaaaaaaaaagaaaaaaaaaaaaataaaaaggggcggccgttttaaaaggtatcaaag

SEQ ID NO: 5873 - DNA, 448 bp, Chlorella sorokiniana
  Clone ID: LIB3602-084-Q6-K1-D12
ctcgctgccgcactgcggcgcacgcggggcgggggggggggacacaaccctgcaccttgggcctcgtattgctgccgtgcgtcgcctgccgtgccccgccagcccgcctcatggggcgctccatgcaggtcacatccccctggcaggctggctgagcacttacgctagacagcagctggggggggggctccctgcacccggttttgctcccttcttgcttccacaacccgcgggcagcaacgttgctcgtgcactgctcccagcagccgggggtgctcaacgatgggggcacccggacacccgacctacggtggtggtggttcattccaccattgcatgcgcgacggtgtgttgttcccagagccagtcagcgctgtggaccaggcccagcctctgtaacccaagccggttagaacagataacccagagaaggctctaaaaagggggc

SEQ ID NO: 5874 - DNA, 345 bp, Chlorella sorokiniana
  unsure (1)..(345): unsure at all n locations; Clone ID: LIB3602-084-Q6-K1-D2
cccgggntcgccccgcgtccgnaaaaaaaaaaaaaaaaaaaaaaaaaaaaaaaaaaaaaaaaaaaaaaaaaaaaaaaaagggccggacgatctaagaggaaccaaagctaacgaacccgtgctatgcgacgtctatagctctatatatagggccacctcaaattgcaatacactgggccgttctttttacaacgttcgggattgggaaaaaccctggggggacccaccaaaaaacgcttttgggaacagcccccaaagcgccagcggcgcctaatanacaaaaaggccccccaccgatcgcctcttcccaacatttgcttcagccttattggtgtaatgggccgt

SEQ ID NO: 5875 - DNA, 302 bp, Chlorella sorokiniana
  unsure (1)..(302): unsure at all n locations; Clone ID: LIB3602-084-Q6-K1-D4
canaagggagcccattggntctggctgccttgcctgttctgtttttttacaactgctgaccccgttttgcatgcactgtctgccccctgctgatccgagaactgcctttcagacctgcccgagttttcccttcctgcgcactgctttcatgctgatcgattgtcaagcgctgtaactgcacacgataaaaaaaaaaaaaaaaaaaaaaaaaaaaaaaaaaaaaaaaaaaaaaaaaaaaaaaaaaaaaaaaaaaaaaaaaaaaaaaaaaaaaaaaaaaaaggggcggcccgttttaaaagaac

SEQ ID NO: 5876 - DNA, 472 bp, Chlorella sorokiniana
  unsure (1)..(472): unsure at all n locations; Clone ID: LIB3602-084-Q6-K1-D5
ngaccggcccagccggcctttgtgaccgccccctgncggcgcccccgccgcagcaggccatgatgtgaagcagagcggccagcgggagtttgaagtagcggcggctggcagctgatggacagccagccagccagcacggagcagctggtagcggtggcttggcccagctgtcgcaaacagcttggcagcagcctactgaccagcaaggagagaggaccgactcgagcccggtcccggggaaacatacagaaacccaacactgcgccttgactatatgtagggcggcgtgcctgacctgcttttccttccatccattctgaccgactctgtctactttattcggcactttgaatgttaatcgactgctgaccaaaaaaaaaaaaaaaaaaaaaaaaaacaaaaagaactaaaaaaaaaaaaaaaaaaaaaaaacaaagaaaaaaaataaaagatgggggggcgccgctttaaa

SEQ ID NO: 5877 - DNA, 302 bp, Chlorella sorokiniana
  Clone ID: LIB3602-084-Q6-K1-D6
cggaccggctcccgggcgccccgcgtcgagaccggcgcggggtcagtcctttagggggcgtgctgtcgcgggaagctcacctgccagccccggatgaggcccaccggggcatagctcagcgtccttcagtccagggatggacgacgctcccgcccctttctggtctgccgacttgcttgatacctgcgcgagtctgaacctgcctcagacggcccgcacctcaaaagacacccccctggaccgaggccgcgcccgcccgcggacgccccccgcgttcgcacgcgaggctaccgtccgagaag

SEQ ID NO: 5878 - DNA, 569 bp, Chlorella sorokiniana
  unsure (1)..(569): unsure at all n locations; Clone ID: LIB3602-084-Q6-K1-D7
cggacatgtctgcctgcatgtggggggcgggttcaacgccaccatcggcggcgtgctgcgcggcgcggggcgacagggagctgggggccctgctcaacctgctgtcatactggggcctgggcctgcctgtggcttacctgcttgccatcaaggcgggctggggcctgaaagggctctggggcgggctcgcattctgcacctctgtgcaagggagtgggcatgctcatcgtgctcagccgcttcaactggcagaaagaggcgcaacgagcagctgcggtgctggaaaaaggggcagcggccccatcgatggcggcaatggcggcagcagcagcgcagccaatggcggcttaaatgcagcggcggcggaagcgggggcagcangaggcttgggttcggaggagagcgcagcgctgctgagcgccagcaagcagggcggtcgggcggaccgtaagccccctggcagcttcgcggcactgcatgttgctggccaggacgagcgataatggggcctttttgatgcttttccgggtcggccatgagaccccttgtgtacattaatttcccaacat

SEQ ID NO: 5879 - DNA, 245 bp, Chlorella sorokiniana
  unsure (1)..(245): unsure at all n locations; Clone ID: LIB3602-084-Q6-K1-D8
naaaaaaaaaaaaaaaaaaaaaaaaaaggggagaaaagggaagaaaaataaaaaaagataaaaaaaaaaaaaaaaaaaaaaaaaagaaaaaaataatttataagatgggcgggccttttataaaggttccttgggttcgttctctcttcattgtcaaggtcttagtatattctttgggtgtaccctaaatttgtggcggggggggccaacaggcaaaaaccggggggtagggggaaaaacctggg

SEQ ID NO: 5880 - DNA, 142 bp, Chlorella sorokiniana
  unsure (1)..(142): unsure at all n locations; Clone ID: LIB3602-084-Q6-K1-D9
agcgtccgnaggacatccaccagccggcagccatggggcaggcgggggcactccaggcggcggtggcgccggccagccgcagcagcacgggccggcccttcagcagcggaaaggcgctcgtgcccctgcggccgaggcgcgc

SEQ ID NO: 5881 - DNA, 583 bp, Chlorella sorokiniana
  unsure (1)..(583): unsure at all n locations; Clone ID: LIB3602-084-Q6-K1-E1
ccgggntcgcccagcgttcgcttgctcttgcccagcccgtccagcagcagttagcagccatgcaggccaccttcgccggctctaagctgcagcttggcgcgcgcgtcagccgcaagagcgtgaacaccaccgtggtggcctccagcggcaagaagatcgacatcagcaagcagggcctgaactccatccagaatgagaccgtgaagctcaacctgatgggcaagtccaagaccatggagagcaaggactgggtggacccccagggccgcaagggcaagggctacggcgtgtaccgcttcgccaacaagtacggngccaacgtggacggctacagcccgatctacacccccgacacctggtccgagtctggcgactcttacaagctgggcaccaagggccttattgcttgggccggcctgattgtggtgctgctgggcgtgggcatcaacctggtgatctccacctntgccctgggccagtaaatggcgacgccccccgcgtcggcagcagcagcagcagccagcagcattcccttgcagttaccccccgagaagacaaaccctgaccctaccctagctggcgg

SEQ ID NO: 5882 - DNA, 576 bp, Chlorella sorokiniana
  unsure (1)..(576): unsure at all n locations; Clone ID: LIB3602-084-Q6-K1-E10
gcggcgaggtgcaaaaaaactcctggcgcggagcagggagccgggcagtgctacctgggaatgaagatccagaccgcgggtggggagtcaacaactgtgtacgtggcgcgaccaccagtgcggagccagcgggtcgtacctgggagacccctcagattcctgctcctcgtgaacgggcccggattcgcggcctcaaatgtgtgttttaattgtgcgtgtttgtgagtccaccatcagctacagcatgtgcagcagcgggagaagctggcggcggctgcgcagtttgccatgcgtgggcagggccctcactccacaaccatctgaggtccatgaaattctgagttttacgtggtgaccctaccgtgctttgtttacccgatcgtgacatgattcatgcatgctntgtgcaccctttggagaaccggctggcattttcggttgacctgcaagacgcccatgttaaagtattgtacagaaaaaaaaaaagagggggggggggggggggggggaggggggttgggtgagtatatgttgggaggggttgtgggtgtgggggggtgggcccccccccccccc

SEQ ID NO: 5883 - DNA, 324 bp, Chlorella sorokiniana
  unsure (1)..(324): unsure at all n locations; Clone ID: LIB3602-084-Q6-K1-E11
ccgcttctttctcttcggcgcccctgngagggcaggcgcgaggggggggatgtccctccaccctgcatgcgtgcccacccgttggtccccgcccatagtgccccacgtcttgggtgcttcgccccgttgcacacacacatacaacacacgatttttgcgcccgtctccctgcatgcacaacgtggggcgcggagcctgccctgcaccgccgagccctccggccacgccgtgcctttttcggttcgcttgcgccgtcctcatttcattagcgcatgccctgctgttcgttgagctagagaacaagtgtgaatataacagactaat

SEQ ID NO: 5884 - DNA, 582 bp, Chlorella sorokiniana
  unsure (1)..(582): unsure at all n locations; Clone ID: LIB3602-084-Q6-K1-E12
ccagcgtccgccgccgtgggacgcccaaccgggggcggggcggtgtaccccaagctggcacgcacctggtgccgctngagcggggtgatgtggtgcaaatggtgatgcaaaacttgcccgccaactcgaacaacggcgactatcggatccctggtcctggctccagccgcaacaccacgggaggagcgggccatgcatctgcacggccaccatttctgggttctgggttcgggtgacggcatctacgacccggccacccacgcctccaagctcaacacgaagaacccgcccttccgtgacaccgccaccctgcccaagaacggatgggtggtgctgcgctttgtggcggacaatccggggctctggatttatcactgccaccttctctggcatgaatatatgggcatgctgttcgtgctggcagaggctgtggacgagctgccgccccgccccaagggcctgccggcctgccccaagacttgcatccagaatgccgccccctggagcaagccgtttgtccaggagaagttcggcaagagcgggttcgagctgccctgagcggctagcttgtgcggtggtatg

SEQ ID NO: 5885 - DNA, 204 bp, Chlorella sorokiniana
  Clone ID: LIB3602-084-Q6-K1-E2
gacgggccttgtaggggggctttaaggggggggggtgtgggggttatttgtagggtgaccgtttcatttgttaggggtttattgtcggtttttttggtttttttggtttggttggtgggggggttgggttggttttcccgggaagagttttaaatggggggtgtgtgttttggggtgtgggttttaggggttttgagggtgttt

SEQ ID NO: 5886 - DNA, 574 bp, Chlorella sorokiniana
  unsure (1)..(574): unsure at all n locations; Clone ID: LIB3602-084-Q6-K1-E3
gttcggcgccggctgctccgnccgccccttcacaggcgcggcagctgaagctgtggccgtgcctcgctccctngacctggcttggcgcctgggcagcgcagcagcgcaggcgcagcatgccaagcgcgatgcagcgcaggcgattgccgcagcgggcggcgggcgggtgctgtttagaggcgaagggggggacgtgcagcgngccaccacagccggctttgctcgcgggcagctcctgctggagggagacagcagcctgagcaccagcagcgctggaggcaacagcggcggcagcaccaacgcaagcggattgcgaaagcggctgcggattcgctttcagaacgaaaacttggtggctgaggaggcggatgaaggacaggagggtgcggcaggagggcagngggcagcggtgcaccgcacagcggcggncggggcagcagcaagcagcagcagcggcagcggcactggtggtgccactagcgaaggcagcggcggtggtgcacgtgtgctggcgagcgtgccggacctcatctgttgcattgaggaggacaccgggccacccattgcgactgaa

SEQ ID NO: 5887 - DNA, 493 bp, Chlorella sorokiniana
  unsure (1)..(493): unsure at all n locations; Clone ID: LIB3602-084-Q6-K1-E4
ggcagccagcgatggcgctcccagcctgcccagccgcctgcgggaggtgctggtggcgggctcatttggcagcagctttgcagatgtggaaggggcatcgccgccggtcagcgcacgggcgccgctgctgggaacgccatcctcctccagcggcctcaccagcccccgcagcccagcagaccgctcgccgggcaagtgagcaagccacactgttcacctgcagcaaacgcagtcagcagggggacgaaagcgcccagaaacagcgttgctaagctatcttgttgtcctgctggccattttgagctgttcaagttgctttcctggccactgctctatttgaagactgtgcagcatgttgcctgtggactggacaaggcgttgctgtatgtcacaaggctgtgaaaaaaaaaaaaaaaaaaaaaaaaaaaaaaaaaaaaaaaaaaaaaaaaaaaaaaaaaaaaaaaaaaaaaggggcgngccgttttaaaagaac

SEQ ID NO: 5888 - DNA, 558 bp, Chlorella sorokiniana
  unsure (1)..(558): unsure at all n locations; Clone ID: LIB3602-084-Q6-K1-E5
ggncgccccttgcgcctgtgccngccaacagctggggtatgcggtgctgctgtctgaggggcccgacaagccaaagcggcgggccagaacgtggcttggggatcctaccacatcaccatcacaggatatctgccatgccagggaggctactcctcgtgcgacaagcctggcaagccgcacagctgcccttctgtgacccaaatggtcaagctggcgggccaggcttggaagattgccaacgggggcaaggagacgtataatctgcatggcacctggctgtccagcaagccgtggggcaaaggcaagggcaaggcatacgttgcggagctgcccccaagcaagacactggacaccctggccgacgagctgtgcaagcgtggattcagctccgtcaaagggccgcactacaccggcacacggcacacaccctggcacatctcactgggcaccgcagtcaagttgttcgccaaggcacgcttcgacaagcatgctaaggagggctccgccccaccactgcacctgtggatcgtgccctgctacactgatgccgtgtgcgcg

SEQ ID NO: 5889 - DNA, 536 bp, Chlorella sorokiniana
  unsure (1)..(536): unsure at all n locations; Clone ID: LIB3602-084-Q6-K1-E6
gccctgcctcctccctagtccattgntatcagttgatcgccgccgccactgctgccgctggcccgtgcaccgcactgctggctgagccggcaccgctgccagccgctggtaccgtccgcgcgccaaagagcgcaatgcctcgcaccagaacacactgtgaccctctcgaatccagcatccgcatttgcccagaccctgccgctcggcggcctctcccttgttccccctgtttcttgcgcccccaacgtgccgtcccccatgcaaagcgcgcatgtcatgttgccgcctttgccgctatatctctgcccgccctcgctgcttccctgcttgcatcagcgctgccgcacacattccgaaacttgtcagccagggggccgcatgataccgcagcggcccgcccccacccatgtgccaccctaccgcggttctctagcaacgctagcattctttccgtccagtttgcctcgccactcgccggtttcatgtactcttctaacttccttctcgcctgttgtgtgttacaccagagcacgtgg

SEQ ID NO: 5890 - DNA, 537 bp, Chlorella sorokiniana
  unsure (1)..(537): unsure at all n locations; Clone ID: LIB3602-084-Q6-K1-E7
ggnacaggggggatgagaggctgtgcagcagtacggaggaagcgccggggnaaccaagcacggcatcatgaaggccccctacgtgatcatgaacctgtttagaaagatggcggcaagaagaagaagacgaagagcggcagccaggcagcagcacaggagcaggaagacccaaacactgcgccgcaggctgtgccgctgccgggcagcggcggcggccaggccgggtacgcagtggtctgagcggcacagtggtctgagcggcacagctgcgcctgacgtgtggacctaatgaacgtctctggcaaggtgcacagcgcttgcctgtgctgcacagttggttgtccatactgttgtcctatcatcccattgcgtgtacacctgcaactacgaccttgcggtactcttgcactccttacctagatgcgtattgccgcccaccaatggataatggctttcctttgccttgaggcatgcttgccaagctcccagcatcgcatcaaagacgcttccagccactgtatgtaaaggagcacagng

SEQ ID NO: 5891 - DNA, 578 bp, Chlorella sorokiniana
  unsure (1)..(578): unsure at all n locations; Clone ID: LIB3602-084-Q6-K1-E8
ntaccaatccatcctnatcgagccgtgcagggcttgccctgccttcgggcttttctcagcagactgcatgctgatcgccaccctccgggctgccttccccctcttctctgggcttgctgcctccctggcaacagggctgcgggtgcccgcctcagtttctcccaatgcgagtgcgccctgacaggctccgcaggtccccacctgcctagcctcactatgtttcattgccacccgctctgccccccacacgagccggtccttcatctcaatgcatggagctgtattgtatcctcccccacacatacccggtctcggacaagaagcccaacacacgccttgggccctcccgatctgtgccccaccggggagccctttggcttttcatattcattgcgcgcagggtgcgccttccggagctcatgtaatgcgggctgtgtgcgnaagaaaaaaagaaaaagaaagaagaaagattggtaggaggagggggaggggggggggggggaggggggagggttggaaggaaaattaaaaaaagatgttgggggggtgggggggtagcgcgcccccccccccccccc

SEQ ID NO: 5892 - DNA, 587 bp, Chlorella sorokiniana
  unsure (1)..(587): unsure at all n locations; Clone ID: LIB3602-084-Q6-K1-E9
cccggtcgacccagcgttcggcaacccacacancgcgcctccgaggggagggggggggggccaaagcacgctgcgctacgtgagttttccctcctgttcctccagtattgcactgccccccagtggctcgcgcttagcagcggcccgcctttttcactgcattgtagattaaacgcgcatgctgcattgagcgtccggtngggatgcttgagggccatgttgttgtagtcctggcctctgcctgcaagcctgccgtacgcagacttatctcgcctcaccacacccgcatgccttctccgagcgttcaactgaacctgcacattccgccccgcttcattccgcacccttcatccttcatgttgtgtaatgtgctttgtgttgaaaaaaaaaaaaaaaaaaaaaaaaaaaaaaaaaaaaaaaaaaaaaaaaaaaaaaaaaaaaaaaaaaaaaaaaaaaaaaaaaaaaaaaaaaaaaaaaaaaaaaaaaaaaaaaaaaaaaaaaaaaaaaaaggggggggcctttttaaagaggccaaattttatgtaccgggtgcgtgggaaacaaaaatcttttttttaggggggccc

SEQ ID NO: 5893 - DNA, 429 bp, Chlorella sorokiniana
  Clone ID: LIB3602-084-Q6-K1-F1
aaaaaaaaaaaaaaaaaaaaaaaaaaaaaaaaaaaaaaaaaaaaaaaaaaaaaaaaaaaaaaaaaaaaaaaaaaaaaaaaaaaaaaaaaaaaaaaaaaaataaaaaaaaaaaaataaaaaaaaaagaaaaaaaaaaaaaaaaaaaaaaaaaaaaaaaataaaaaaaaaaaaagggggggggtttttttggggagggaaattttttttggggttttttaaaaaaaatttaattttttttttgggggggatattaaattattttttggtggggggggtttaataaaaagtttgggttggggaaaaatttttgttttttaaaaatttttaatgggtttggaaaaaaaattatttttttttggggtttggggtaaataaaaaaaaggggggggaaatttttgtttttttttaaaaaatttttgttgttttttt

SEQ ID NO: 5894 - DNA, 199 bp, Chlorella sorokiniana
  Clone ID: LIB3602-084-Q6-K1-F10
gtccgcaaaaaaaaaaaaaaaaaaaaaaaaaaaaaaaaaaaaaaaaaaaaaaaaaaaaaaaaaaaaaaaaaaaaaaaaaaaaaaaaaaaaaaaaaaaaaaaaaaaggggggggccgttttaaggggtccaattttacttccccgtgcttgccaacaaattgggtttttttttgggggcccctaaattaatttggggggg

SEQ ID NO: 5895 - DNA, 588 bp, Chlorella sorokiniana
  unsure (1)..(588): unsure at all n locations; Clone ID: LIB3602-084-Q6-K1-F11
cccggttcgaccagcgttcgggccanacctcaatacacatggaggaggggggggggcgcggcttcaccctgggagagctcaaggggcgggcatcccctccaagctggcgcgctccatcggcattgccgtggaccaccgccgccgcaaccgcagcctggagagcctgcaggagaacgccaaccggctcaaggggggaggggggcaacctggtggtgttcccccgccgcgccggcaagcccaaggcgggcgacgcctcggccgaggagctggcgaccgtgcagcagctcaagggcaagctgttgcctctggccaagccggcggcggcgctggagaaggtggcgatcactgcggagatgaagaaggagagcgcgtacggcaagctgcgtgtggagcggatgaacgcccgcatggtgggcgtccgcgccaagcgcgccgccgaggctgctgctgccgagaaggacgcgtaagcgccctgcgcgcagccgcgactggcagccgcctgtgcggccgggggcgcggtggcggccggcgacgcggcggggggcaggcgatccccaggcccgcccgctgtggagcgcaacgcagcgc

SEQ ID NO: 5896 - DNA, 537 bp, Chlorella sorokiniana
  unsure (1)..(537): unsure at all n locations; Clone ID: LIB3602-084-Q6-K1-F2
cgcactagccaagctcggcttgcctgaggcgtctggcataccacccgtcctcaccacacgctacgcaatcccagtgaggaagggcgacgatgagctgcggcggcggttgtcagcggcactcgttgagttgatgcatgttgtcacccgcagccccatccttgagtggggggggcggggcctgnnggacaatggcgtgccgnncgaagcagagagggggggaggggtgaaagcgatatcctacttncaataacgctgtccttggtgcctgctgngatggtagcatgctcggngcatggnagntgnagtgcgcagtgggagtggtgagcttcaggtaggatggaaggtggttgagtgtctgttggcggcgntcggtgctgtttgncgtcgggcntagcagnaacaagtgtcggctttggaggtgtgggcatggcatgtatacacgctcttgtggtaacgatgtttgtgtgatgtgtgaaaggtggtttgatgngttgatttttgggtgggaatgagggggtgtgtaaaggggggtggggg

SEQ ID NO: 5897 - DNA, 467 bp, Chlorella sorokiniana
  unsure (1)..(467): unsure at all n locations; Clone ID: LIB3602-084-Q6-K1-F3
tagttctanaacgcgaagcgcgccgccctttgtttttttttttttgttttttttttgttttttttttttttttttttttttttttttgttttttcccggggggcggggttacaccgcctcgttaaggccccgccggggggcgcccccggcaggtttgtggccgctttgcgggggcgggcaggggggggggagtcaatcggggctgggggggaactgttgttggtggggggggggggcttgggggttcttaccccaccagttgaaccgggccgccggcctccttggtctttttttccgccaggtggttaacaaacttggggggcaccaccaccggttggtggggggggtggcccttgcccagcagtttgaagtagccgtgcttgggggtgtcaataacgggggcggctgttttggggggtcccagggtaggttgggggggggggggcgggaggggttttttgttgggg

SEQ ID NO: 5898 - DNA, 295 bp, Chlorella sorokiniana
  unsure (1)..(295): unsure at all n locations; Clone ID: LIB3602-084-Q6-K1-F4
gggcgagcaacagcaacctgccgtcccagnagcgcttcgccatcaagaagaactggccaagaaggccaagcagaaccggcccatccctccttggatccggttccgcaccaacaacaccatccgctacaacgccaagcgccgccactggcgccgcaccaagctgggcatctaagcgcctcccacgaggagcagctgacggcagcagccccggcacggcaggcagtgcgctggccgcgcttgcaaggcagcccgtcagtggcatgatgacagcttaagcttgtaacgatggcctagc

SEQ ID NO: 5899 - DNA, 495 bp, Chlorella sorokiniana
  Clone ID: LIB3602-084-Q6-K1-F6
aaaaaaaaaaaaaaaaaaaaaaaaaaaaaaaaaaaaaaaaaaaaaaaaaaaaataaaaaaaaaaaaaataaaaaaaaaaaaaaaaaaaaaaaaaaaaaaaaaaaaaaaaaatataataaaataaaaaaaataaaacccccccccggtggttcttttttggttttttttggggggccccttttttttttttccctttttttgggctcccgggggcccccccccctttttttttttttttttgtccccttttttttttttttcttttcccccctcttttttggggccttttttttttttttttttcccccctttttttggggctttcctttccccccttaaatttttttttttttcttgtttttttgtttttttggtgtgttttttttttttttctccaaatgtgtttttttttttgggtattttttttttccctgttttttttttttgtgtttttcttttttttttttttttttgttgtttcacagcgtttttttt

SEQ ID NO: 5900 - DNA, 558 bp, Chlorella sorokiniana
  Clone ID: LIB3602-084-Q6-K1-F7
cctcagaccacaaacacacacctggaggcgcggggtgtgccaggccctgcgcgcccctgtggcctccagggccagacccgcagcaacgccggccgcaccgtcgtggtgtgccgcgcgcagcagcagaacctggccgctaaggccgcggctgcgggcgtgtctgtccccgcgctggggggggggcaccccgctctggcgctggtggacgaccgccttgcgggcgagggcaccggcaagatcctgggcatcaacgacccctccctgttctgggccatcaccattgtgttcaccatcgtgtggggcgtgttctacgtgtccacccgcgagattgacgctgcgtctgaccgcgagaacgacgatgactttggcctgaccctctgagcgggcgcccagcatcaggcggcccgcgcggcgtaggcccacgggcctgccgggcaaattttcgtccttctgttgcagcttgtccgccatgtgtacgctaaatccaaatttcaccccgagaagagaactcgctatgtagcacccttgtgtgaacaccggccctctggggctcccgac

SEQ ID NO: 5901 - DNA, 571 bp, Chlorella sorokiniana
  unsure (1)..(571): unsure at all n locations; Clone ID: LIB3602-084-Q6-K1-F8
cgtccgcccgctgnttgggtggaccagcgggggggggggggggaacgtgcgcgccactgtcttccccacaaggggacgccatcgcttttgcgggagaagaacgggttcacatacgaggtgcaggagtaccacaacccctcgggccagcggccaaagcgcttcctgggctatggggggggggctccgtgaagcgcaagggcctgcccaccggcggcctgcggtcggagcagaagaagtgaggcggcttcggcgttcgctgggctggccgcacagcagccctgcgtctacaccgccccttgcggacagggcatgtgtgaccccgcgccagctcaactgcctttgcttgcatgcaccccgactgcttccgctgtgctagttccctcgctcccgctgcgcgcgcggtgcacgccatggcatggcaggcctgaggcccgcccctggtgcgcgctgcgcatgctgcgtttgttacatgttggcaccactggggcgcatctgagcgccgctgtgcttcaagcccgccgccgggtatcaatgtggcgcggcgtttggctgtaagaatcaaatgcaaaaa

SEQ ID NO: 5902 - DNA, 399 bp, Chlorella sorokiniana
  unsure (1)..(399): unsure at all n locations; Clone ID: LIB3602-084-Q6-K1-F9
tccggttctagntacgcgacggccgccctttgtttttttttttttttttttttttttttatctgctatttgtaacatcaacattgcaggcagcagaggcagctcaagagaacaaacattgctgagcaggcagcagaggcagctgaagagagacaagtcgaagggaagagagacacatgcgggagggcggagcagcgtaccaaaagcgttccacagagccggcatgcgccgcaacagcgctatctaccccttgccaccctgctgcgccagcttggcctggaactggcgcaggtcaaactcgccggcatactgcgcctccgactgctccagggtgcccagccctgccaggagggaggccagcccggcgccaccctttttgccgccccccgctgctgctgca

SEQ ID NO: 5903 - DNA, 550 bp, Chlorella sorokiniana
  unsure (1)..(550): unsure at all n locations; Clone ID: LIB3602-084-Q6-K1-G1
tcggccgnacgggcgctggggctgtgnaggnaggagcagcgctggtccgccttcctggnctggctgtctgacaacggcctgctgaccaccaaggtgcagagccgcacagagcaggacggcgtgaccaccacgctggacggcctgcggcgcggtgacgcgggcgagcccatcccccgcgacagcgtgcccgccgcctcgctgttcaccaacgacttcctgccctgaggggtcgttctgggcgcttggatggcgctccagcagtggacagcagcccctctgctgcaataccaggccggggcacggttccagactnggtcaattgggctgnggggcaagaggccgagccgaccgcatgtggcgcatttgccgnaacgcgagggttcatgcaaatgctcatgataacttgttttgagattncagttttgtgacaacactggtttggcttgatgctttgacgagtgtaacgagtgcttgacaaaaaaaaaaaaaaaaaaaaaaaatgggaaaataaaaataaggaggaaaaaaaaaattaaaataatgggggggg

SEQ ID NO: 5904 - DNA, 473 bp, Chlorella sorokiniana
  unsure (1)..(473): unsure at all n locations; Clone ID: LIB3602-084-Q6-K1-G11
cctgttcgtaccagcgttccgctgagcagaggggcgtgcggcgggggggggggggcagacataattgaggtggtgctgaacgaccgcctgggcaagaagatccgtgtcaagtgcaacgaggacgacacgattggggacctgaagaagaggtggcagcccagacaggcacacggccagagaagatccgcgtgggggggtggggcacggtgtacaaggaccacatcaccctcagcgactatgagatccacgatggcatgggcctggagctctactacaactgattggtgcaccacagcacaggcatgggggggcaacaaactgccgacataccaatgccaagctggcctgtgccacggtgcattatgccatccccctcctctaatcttctgaatgtgttatttgttgaaatcagctctgtgacttagacactggctaggctgcagcacatctcaatcgtttaaacttgcgacana

SEQ ID NO: 5905 - DNA, 587 bp, Chlorella sorokiniana
  unsure (1)..(587): unsure at all n locations; Clone ID: LIB3602-084-Q6-K1-G12
cgacccagcgttcgctcacaacggcttctggcccaggggggggacggggggggagatgccggntgtgatgatgcagggcgtggagcagtactcgcagtactttgacgagggcaactccaagacgcgccgcctgtcgtggcagttgaccaacggcaccgtgcacgtcaaggccaactactacaagagggggggggtgatcctgatgccgttgcaggcagcantgctgctgcccttcaacgacaacgacgtgctgtcgtacgcagagctgcgggagcagaccaagctgcctgacgaggacctgacgcgctgcctggcctcgctcacgctctccaagtacaagctgctggtcaaggagggcggcggcaagggcatctcccacaccgacaagttcagcgtgaacaccaagtttgtggacaagatgcggcgcatccgcgtgacgctgccgccggtggacgaccgcaagaaggtgcaggaggatgtggacaaggaccgcaagcacgccatcgaggcggccattgtgcgcattatgaagtcgcgcaaggcgctcaagcaccagcagctgctggtggaggtggtgcancagctgc

SEQ ID NO: 5906 - DNA, 283 bp, Chlorella sorokiniana
  unsure (1)..(283): unsure at all n locations; Clone ID: LIB3602-084-Q6-K1-G2
cccggttcgacccagcgttcgcccgtaccaatagcattattggcgtgttggtttgggctgatgattgtctgaaatgtctacaatggccggnatcaggggagcagcatgcagttcaatnccttgtgggggggctgagcgatttggttgggctgattgataaggttggtatatttggtattgggtgtgtttggtgggttgcagaaggggtagaagagcgggggttgaacagtggtgtgagcaagtgggggtggttatnggtggggtnagacctggcggccgaggt

SEQ ID NO: 5907 - DNA, 507 bp, Chlorella sorokiniana
  unsure (1)..(507): unsure at all n locations; Clone ID: LIB3602-084-Q6-K1-G3
cctcatctttggtgcaccgctggctgtggcgctcggctgcgcctttgtgccgctccgcaagcccggcaagctccctggtgctacgctgtcggaggagtacgtcacagaatacagcaccgaccgcattgagatgcacgtggngagcggtgcaggctgggcagcgcgtggtgctggtggatgacctcattgcgaccggcggcacgctgcgngcgggtcttgacctagtgaagaaggcgggtggagacgnggnggaggcagcagctgngattgatctgggtcttggcgggcggcaaaagctcccagaggaccttccactgtttgtgattgtggagaagcagctcgacgagtgaccctctgatcccactncctgctcacttttgctgctatgcctactgcttacaattctttaactttgccatgcaagcatcagctgcccccnnaaaaananaannnaaaaannngaaggggggggtaatgggggggggggggtgggggggggagggtggg

SEQ ID NO: 5908 - DNA, 131 bp, Chlorella sorokiniana
  Clone ID: LIB3602-084-Q6-K1-G4
ctctgctcctgctcctcatgctcctcactgctgctgcacgccttctgtgcggcctgtacttgtctgcacctgtttcaactcacatccggctctcaacggcctgaggcctgggagcggtgtaaatagcacgc

SEQ ID NO: 5909 - DNA, 523 bp, Chlorella sorokiniana
  unsure (1)..(523): unsure at all n locations; Clone ID: LIB3602-084-Q6-K1-G5
naaagatcacaactcctctttccgcccagactggtgcaccgccagnagatgcgggagctgaagcagaccgctctttaccagcggcgcatcctggcagcagcggtgcagctggtgcggcccggcggcgcgctcgtgttctcgacatgctccatcaacccaggcgagaacgaggccaacgtgcgctggctgctggacacttaccccgacatgcagctggtgcagcagtcgccgcggctggggcagccgggcctgacaggtgccatcccccttccggacggcactgcccagcagctgctcagcgaggaggaggcggccctggtgcagcgcttcgacccctcggctgagctggacacaatcggcttcttcattgcccgctttgtcaagaaggtgacatgatctgatgcccttgatgcaatgcagttgtgatcgccagttgctattttaagtgtagcatgctgcattgcanaaaaaaaaaaaaaaaaaaaaaaaataaaaaaaaaaaaaaaaaaaaaattaaataaat

SEQ ID NO: 5910 - DNA, 439 bp, Chlorella sorokiniana
  Clone ID: LIB3602-084-Q6-K1-G6
ggtccggattcccggtcgccccgcgtccgaaaaaaaaaaaaaaaaaaaaaaaaaaaaaaaaaaaaggagaacaaataaaaaaacaaaaaacaaccgcgtgctccaacagcttcttacaggcctcattggtttctgggcggctttctcctcgtctcctggccctggggccccggctgggtggctgtctcaacggcttttcccctgctttctttgccggcccgcccgccgcccctcccccgtccccgcctttgccgcctgggaccccccttcccccgttttaccccggggggcgcgggggtccccccggggccccttctcttgcgccctccgcccgccccttaggttctccccttccttttgcccgctggccgctttcccccggctcttttcgggggtccctttcggggtccattttgttttggggggcctcgctccccta

SEQ ID NO: 5911 - DNA, 312 bp, Chlorella sorokiniana
  unsure (1)..(312): unsure at all n locations; Clone ID: LIB3602-084-Q6-K1-G7
cccggttcgaccagcgtccgntggcctctgcgnaaanctgtggcggggcgagcgatggcgngaagcaaatgccaggcgtttgtggtgaaggctgtgagccacgccatggcgcgcgacggcagcagcggcggctgcatccgcacagtcgtcatcagcaaggatggcgtcaagcgcagcttcttgcctggcgatcgcgtgcgggggggatttggcgaactgccggcaccgcagcagcagccgcaggtgcaggcatgagcggcagcggcacgtggctgattgatgtgctcgaccccactgtaaatgacatgtgac

SEQ ID NO: 5912 - DNA, 509 bp, Chlorella sorokiniana
  unsure (1)..(509): unsure at all n locations; Clone ID: LIB3602-084-Q6-K1-G8
cccttggggcatcgtcgtgctgtggggcggggggggtgcccacgatctatgtgctggcttccagcattacgaacctcattttcaagggcgccctgatcctcaaggggccctgccccaactgcaacacagagaacaccgtgtacttcggcgacatcctcacaatccatggcaaccggggggggaacaccgtgccgtgccagaactgcaagacgcagctgcggtttgacgcccagacgcgggaggtggaggcggttgaggaggccaaggcctgaagaggagccgcaacaacagccacatgccggctgtgcctttacccacgtttgtggacaagctgtaccatgtatccacccgttcactgctcttttctgggcactgacccgactngattttgcctccgggttcacacatcacgtgctgctactttgcagtgccattactggttgcctgatctaagataacaagttgcaagccatgatggtcgatctaaggggacaagttgcaagccacaa

SEQ ID NO: 5913 - DNA, 475 bp, Chlorella sorokiniana
  unsure (1)..(475): unsure at all n locations; Clone ID: LIB3602-084-Q6-K1-G9
gcgttggggtgggagcacagcggcgtggcggccgatgtggggaagcgtactaagaaaggtgcgggnatccgtcgggcaagtgacgggcgacccgcttatggcggctgtcgctgnagggaagcagnatcaagnaaaatgcgaagttagcgcagcgactccaagtgacttctgcgagcttctgcggcaagtgtcgcgcatgaagcgcgcaggtggggtgggcatctgggaagtgcaagggcctgcgaagaagacccaggcgtgggcgggcgcgtacgtgcgtcaacactgcggcgtgccgtggactggtgcgggtgccaccatccggcgcgctgcggggagcgagaccgagnaagtgaagcgagcgggccatnntgaggagnntgaagcggggcgggcgggcggggcggcgctttcanncagcggcgcgtgcagncgtgcgcggggtgggccgcgtgcttttcatgaggtgaacgcg

SEQ ID NO: 5914 - DNA, 576 bp, Chlorella sorokiniana
  unsure (1)..(576): unsure at all n locations; Clone ID: LIB3602-084-Q6-K1-H1
cgtccggnnctgctcgctgctcacgcannncctgcctgccgtccactagtgtcntacctgctttacacaaatctgcatgccaacgctgccaggttcccaggctgggcgcttggcacgtctgggtggccagcacgcgtgaactgcctcctttctgccttgatgcccacttttgcaggtgcggcccctgccgcatgattggcccttactttgaggagctgtcgacgcagtacgagggcgtggtgttcctcaaggtggatgtggacgaggtggagcaggtggcggcggcctgcggcatttccgccatgcccaccttccaggtgtggaagaaccagcagaaggtggacgagctggtgggtgctgccaaggaccgcctcaaggcgctggtggagaagcacctctgatggagtgttgaccaacagttgaccggcagtcggcccagcacccacctgggttgacggattggacgcgagggcagccggcgggcggcaagcggcggcagcgcacacgcgggccgctgcaaggcggccgtgtttcatatttcatgtgtgcgatgctgcgtcgcgtccgccgccgcat

SEQ ID NO: 5915 - DNA, 59 bp, Chlorella sorokiniana
  Clone ID: LIB3602-084-Q6-K1-H10
gcgttcgcaaaaaaaaaaaaaaaaaaaaagggggggggggggggggggggggcgaacaa

SEQ ID NO: 5916 - DNA, 420 bp, Chlorella sorokiniana
  unsure (1)..(420): unsure at all n locations; Clone ID: LIB3602-084-Q6-K1-H11
tttttaaaatnattttttttttttttnnttttttttnatttttttnttattttatattttttttttttttttttttttttntttttttttttttttttttttttttttttttttttttttttnntttttttttttttttttttttttttatttggtggggttttnttttntnatttttttttttttttttttntnnaannnnnnatatatttttttttttttttttttttttttttttttttttttttttttttattttatatttttttttttttgttttttttttgtgttttttttttttttttttttttttgtttntttttttttttttatttgttttttttcttttttttgttttagtttttttttttttgtcttttttttgtttttttttttctttttttttcttttttttttttt

SEQ ID NO: 5917 - DNA, 358 bp, Chlorella sorokiniana
  unsure (1)..(358): unsure at all n locations; Clone ID: LIB3602-084-Q6-K1-H12
gcgttcgtagcgatcaanaggctgtggcgcgggggtgggcggggggcgagaccaaaaanatcaacaccctcatccggcccgcggccagaagaaggggtacgtgcgggtgaccgccgactacgatgcgctggatgtggccaacaagattggcgtgatctaaagcgtgcggctggagcggggcgggggggccgcgctcccaacccacccttggcctggtgccaaggcgccggcagcctgcacggccaccccacgcggccgggggcgccggcgcagcagcggcagcggcgcgtcnggcgcagtgcgcagcccggcgcgccaccccggttgcgacaccacgtgctgtaaccaatcgttcggc

SEQ ID NO: 5918 - DNA, 507 bp, Chlorella sorokiniana
  Clone ID: LIB3602-084-Q6-K1-H2
ggcgacgtggtacactcgtgcggcacgggcgccgcgctgcagcaggtaccggtgcccgccgggttggcggggcggccgtacggcgagtttgtggctcacctgatgctgtcgcagcggctgctggcgctggggctgtacaggcgcaaaagcgagaacccaggcacgcgggtgagctacgtggtgtgcaacccacaatggcacgaaccgctggaggccacagaccgagtgtttgtgctgcggccgcgggaggccaccggccggtatgccgtcggcggttgaccatgatggtgcgaggtggtcttcaggcttgcgtgctgtccgtttctgtctggtgcctggcagtggcagttgttgttggctggtgacaataaatccaactgttgtttgaataggagtgtttgtgtaagacctggacaacatgccgggtttgttgctggctctggtgtccggcgccttgtggtttgggggctgggctcgatgatgtggtagtttgcttttgtgtgtttg

SEQ ID NO: 5919 - DNA, 437 bp, Chlorella sorokiniana
  unsure (1)..(437): unsure at all n locations; Clone ID: LIB3602-084-Q6-K1-H3
cagctacgnaactattaccactctacatgcagggacaagtttgnacgaaactgcggctgggnngctgcgcctannncgctcgctgcaaacgccctctgctcctggtacccgctcggcagcactaccacatccaggngcgcnncccccagccaccgcgaaatccagtgctgcccttgtgcagaattggagacaagggagcgcctctttcataggcagncaagcagtgnngattggcgccanttgagctgggcgttcgtgcctggacaacgctgctgggggtcacacacnaaggtgctgacggtgcangagcggcgacgacatgcccagcctggcccgcgaaatcgcgcaccacttcgacacccagggcacccccatcatgattggcggcggcgtgctggcctacaccctgctgggcattgctttcgacgagtccagcg

SEQ ID NO: 5920 - DNA, 575 bp, Chlorella sorokiniana
  Clone ID: LIB3602-084-Q6-K1-H5
agcgtccgcggagaagtgcaccccacccgcagcggcgagggcgacaccgaagcgccggtggagggtgacggccaggtggatgggcagcccgggcccggcgacgagcacgccacgttccgccaaggcctgctgcgccacttccacaagcagagcagcgcggccaacctgacgcggctggcggggccgggcgagctgcggcggctgcaggaggagacgaggcagctgcgcgaggagagcaaagccctggagggcgagcttgaggagagccgcatccgagcaaaggaggcagaggagcgggcggcggcagccgaggcggcagcactggagcagcgtgatgcggcgcgccgcgcggcagacgccattgtgcggctcaagcggcagctggggggcgccgagccgcccgcagcagcggcagatgtgaagcaagagggcggaggcgagcggccgcaggaaggcgccgcgccgccggcagcggcagatggcgctgcggcggttgatggcatggctgcagcagagaacggtgcggaagcagcggcctcgggcggcgacccggatttggagggtctggccacctc

SEQ ID NO: 5921 - DNA, 375 bp, Chlorella sorokiniana
  unsure (1)..(375): unsure at all n locations; Clone ID: LIB3602-084-Q6-K1-H6
cggncgcgtgggttggcgtccagcgcccgtactgtacattgcctgtacctgattaactgtgtttccatgtcagcaagccctgcagcagcggcgggggctcagcaccacccatcccatctgatgcacttcgcagcgccgtgctcgtgtcgccctactctgaacccatacccgaccaccattccctgcccatccatccatctgcccggcgctgccaattttgcttttgcccccatgcgcatgctgcaaccaagctgtggccgctgcacgtgatacccagtacattgccccactcggggcctgtttcacaatcccccgttccaatcaatctgaatctcatactacttgtcgagtcgagacagtaacgtcacccacagt

SEQ ID NO: 5922 - DNA, 576 bp, Chlorella sorokiniana
  Clone ID: LIB3602-084-Q6-K1-H7
cccgttcgacccagcgtccctgctgtgccgatcccaggcgggggggggggggcgcgacaagcatggaccgctttgaggcagccgggcagcgcagcagcatgggcgccgcggtggacgtgaagctggaggaccagcagaagatcaaccgggtcagccgggtcaacacgcggctgcacgagctgggaggggcgggtggggggcaagcgggcggatgccgaggacttggaggaggcgggcaacgaggtgatgctgctggacgacgagacagcgccctatgtggtgggcgagtgcctggtgcacctgccacgggagcaggtggaggagcggctgcagacggcgctggactaggcgcaggaggcaatccagaagctggagggcgacatccggtcgatcaaggggcagatggcggagctcaagacggtgctgtacgccaaggttggcaacagcatcaacttgggaagagtgatgtgcgctgctgtggcccgccgcgagcgggttgcgcagccatcagtctgcgcttgactgaccctaccatgtactgtggtcgattatcttttctactagccttcgactatc

SEQ ID NO: 5923 - DNA, 594 bp, Chlorella sorokiniana
  unsure (1)..(594): unsure at all n locations; Clone ID: LIB3602-084-Q6-K1-H8
tcccggttcgcccagcttccggcggctgcgctggccgcagcgggggcgggcggggggggggaggaagtgaccctgccgggcgccctggtgggggtgtgcgatggctgccgtgcagttgcctcctgcctcgcagcagacatgcactggcgcgggggcacccctgactctgtggatcgtgacgcgaacatcgcggtggggggggggagggagcanccacggcagcagcacggcagccagctggggagacccagggcagcagggcagcagctgctgctggtgccgctggcacaggcggcagcactctgcctgcctcgagcagtggcgtggaacgctacctgctggtggcaacttactaagggggagaggcgaaggcatatgtgccgatgcagagggccaaggaggcggcagtggatcacattgagcagatggcaggggagtatgggctgagctggacgatcatccgccccacggcctatttcaaggactttacagacatgccatggaagcacatgcagagccactactggatgctggtgccgggcggggggacctcgcgctacaaccccattgacggcgcgggagctggctcgcttc

SEQ ID NO: 5924 - DNA, 513 bp, Chlorella sorokiniana
  unsure (1)..(513): unsure at all n locations; Clone ID: LIB3602-084-Q6-K1-H9
gccggcggcggtgcctaccgccanatcaagggcaagccctaccccaagtgcgcgcttctgccgcggggtgcccgaccccaagatccgcatttatgatgtgggcgccaanaagcgggggggggggggcttccctcactgcgtccacctggtcaggtgggagaaggagaacatctcgtccgaggcgctggaggcggcccgcatcgcgggcaacaagtacatggggaagaacgcgggcaaggacgccttccacctgcgcgtccgtgtgcaccccttccacgtgctgcgcatcaacaagatgctttcgtgcgccggcgcagacaggctgcagacaggcatgcgcggtgcgttcggcaagccatttggtgtgtgcgcgcgcgtgggcatcggtcagatcctgctgtccatccgctgcaaggacactcactctgcggtggcggaggaggccctccgtcgtgccaagttcaagttccccgggcgccanaagatcgtggctagcaggaactggggcttcac

SEQ ID NO: 5925 - DNA, 446 bp, Chlorella sorokiniana
  Clone ID: LIB3602-085-Q6-K1-A10
accggaccggcttccctgttcgcccagcgtccgcgcttgtccccctgtgtcccctggtggcgggcttgccgggcctaaccatgtctgtgctttccctgttcagtctgtgcttgccgcaatggtgcagccagcattgccccgcttgtctcgagaacaacagatgtcccgcgtatcttgccttggcctttcctccccacatccaccgcatgggccacccacgctcaaatggcttcctatattgctgagcgagagtgttgcacgcatacacaggcaccgcacccaacccaacccaccaagcacccaaatgcatccccacatgccccaccccctcttgcccgccctgcacttgcactgcccctgcacgaattttgcgccgcaccgcacaccttatcctatctatcggatggaaaggccagctgctgatgcccctgtaaggtcataacaat

SEQ ID NO: 5926 - DNA, 474 bp, Chlorella sorokiniana
  unsure (1)..(474): unsure at all n locations; Clone ID: LIB3602-085-Q6-K1-A11
gtggnagagccggggcggcgctggggggggagtggatcggcgcgcacccgcagcggcaggggcagggcctgggcggcgccatgctgtcccacatctgcgagctggccgaccagcggggggtgcacgcttacctgggggcctccacccaccgatccaaggagctgtacgcgcgggggggggtggggcatgtggctgacaagccgctaggggatgaggagggcgcacccgtgctcaaggcatgggccgggcgccgtccagcgcgggcctggctgcagctgccgaggcgcagggcgcggctgagcgggcagcggcggcggcggtggggcaggcggacagtgtggaaacggactgatgagtgctgggggattgaaggcaaatgctgccattgtgagggacccattttgtatttcatttgctctgtacaacatttcattggatgccgtgatggcatggcgaaaatagaaaatgcagcgc

SEQ ID NO: 5927 - DNA, 515 bp, Chlorella sorokiniana
  Clone ID: LIB3602-085-Q6-K1-A12
ttttaaaaaaaaaaaaaaaaaaaaaaaatattgggggggggaagaagggaaaaaaaaaaaaaaaaaaaaaaaaaaaaaaaaaaaaaaaaaaaatttaaaaaaaaaaaaatattaatttattattttttaatttaaaaattaatttatttttttataataatttatttttttttcttttcccccccctttttttttttgtggggggggggtgaaatctttctttttcctacattttttttctttttcttaaactttttcctttttttccatttgttcttaataacacccttttcccccccactttttcctttttttaacaatttttttatccttatttttttattgggccttttctttttttttttccctttatagcgccgccttttttgttgtttactttttttcataacctttatttttctttagttccctattctcccccctctttttttttccttttctttttcttgttttacctccactttatttctgcctttttttcccctcatattttt

SEQ ID NO: 5928 - DNA, 458 bp, Chlorella sorokiniana
  unsure (1)..(458): unsure at all n locations; Clone ID: LIB3602-085-Q6-K1-A2
ccggtntcgaccagcgtccgcgcgtgnagcagcgagctgaagaagcgnatcagcaggcgcggctggccaanaagctgacgcaggcgcagctggctcagatgatcaacgagaagccgcagctgatcaacgagtacgagagcggcaaggcgatacccaacccgcagattctgtccaagatgtcccgtgtgctgggcgtgaccctcaaaaagaaccccggcaagaagggagactgcaggcgccggcatggcggcagcggcaggcccatacttcggctgctgcagcccgcatccggcaccccttgccttgcttgagcatttgattttctccatgtagctgccattgctctgcccgcttgcttacctctgcgcttgtaccaccacctgggccgggtgccatgcacgcgcgccgtcgttgcccagccctgcagtcagcaacatcttgtaaggctgatgcttgcc

SEQ ID NO: 5929 - DNA, 193 bp, Chlorella sorokiniana
  unsure (1)..(193): unsure at all n locations; Clone ID: LIB3602-085-Q6-K1-A3
tctcagcgattcacacagcccttcctctagcttgccttttcttcccanactcccgacgccgctcagcctatttttttttccacgcctgttttcctccttcctccgctgcggctcccttctctctgctcgcagcagcacgctgcctcccggtagtcactgtccatggcaacgcttgtttaacacaatacatgct

SEQ ID NO: 5930 - DNA, 207 bp, Chlorella sorokiniana
  Clone ID: LIB3602-085-Q6-K1-A4
aaaaaaaaaaaaaaaaaaaaaaaaaaaaaaaaaaaaaaaaaaaaaaaaaaaaaaaaaaaaaaaaaaaaaaaaaaaaaaaaaaaaaaaaaaaaaaaaaaaagggggggccgttttaaggggacccaagtttacttcacgcgggcttggcgacgtttttagttttgtttttggggtacccctaaatttgggtgggggggggccgggggt

SEQ ID NO: 5931 - DNA, 389 bp, Chlorella sorokiniana
  unsure (1)..(389): unsure at all n locations; Clone ID: LIB3602-085-Q6-K1-A5
ccanacagcgaanagcgcgcgtagtgggaggaagaacggatgcggcgcctngaacgcaagcggcggcggcagcgggccaagtaagcggcctgccccgcagcccagcagcgctgcggcgcctgggcgcagccgcccgctcgcacgcgtgcaacggcgctgcagcggccagccggggtgacggagtccgggcgcccggcagccgccgatgaaatgtgacggccgagtgtgtaatgctcacgaccgtgaaaaaaaaaaaaaaaaaaaaaaaaaaaaaaaaaaaaaaaaaaaaaaaaaaaaaaaaaaaaaaaaaaaaaaaaaaaaaaaaaaaaaaaaaaaaaaaaaaaaaaaaaaaaaaaaaaaaaaggggggggcctttttaaagagaacca

SEQ ID NO: 5932 - DNA, 582 bp, Chlorella sorokiniana
  unsure (1)..(582): unsure at all n locations; Clone ID: LIB3602-085-Q6-K1-A6
cnctgcgactggnaccgcgcacagcgccgctcttcagggctgggaggagacggaggactatgacgtgtatgaagaaccatggcttggccgcccaaggaggggccgcagccgacacgcgaggagtggttccttcagcatctgtgcgtggggcggggctttgacacggcatggagccggatgaagggcggcggcccctggagcatagacgactttgctctgtacagcgacgacacgggcgcggagcagtatgcattggacttgaaggcacagacgtcaaaggaccttggcatctgctgggtggcgccactggatgagacgcaagccttcctgcactcagacaagatatcggcattcggcaacggcagcctgtggtacatgaactacacgtcaggggcatgcctggtggtgaccgtgccgccagcggggcagggcgtgcgcgccgtggctccggcaccggcgccgcccgaagccagcgcttgagcggcatggggcggaggagcgttcggtgggaaggcgcgtcgacgaatgaactcactttccaccgatgcagcacctaccctaccatgtttctgcacttggcta

SEQ ID NO: 5933 - DNA, 569 bp, Chlorella sorokiniana
  unsure (1)..(569): unsure at all n locations; Clone ID: LIB3602-085-Q6-K1-A7
tcgtccccgcgtctccaaaaaaaaaaaaaaaaaaaattggggggggggggggggggggggaaaaaaaaaaaaataaaaaatataaaaataaaaaataaaaaaaaaaaaaaaaaacaaaaaaataagggcgggtccttacctaatttaaaccttagatctcaattttatatcttttttctatcctttctcataaaacccaattttttgggggggggggtgcaactttttaactttttttttttttcacctaacttaatttaatttacccnccttttttcccctttttaactgttaaaacctttncttttcccaccttattttccttncttttcaaccccttttctccctttatnttaattnaaaaaaaccctgggcgcgtcccctttcctaacttttttttcgcctttatgggcattgggacccttccctttgctagcgctttaacccccgctgctttggctttttccccttgctttaccgttacattttggcaggtccctaggtcccgctctttttcttttgttccctttttttttgggaattttgggctttttttccccttcaacctt

SEQ ID NO: 5934 - DNA, 556 bp, Chlorella sorokiniana
  unsure (1)..(556): unsure at all n locations; Clone ID: LIB3602-085-Q6-K1-A8
tgttggtgctacagcgctgcagctgcagactgttgacggaagcgtgcagagcacagcgtgggagcaagcgccagcgggctgcaggcaatggcctgggccgggtctgcgctgcgcagcctcgcaaggggcttgcgctccacaagcgcggggagggagggcgatcggtctctgcgaaatgcgacacggggttcagcgttgcacggggctgcagcagcgtaggtggaacgggaaacgggcacagggccaggcgggcagcctgcctcttcaggcgcaggtgctgtgcccagcggcaggtccagtgggagcggcagagcgctaagcgggagcctgctgctcacagagcgcccgccgcagcacgaggcaagcgagcgggagcggtatgcagactcggtgctgcggagcttccaagccaagctgaggggccagagtgcagctccggcggatgaggcaagcgcattacaggcagaagcaggagcatagtctnaggtggcgagaggagggtggagcaactgattgcgggcgggcaccagcgatgacaacttggggccgcatgtgg

SEQ ID NO: 5935 - DNA, 408 bp, Chlorella sorokiniana
  Clone ID: LIB3602-085-Q6-K1-A9
tgacacctttcacggtgggggggggggatttaatccgggggacttcgaggagctcttcacattcgctaccgctcccctccggatctggagcattgactattcaggtcgtctcctgcacctggctcattgatagtgctgctaaatacttttttatctaaatatggtcattcccttttcatggcgcaattcgtgaacggccccttactaagcttgtgactggcatatgcacggcttctgctatacatgcttgctgggctttgctatgctgctccgtggacttagaccaagttgaatgctgagcaggtacctcggcctttgctacatgtggacagaagctggaatggttaccattgtccaccaactgtcacatagtgcttattctttactgatgcctgaccccattttttg

SEQ ID NO: 5936 - DNA, 464 bp, Chlorella sorokiniana
  unsure (1)..(464): unsure at all n locations; Clone ID: LIB3602-085-Q6-K1-B1
tgccgaagnagcgtctngatcgggacaaanaggcgaccgctatcaagcctgcccagaagccgggtgtggaggaggccgaggccgcccccatccaccgtatccgcatcaccctgacctccaagaacgtcaagagcctggagaaggtgtgcgcggacctggtgcgcggcgccaaggagaagcagctcaaggtcaagggccccgtgcgcatgcccacccgcgtgctgaagatcaccacccgcaagtccccttgcggtaacggtaccaacacctgggaccgcttcgagatgcgcctgcacaagcgcctgatcgacctgcactcccccgccgaggtggtgaagcagatcacctccatcagcatcgagccgggagtcgaggttgaggtcaccatcgccgacgtgtaagcagccatttcagctgtggaagctggtcgcacggtgcgcccctgaccgccgctggcgggcggg

SEQ ID NO: 5937 - DNA, 575 bp, Chlorella sorokiniana
  unsure (1)..(575): unsure at all n locations; Clone ID: LIB3602-085-Q6-K1-B10
agcgtccgggtggnaggcgtggtgatctacctggagggcgagcagggctccatcaccgagcgcctggccaaggcccctttggtgaccctagccaggcctcgctgacctgcctggccaaccggccggtgacggtgcccgatgaggcggccatcagcgggcccgagggcaaggagatttttagcgagcgcaagggcatcaacctgttccagaacaagaacctgcgggtgcggcgcatctacgatgacaagaacaaggtcatcatctacgtggcgtacagcacccgtttcacgggcgctgctgaggagaaggagctcagcaccagccggtaccgtactagcgtctgtgcggtgcctgtgtcggctccctcgctggtgcctgtcagcgaggtggccgcggctcccgaggcgcaggagtgagcggcgcagcatgcggggcggcggggcgcctgcggctcaagcgatagggcggctgcagctgcgccctggcatagtccgattcatgaagcttgatggagcgttaccgcagtcgagcgagcgaggcagagcgagcagatgtgagcgcagccagaaaagtga

SEQ ID NO: 5938 - DNA, 488 bp, Chlorella sorokiniana
  unsure (1)..(488): unsure at all n locations; Clone ID: LIB3602-085-Q6-K1-B11
cagcgtccgccgtcgtcgaagtagccatcacggtggcgggggatcgangggcataaaactgcgcggcaagggcaaggaggagctgctgcagcagcttaaggagctgaagcaggagctgagcgggctgcgcgtggccaaggtcaccggcggcgcccccaacaagctgtccaagacaagtggtgcgcgggggggtggcccgcgtgctgaccgtggtcaaccagaagacccgggacgctctgaaggaggcgtacaagggcaagaagtacgtgcccctggacctgcgcgtcaagaagacccgcgccatccgccgccgcctcaccaaggcgcaggccaacgccaagactgagaaggctgccaagaaggcgcgcgccttcccgcagcggaagtacgcgctcaaggcgtgaaggccttggaagcagcccgctgcagccgtgcaggcacacctctaggcagcggccgctccggccccatgtaacttgacgcccgac

SEQ ID NO: 5939 - DNA, 82 bp, Chlorella sorokiniana
  unsure (1)..(82): unsure at all n locations; Clone ID: LIB3602-085-Q6-K1-B12
ccttccccttccttccaacttcatacctcttcttttgggggggggggggggatcccctgccccccnttttccaccttcttac

SEQ ID NO: 5940 - DNA, 64 bp, Chlorella sorokiniana; identical to SEQ ID NO: 625
  Clone ID: LIB3602-085-Q6-K1-B2

SEQ ID NO: 5941 - DNA, 453 bp, Chlorella sorokiniana
  unsure (1)..(453): unsure at all n locations; Clone ID: LIB3602-085-Q6-K1-B4
gtctcacacgcccacggacgccgcttgttggcctggctgccgccttcgctgccgtgaccctggtgctggcgcccgccgccaacgctgctgaggcccgcgcggaagtgaagagcgtggtgtgcgccagcaaccccacctccaagatctgcctcaaggacagcgccaagaactgaggcgtgccagctggactgagcgagcgctgagcccttgctggccgcacctgaggcaggcagccattgctgactgccggggggcaccgggccgccacccgctgcccggcagcatgggcgaggcggcgtgagaaagagaggacttgtgcactgccacacagttttttggacacctgtgctgtaacatatacttgaggaaaaaaaaagggaaaaaagaaaggaaaaaaaagtagagggnaaaaattaaaacaataagaaccaatgggttccaattaattaattg

SEQ ID NO: 5942 - DNA, 567 bp, Chlorella sorokiniana
  unsure (1)..(567): unsure at all n locations; Clone ID: LIB3602-085-Q6-K1-B5
ggcacccatctatgtgtggggtgccgccatcaccgcgctgccccacagggggagcgcttcctgtatgtagtgtatcccctngactgcctggcggccgcgtgcatcgtttgtggcactgtgcagcctcgccggtggcattctcggcatgctgctcccccgccacgctgccacggcagtggtgcagctgttcgctgcgctcttcctgttaggcagtggtctgctggcgttcagccgctccgctgctctggttgtcaactatggagcgcccctgcgcatctatcagcacctgccagaggttgagggcagcgggccacccatcagcgtgtgcaccggggcggagtggcatcgcttcccgtctgccttcttcctgccagggcagcgctaccgcctgcagtttatcaagtcaggttttgatggcctgctgccccaccagttcgatgacaagcagggtggcaccagagcagccccgccgtacttcaacgatcgcaaccaagaggagcccgctaactactggccttcggcttatggctgccactatgtggtcaccctgagagacgagcagggtgc

SEQ ID NO: 5943 - DNA, 300 bp, Chlorella sorokiniana
  unsure (1)..(300): unsure at all n locations; Clone ID: LIB3602-085-Q6-K1-B6
gcaccgtgtgcaaggcccagcacatgcacgccatcaagcgctgcaagcacttcgagnacggcggcgacaagaaggtcaaggggctatactagtaaaaaaaggagagcggcaggcggagagcatgaccgagaaatggaggcagcggcgcccgctcaccctgggcggcctgctccccgcccggcgcctcgctttggccgcctctggccactcgtacgcctccttgtccatgcccttgtgcttcctgagctgcccaacctggcatgcaagcagcctggccgtctgtaatgccattggcgtgtg

SEQ ID NO: 5944 - DNA, 383 bp, Chlorella sorokiniana
  Clone ID: LIB3602-085-Q6-K1-B7
ctgcgcttgcagtctccggcggcgggggggcgggcaccagctactagttccaggacctgagcggccaggacctgcgcaagaaccgggacaccaagggtgatctgcgcgggaccaagctgcggggcgccaacctggagggggtgacgctgtttggggcgctggccaccggggcggtggtggggggggagcaaacctgcggggtgctgacctggagctggttgagtttgagggtgccgacctgtgggatgcggtgctggagggggccatgctgagcaacgcttagttttagggcgtgaagaggatgaggggcgctgagtttactgagggggttatgcgcaagggcgtggagtatatggtgtgaaagatgggagacggggtgaagg

SEQ ID NO: 5945 - DNA, 496 bp, Chlorella sorokiniana
  unsure (1)..(496): unsure at all n locations; Clone ID: LIB3602-085-Q6-K1-B8
ccggttcgacccagcgtccgccttcgtcatcatcagcctcagggggggggggggggggcgggacaataaacatgagcatgctggcgcgcgtggaagaatctccagcagattgtgcgcgactccgtctaagcgttccccctgctgagcactgcgcgcctcgtgcgccgccgcatcggctgcgagcgcgctagcgagcggggggggggggaccacaggctgagctgcacccactgccatttgtaccgtctgtctagggggcactctcttgcttcatgtggngctgcaactaccttcactgctccacgctgcaccccgccccgagcaagccacacgcgctgatgagcagcgcatttgttcggcggggcaggtttctgataagcactgcaacctggtggccatagccgtctgtaaccgagccacagtgaaaaaaaaaaaaaaaaaaagaaaaaaaaaaaaaaaaagggggcggccgtgtctaaagggatccaagccttac

SEQ ID NO: 5946 - DNA, 208 bp, Chlorella sorokiniana
  unsure (1)..(208): unsure at all n locations; Clone ID: LIB3602-085-Q6-K1-C1
ggcggctggctggnatcggcactgnaaggctggggcctcggctggctggccatccgcacattcgaggtgccgcacctcaaacagcttgtggcgtgctgctgagtcagcaggagttgcgtcctgcgtttagacgcctgagaacggattcccggcgggtgatttttgtgcccgttcgacctcccccttcatgactcccgatcgacctccc

SEQ ID NO: 5947 - DNA, 563 bp, Chlorella sorokiniana
  unsure (1)..(563): unsure at all n locations; Clone ID: LIB3602-085-Q6-K1-C10
cccagcgtccgccgcacggcttagcgctcgcaccagtccaaacaccatgtccaaccccaaggcttcttcgatgtgtctgcgggctccacccctctgggccgcatcgtgatggagctgcgtgccgatgtggtgccccgggctgcggagaacttccgctgcctgtgcaccggggagaagggtgtgggccgctccggcaagcccctgcacttcaagggctccaccttccaccgcgtgatcccccagttcatgtgccagggtggtgacttcacccgcggcaacggcaccggcggcgagtccatctacggcgagaagttcgccgacgagggcttccagctcaagcacaccggccccggcgtgctgtccatggccaacgccggccccaacaccaacggctcccagttcttcctgtgcaccgtcgccaccccctggctggacggcaagcacgtggtgtttggcaacgtggtggagggcctggacgtggtgaagaaggtggagagctactgcagccagagcggcaagacctcccanaccatcaccatctctgactgcggccagctggcgtc

SEQ ID NO: 5948 - DNA, 574 bp, Chlorella sorokiniana
  Clone ID: LIB3602-085-Q6-K1-C11
agcgtccgggcgtacaaggctccaagtggggagaggggggggggcgccaatgcccagcgcttccagattccacggcgtcacctttgcgtccctgtaccccggctgcatcgcggagacgggcctgttccgcaaccacatcggcctgttccgcacgctgttcccgcccttccagaggggggggagcgggggctatgtcagcgaggctgaggctggccgccgcctggcgcaggtggtgagcgaccctgcgctgaacaagagcggcgtgtactggagctgggacaacgacaagtcctctctctgggttgactcggtggacggcgcgctggagaaccgcgtgtgtgaggaggtcagcgacgacaagaagggtgccaagctgtgggacgtctccgccaagctgggtgggctggcgcagtagacgactggccgcagcatttcatgttgatatttaatgcacccgacatccgcccgcaccagcaatgattacgccacatgctgtccatcgccagccattgcagcgccacagccacgcccccaacctgacccttctgtttgatcttttgcttgagcgcccctg

SEQ ID NO: 5949 - DNA, 492 bp, Chlorella sorokiniana
  unsure (1)..(492): unsure at all n locations; Clone ID: LIB3602-085-Q6-K1-C12
cgccttttcagccaccctcccagggggccagcaacgccaaaattctgaagcgaaagacagttttctcccctcctttcattccagtaccggggcctagctatcaaccgtctccccagcagggctgtcaagaatttttgttcagttaccggctctcgtgagctgtgggtggggggggggctgctgcttttcccccatccggcttgcgctgcgcatgcgccgccgatcctactaacctcccctttcagtacctccccttccagatcttaggtggaaatatgtattccaactggggctacaactccgccgcgccntgcgcgggggagttgtagcaggggggggtaccgaccgggcgccttcttacggggcacagcgcctacaacactcggcggtgccaaatatgtgtagcccgtgcactgtgccatgctggctccccttccagtgaccactaaaacgaatgtagcagactagcttgcgagaaaaaaaaacaaaaat

SEQ ID NO: 5950 - DNA, 201 bp, Chlorella sorokiniana
  Clone ID: LIB3602-085-Q6-K1-C2
tgtgcgtgtgcggcgcggcttgcagcccttgaagttgaacgaatatacgaagctgacttgtgctcggctgcttccggggtgccggtgctgcaacatgcgctggacccgcctgtacccttgcccgcaatcgttgtatcaagctgtggcctatcaaatgcgcatactgacggcctggccctcacgtgtaagctgtcttcgctc

SEQ ID NO: 5951 - DNA, 581 bp, Chlorella sorokiniana
  unsure (1)..(581): unsure at all n locations; Clone ID: LIB3602-085-Q6-K1-C3
gccgngtacttccgcncgcactccctggnggagcgcgagcacgcgcagnaactgattgacctgcagaacacgcgcggcggccgcgtgaagctgaacgccatcgtcatgcccngaaaccgagtacgaccaccccgagaagggcgacgcgctgtacgccatggagctgtcgctgtccctggagaagctcaacttcgacaagctgctgcacctgtgggaggtggtggacaagcacggcgacccgcagctgacgcagtacgtcgaggacatgctgcaggagcaggctgaggacatcaagaaggtggccgactatgtgagccagctgcgtcgcgtgggcaagggccacggcgtgtgggcctttgatcacgagctgtacgaggaagagatccgggcccgcgccacgcccaacgcatgagcgctcatcgtgccagagttgggcatggcgcagccaggagcagcctgagggcgagccgcgcccgctgctgcgcccagcacagcctcggcctctggatcgcagcccagccctccggaagtggcttgacaagcgcgcacatgcccagtgccaaagcgcggtttgtgccaat

SEQ ID NO: 5952 - DNA, 271 bp, Chlorella sorokiniana
  Clone ID: LIB3602-085-Q6-K1-C4
ggtccggccaacccgggtcgaccagcgtccggacatagagggagaaccacaagcgcggggctgggcgtacgagtaacgggaaatggggcaactggagcacttgcacgcagacccgctgcccatgctggctgcccaccacaagacccgggctgggagctaacctgggaggacgcacctgctgggacggtaccccgaaaactgcacaggaccacaaggaggtgaacacgaggctggacgaccgaaacaagccaaaaaggaggagtacataaac

SEQ ID NO: 5953 - DNA, 554 bp, Chlorella sorokiniana
  unsure (1)..(554): unsure at all n locations; Clone ID: LIB3602-085-Q6-K1-C5
gcngatctanactaggcggtggcatgtcacacgctgctcctcaccgggcgctcgccaagcaagctgcttgtgtctcggtgtatgggaaccatcacgcacgccgacctcatctccacctacgattcgcgtttccagctggagcgcggccaagagacggtgccattccgcctcacccgcaacatgcagtccttcattggcccacagggcatggaaggcatggtggtttgcgccatcactgcagcagcgcaggcgctgcaggcagagcctgccatcacttcatctatcgttgccctgttcttcagggatgacattctgtcctgggcagctcggcgcagtggagcgcgctgcatcgcggcactgaacgccagcctgaagacctcccagctggagacgtgcgtggcctggaacaccgcaacctgcctgaaccgtgtgggcaccatggcacctgcacgcaacggccatccgcagcagggcacccgggctcttgtggcagaagcagtagcgcctgccaatctgtgtcgcatgtgccctacgtggtttgcctggctgtaaca

SEQ ID NO: 5954 - DNA, 583 bp, Chlorella sorokiniana
  unsure (1)..(583): unsure at all n locations; Clone ID: LIB3602-085-Q6-K1-C6
ccgngaacttcaaaagtaccgcaccatcggggtcatccacgcccgctgggccatgcttggcgccctgggctgcatcttccccgaggtgctggagaagtacagcggcgtgcagttcggcgaggccgtgtggttcaaggctggcgcccagatcttcgctgacggcggcctgaactacctgggcaactccggcctggtgcacgcccagtccatcgtggccaccctggtggtccaggtgctgctgatgggcgccgtggagatctaccgcgccaacggcgagggccccaacggcttcggcgagggccaggacaccctgtaccccggcggcgccttcgaccccctgggcctggctgacgaccccgacaccctggctgagctgaaggtcaaggagatcaagaacggccgcctggccatgctctccatgctgggcttcttcgtgcaggccatcgtgaccggcaagggccccctggacaaccttctgcagcatttggaggagcccggggagttcaacttctacgccctgtacgccaactccctggcgtaagcagcttgtttggagcacctgcggcggccgaggcggcggcgc

SEQ ID NO: 5955 - DNA, 586 bp, Chlorella sorokiniana
  Clone ID: LIB3602-085-Q6-K1-C7
cccggttcgaccagcgtccgtgcacgcattcctgccctagccgggtgggggggggggggcattgacgatcagctgcgtgactactgcgttgagcacaacatcaaccactattaccgggcgggggtgatcccagactcccagaaggacaccggctccaaccacgccatctcagccatgaagtatgagatcatccgcgggtgcctgcagctgggctacggcgtgctgctgagcgacgtggacattgtgacgctgcaaaacccgttcgaccacctgtaccgtgacagcgacgtggagggcatgaccgacgggcacgaccccggcaccgcctatggagagatctacggcgtggactacccctccatgggatggagccggtatgcgcagggcacgcggcacatggccttcaactcaggcctcttcttcgtcaaggccaatgacaagacgatcgagctcatgacacgcatcgcggacaagctgagcaagcagaaggagtgggaccagagcgtgtggaacgagtacattttcttcctatcccacggcgactacaagtcaccacagatcattgcgcgggtcatggacttttaca

SEQ ID NO: 5956 - DNA, 576 bp, Chlorella sorokiniana
  unsure (1)..(576): unsure at all n locations; Clone ID: LIB3602-085-Q6-K1-C8
ggnagcagcagcagcggcagcggggagggagggggggggggcggaaggcggcagcgggcacagcattgagctgaaggagcgtttctacgctggtgcagcagagctgtttgagtgcttcacggtgcccccacgcatgatggcctatacccagagccccgcagaggcggagcctcaggcggggggggagttcagcctgtacggcggcagcgtgcagggcgtgttcagggaggttgttcccaaccagcgcatcgtcatggactggcgctttagcaactgggaggacggcgcgtactctcgggtggagcttcgctttgaggagcccgaccgcggcaacaccattgtgaccctcaagcagacaggcatcccggatgccgaccgctttggtcaccacgacgtggttggcactgtggagtctggctggcggcagcaggtgtttgaccgcatccgccgtgtctttggctacggctgctgagcggtggcgctctagcaggctgcgcagctggcgtggctgcagtcgcgactgcaaggcacgggtggcatggagcagcagcggcacggcggcggcagaacgtgtat

SEQ ID NO: 5957 - DNA, 112 bp, Chlorella sorokiniana
  Clone ID: LIB3602-085-Q6-K1-C9
gcgaaaaaaaaaaaaaaaaaaaaaaaggggggggggagggaggaaaaaaaaaaaaaaaaaaaaaaaaaaaaaaaaaaaaaaaaaaaaaaaaaaaagggggggccgttttaaa

SEQ ID NO: 5958 - DNA, 545 bp, Chlorella sorokiniana
  Clone ID: LIB3602-085-Q6-K1-D1
aaaaaaaaaaaaaaaaaaaaaaaaaaaaaaaaaaaaaaaaaaaaaaaaaaaaaaaaaaaaaaaaaaaaaaaaaaaaaaaaaaaaaaaaaaggggggggccgttttaagggtacccaattttacttccgcgtgcttgcaacgttattttttttttttggggccccctaatttaatttttggggggggggtttaacaacgtcgggattggaaaaaaccttgggtttcccaaatttaatccttttgaaaaaaatccctttttcgccagttggtgtaatagaaaagaggcccgcacggagggcttttccaaaaatttgggaattttgaatggaaaatgggacgccctttttaggggcattttaaggggggggggtgtgggggttatgggaagggtgactgttaattttgaaagggtaatagggccggttcttttcgttttttgggattttttttgtggaaatgtttggggttttttccctgtaaggttttaaagggggggttccttttggggttggtaattaagggtttaagggatctttgtcccaaaa

SEQ ID NO: 5959 - DNA, 495 bp, Chlorella sorokiniana
  Clone ID: LIB3602-085-Q6-K1-D10
gggggggaaaaaaaaaaaaaaaaaaaaaaaaaaaaaaaaaaaaaaaaaaaaaaaaaaaaaaaaaaaaaaaaaaaagaaaaactttaataaagggtgtcaattttttttaaagtgtcatttttttatttcttcgtcttttctttatttttcattttttggggggggggggggcctccctttttttacatccattcgcgactgttaaaacctttgggatttcccaaattttattcgttttgcaaacatttatccttttttctccaattgccctttttttccaaagaggccctaatcggggacgctcttccctcaacttttccccccttcctcaaatggaaattgggggctgccttctcaaatgggcttttttcttctcggggggctttatgtttccctcactattgagacctttacttttgcttgtcctttttaactccccctactttccctttttccttcctcttttttttttggtcacctttcctttttttcccc

SEQ ID NO: 5960 - DNA, 411 bp, Chlorella sorokiniana
  unsure (1)..(411): unsure at all n locations; Clone ID: LIB3602-085-Q6-K1-D11
ttcgcagtccaacagcacggntccgggggggccggggcggcaagcatatgtaccagctggccaagaagaagacctcccaccccacctgccccatctccggccagcggctcaatgggctgcccgcggggcgccccaacagcctgcaccgcgtgaacaagagcaagaagacggtgcgccgggcgggcgggggccacctggcggcgggcgtggtcaaggagcgcatcgtgcgcgccttcctgggggaggagcagaagatcgtgaagaaggtgctgaagctgcaggctgccaaggaggctgcgcaggccaaggccgcggcggcaggcagcaagggcaagaagaaggccaagaagtgagcggcgcacgcgagcggacagttgcgccccatgctcccgctgtaatgcaccctcgatg

SEQ ID NO: 5961 - DNA, 537 bp, Chlorella sorokiniana
  unsure (1)..(537): unsure at all n locations; Clone ID: LIB3602-085-Q6-K1-D12
tggccccgagctgaagnaagcactgctgcgtcatccccgcgtgctggcgcacacccaggtccgcaaggtgcccatcgcccagaagaaggcgcacctgatggagatccaggtgaacggcggcaccgccgcccagagggggggggtcgcctacgacctgctggagaaggcggtgcccgtgtcgtgtgtgttcacccagaacgagatgatcgacgccatcgccatcaccaagggccacggcactgagggcgtggtgacccgctggggtgtgtcccgcctgccccgcaagacccatcgcggtctgcgtaaggtggcctgcatcggcgcgtggcacccggcgcgcgtgggctggaccgtggcccgctccggtgccatgggcttcaaccaccgcactgagatgaacaagaaggtgtaccgcatcggtgtgaagggcgaggccagccacgccgccaccaccgagcacgacgtgacggtgaaggacattacccccatgggcggcttcccccactacggcgtggtcaaggaggactatgtgatgat

SEQ ID NO: 5962 - DNA, 495 bp, Chlorella sorokiniana
  unsure (1)..(495): unsure at all n locations; Clone ID: LIB3602-085-Q6-K1-D2
cccggttcgcccagcgttcgcatgattggcaagctggnacgcacgagcctgtctttgcgccgccgcccggccagcagcagcagcagtatggcggcggcggctatggtggcgggcaggcccagtggggcggccagccccagcagggacagggccagtggggcggtggccagcagcagaacaagccgaccacgccgggcggagcacagcagggcggctggcagcagcagcaggggtacggcggtggcggcggcgcctggcagaaccaggctcccaacatggcggctggtgggggcggctggcagggcggctggtaagccgggcagcgaatggctgcatcctcgttcttgcaccctggaaactgcatgtaggttagtttacatggcattcatgggtagctgtccattctgtgtgctgtgacatggcacancananaaaaaaaaaaaaaaaaaaaaaaaaaaaaaaaaaaaaaaaaaaaaaaaaaaaaaaattaataag

SEQ ID NO: 5963 - DNA, 524 bp, Chlorella sorokiniana
  unsure (1)..(524): unsure at all n locations; Clone ID: LIB3602-085-Q6-K1-D3
tanacatgcgccgcgtgctgcgncagnatgccagcaagnaggaggaccagctgggcgacacgtccaccctggccgaccccggcgtggtgcaggtgctgctggagctgcgcggcaagtaaactgcgatagtatgcacttacgcgagtgacaccggcagcccggctgcccgcccgcccaacagggatacacagagccggccccccacgaacgggcggcggttgaacgagccacccctaacctcatgcaccctgaacccaatgcctttgcctgtttccgtttccctgccgctccgctctctgaccgctcagtctctccgggggctttgtcgcacgcactcgagttttccccagtggggggcgcggaccatgcgcccgcccctcgagccccattttgtccttcagccactgtagattccaggcccagagtacccccactgttgtaacaattggaaacgcanannaaaaaaaaaaaaaaaaaaaaaaaaaaaaaaaaaaaaaaaaaaaaaaaaaaaggggcgggccgtt

SEQ ID NO: 5964 - DNA, 383 bp, Chlorella sorokiniana
  unsure (1)..(383): unsure at all n locations; Clone ID: LIB3602-085-Q6-K1-D4
ggcgtacgtgnacggcacgctagccgcctngagnanaagccgtggcactcgtactgtagcaagactcgctggaggtgatactaacctttggccctcgtgactcgatgatttggatgctacctttccattccgattttcttgttagaacacacaggtcaaaaaaaaaaaaaaaaaaaaaaaaaaaaaaaaaaaaaaaaaaaaaaaaaaaaaaaaaaaaaaaaaaaaaaaaaaaaaaaaaaaaaaaaaaaaaaaaaaaaaaaaaaaaaaaaaaaaaaaaaaaaaaaaaaaaaaaaaaaaaaaaaaaaaaaaaaaaaaaaaaaaaaaaaaaaaaaaaaaaaaaaggaaaataaaaagaaaaaaaagataaaagagagatggagggg

SEQ ID NO: 5965 - DNA, 576 bp, Chlorella sorokiniana
  unsure (1)..(576): unsure at all n locations; Clone ID: LIB3602-085-Q6-K1-D6
cagaccccccatcaaggagcgcaggccatcgccgncgacatcttcgccgactttgtgtccgaggaggtggacaaggtggagatgatctacaccaagtttgtgtccctcatctcctccacccccgtcgtccagacgctgctgccgctgtccccctccggcgagatctgcgacatcaacggcaactgcgtggatgccgccgaggacgaggttttcaagctcaccacccgcgagggccagctggtggtcgaggccgagaaggtgcgcaccgagaccggcgactttgacgccggcctgatctttgagcaggaccccgtccagattgtggacgcgctgctgccgctgtacatgaacgccaccctgctgcgctcgctgcaagaggcgctggcctcggagctggcggcgcgcatgaacgccatgaacaacgcctcggacaacgccggcgagctcaagcgcagcctcaccctcattatgaaccgcaagcgccaggccaagattaccacggagctgaccgagattgtggcgggcgcgtcctccgtgtaaattttccttggcttttggacggcaggggcggtttgg

SEQ ID NO: 5966 - DNA, 205 bp, Chlorella sorokiniana
  Clone ID: LIB3602-085-Q6-K1-D7
cgtaccagcgttcgcccgccgccgccacagcacaggggggggggtgggggggcaaacaaatctctgtaccaatgccctttgctgctgcgtcgctcgccgggcagcctgacacaccgttccaatatgcatgtgaccctgttgacgtgcctgccccggcacaccatgcttgtagcgcctagcagcgggggggggggagagaccatac

SEQ ID NO: 5967 - DNA, 580 bp, Chlorella sorokiniana
  unsure (1)..(580): unsure at all n locations; Clone ID: LIB3602-085-Q6-K1-D8
cggcggnaggcggnagggcgcgcccgctgctggngctgccacaacaagctgcgggtgcgagacttctttgtnngccgcacgagacnngctgtgccagnaacgagnaaggtggnacnnctagtgcnntgatgcccnngccaccacgggtgacgtttggcgtcatgccccggccacgntgcccactgtgggcgcggggggaggggccggcgtggtgacggtgcacaaggagctggacaagagcgtggagaagtactttgtcagcggcggctttgcctttgtgcaccccgacttcaccgccgacatctgcgcggttgaggcggtgaaggtgaccgacctggatgccgaggcggtgcgggcggggctgcaggagtacaccaccaagctggcggcgctgcagggcaagggcgatgactacgaggccgccgccgcgcaggtgggcgtcgaggtctactccgcaatgaacgccgctctgggccactaagcgcccgccttccagcatgccggcgctcggcagcagcgccagctgcggtggcatcgataggggctgccgtggcggcgcgccgctcgggcgctcgggttg

SEQ ID NO: 5968 - DNA, 310 bp, Chlorella sorokiniana
  unsure (1)..(310): unsure at all n locations; Clone ID: LIB3602-085-Q6-K1-D9
ccgggttcgaccagcttctgnaaanaaaaaaaaaaaaaaaaaaaaagggaaaagggcggccgcaaaaaaaaaaaccaacaaacgaacacaaacaaacaaaaaaaaaaaaaaaaaaaaaagagacaccaaaaaaaaaaaaaacaaggccgacgaaaaaacaacgacaagaaaagggaaaaacccngnncnnncacccaaccngattttgttttgtggggggggccccctnnncnccancttgncnnaatanncgaaaaggaaagaaaaaaaaaccccttcccaaacaaaacaaagcctgaatggcaaatgg

SEQ ID NO: 5969 - DNA, 624 bp, Chlorella sorokiniana
  unsure (1)..(624): unsure at all n locations; Clone ID: LIB3602-085-Q6-K1-E1
gctgtccnngccaccggcgccggnctccgnaggcctacaagnnctctgagctgagccgacatctttnntgcaacagctctgagcnncgctgagctgaccctggctnncatgccagctggcatnngctgcagcacccccagcccgccaannncagcctggnacagcagnnctggctgattggtgttgcgccgctggnncctgtgcagcnnaggggcgctgcccggcttgccacaagtaatngcannnccttaatccacagcatccctcacttttcacctcgnnctgcgtgctgcnnatctcacgagcnnactattattgnnccgctacccgttgcttcaaataccttggatnntgcgcagcctnngccgccaccggtcttnngcttccgtgccgccccaggctgtgcaatgcaaagccgtcttaaccgccctcagcctttntttgggcgnctcctnttcatcccttgcccaatcgcnncatccccttccttccccttccctttgcccctcaagccannctcagcagnngtttcaatgcgctaaccacccnntgccgctcnncccctgcgaatttgtnntgtacccatttttctnggtgtcgcaagcaccttgccctttctgcctg

SEQ ID NO: 5970 - DNA, 431 bp, Chlorella sorokiniana
  unsure (1)..(431): unsure at all n locations; Clone ID: LIB3602-085-Q6-K1-E10
gcggcggcacggggggggggggggggcgggcagtaacagggcgcaaggaggtgagcccatgggaagtgcccacatgcagccatcagctcgtgggtcccgtgctccctgctgcttgttctggggtgggcgtgtgtgcttttctgggctgctgactgtcanccgcttggggtgcgctgctgtgcgccacctcttccctttttccagcaaaataaggtccagtgtgcctcttctgctgctgaaaacgagtgatactaaaacagaggcatgccatcgtgtgcatttacaaacccgtgggcctgctgcctggggcactacgaatgctgccttttcctgggtgcatgccctctccgaacgcacccttgcacccctcaatgtgctcaggtacccctcagccaactcgcggaagaacctgtaataaatgacatccaana

SEQ ID NO: 5971 - DNA, 416 bp, Chlorella sorokiniana
  Clone ID: LIB3602-085-Q6-K1-E11
gggggggggtgggaaaccccggggcgctctctttccaggctgagctgtctccctcggctgcagccagcgtggaggcaaatgcataccgggacttcacgggccacatcgggcaggcccacatggccaacttgagcgacgccgcgcgaggggggcgctgcaccctaccgattcctgttccatgcccaggcagcaagcagcgggtcacacgtgctggtgcagatcaccgtcagcaaggcaccaccggcagcagccgtggtgatcaagagcggggacgcagcggcggctgcacatgtccaggagctgctgcagacgctgctgcttacgctgtgaggcagcggcagcagctcgcgcttgcatgttgacagcagtcggcgtccccaagcatgtgaatgcgacttgtaattgtactgcatcgt

SEQ ID NO: 5972 - DNA, 534 bp, Chlorella sorokiniana
  unsure (1)..(534): unsure at all n locations; Clone ID: LIB3602-085-Q6-K1-E12
cctgtgtggtccctctgggggggggggcttganngagtatannaaccaagctcgcgtgcgtttactccgtgctggccctggccgacgatggcctggaggtcactcccgagaacatcgtgaccctgaccaaggccgccggcatctatgtggagccttactgnccctccctgggggggggggggatcnanacnnaatccttnnnagacttcatcntcaacgttggcgctggtggcggtgcccccgccgcggccgctgctgcgcccgccgccggcggcgccgcggcctcggaggagaagaaggaggagaaggttgaggaggaggaggactaggacatgggcttctccctgttcgactgatctctctgccggccgcggccagccaccctccagtgcctgggccgctccagttgcagcggcagctcgatccctcgcctgcggcacgtacggcgtaacgtggcggcagcggcggcggcagcctaacggcgtgtttgtctcgctgccgtcccagctgcggcgcatgtaacgcactccttcc

SEQ ID NO: 5973 - DNA, 490 bp, Chlorella sorokiniana
  unsure (1)..(490): unsure at all n locations; Clone ID: LIB3602-085-Q6-K1-E2
cccggttcgacccagcgttcgtcaaccatggctgagaccgccccaggagcgtgaggacgtccctgcggccaagttcatcgaggccttcgccgcctacctgaagcagaccaacaaggtccagctgccgnagtatgtggactacgtgaagaccggctctttcaaggagctgtctcccctggaccccgactggtactacgggggggccgccgcaattgcgcgccgcgngnacatcaaccaggggatgggtgtgggcgcgttccgtcgcgcctttggtgggcgttccaacgccaagggctcggtgacccctgagcaccacgccaaggtggggggcggtattatgcggcacgcactgtagtagttggaggcgatgggtctggtggagaagaaccccgnggtctagggtggtcgtgggattactggggggggccagcgtcagatggatntggtggtgggtggtgtgattgtgatttgttttcaatacctgggctga

SEQ ID NO: 5974 - DNA, 595 bp, Chlorella sorokiniana
  unsure (1)..(595): unsure at all n locations; Clone ID: LIB3602-085-Q6-K1-E3
gnacagttccggnacattctccagnagcagggctacgagtacgacgcaaccatcctggaggccttcaaccaagtcacctccccctcctttgctgagcgcctcttcccctacaccatggacaacggcatcccccagaactgcgcgtggtccagcgaccctgagtcgcagtgcaccgacacggagaagcacgcgggcctgtgggaggtgccgctgtggacgctgcccaacgaggagggcgcccccgcccactccatggacccggtggccaaggacggcaagccggagcacaccagcgagctgctgatcaaggccttcgacgaggcctacaacggcaaccgcgcgccgttccccctgttcgtgcacgctccctggttcacctttgacaacactgcggcggcaattgcattcatggagtatgccacccaaaagcaggacgtctggtttgtcaccttctcccagctgctggactggatgaagaacccagtgcccgcctcccagtacagcccctcctgccagatggtggagcttacccctcccaccaccgagtactgccgcacctacaaggctggtcctattgaggatgtgtggaccattg

SEQ ID NO: 5975 - DNA, 566 bp, Chlorella sorokiniana
  unsure (1)..(566): unsure at all n locations; Clone ID: LIB3602-085-Q6-K1-E4
ngacaatnaggcagnaccgtcagtgctgcgcttcnctgacgcgtcccgggaagagtggactcggtgcagctgcgcgacgacctgctgtccatgctggttgccggccacgagaccacgggctcggtgctgacctggacggtcgacctgctggcgcggcaccccgaaagctgcgcaaggcccaggaggaggtggaccgcgtgctgggcgaccgcagcaagccaaacatggaggagtacatgaacctcaagtacgtgatgcgctgcgtgaacgagagcatgcggctgtacccgcacccgcccgtgctgctgcgccgtgccatggtcgaggacgagctgcctggcggcttcaccgttccgcgcgggcaggacgtgatgatctcggtctacaacatccaccgctcgcctgcggtgtgggaacggcccgacgactttgagccggagcgcttcccgctggacggccccgtgcccaatgagcagaacacggactacaagtacatccccttcagcggcggcccccgcaagtgcgtcggcgaccagtttgcgctgatggaggcggtggtggcgctg

SEQ ID NO: 5976 - DNA, 542 bp, Chlorella sorokiniana
  Clone ID: LIB3602-085-Q6-K1-E5
aacagccagcattacatgagctgcggaaggcgcacgctgcgcgcaatgaatatgaaaaggcaaagggatcgccggtgggggacagatcgggagggggcaaggcgtgtgttgggcttcttgtccgagagcgggtatgtgtgggggaggatacaatacagctacatgcattgagatgaaggagcggctcgtgtggggggcagagcgggtggcaatgaaacatagtgaggctaggcaggtggggagctgcggaggctgtgagggggcaatcgcattgggagaaactgaggcgggcagccgcagccctgttgccagggaggcagcaagcccagagaagagggggaaggcaggccggagggtggcgatcagcatgcagtctgctgagaaaagtccgaaggcagggcaagtcctggacggcatcgataggatggattggatggggcacagcgcggcaccgccaccacctgcctgccgctcagcagcaggcgggcgggactccagttggcggaggcagcgcagtcccctgggtgctgtggatttgggtc

SEQ ID NO: 5977 - DNA, 391 bp, Chlorella sorokiniana
  unsure (1)..(391): unsure at all n locations; Clone ID: LIB3602-085-Q6-K1-E6
gcngaggggaggcanaagnagtacaggcccgaanggccactcccaagctgtttgctaaagcgcgcggcaactgcagcggccctgcagcactcacagcacgagatgcgcaccgcatgttctcgccctgggagccggtgctcaccgcgcccaaccgcaccctggcctgccagcggctccgctcgtttgtgagccgcccgtacgagcacccgctgctgcccacctgcagccttgcggcagggcagtttgtgggcgatgcggcgccggcggtgcttcgcctgtttgcaggcacgtgcgcagcagccgaggcctccccaccgggagccatgactgagggcgaggcagcgatagacagcaagctgtacctgctgcgtggcagggcctgcacgcttgt

SEQ ID NO: 5978 - DNA, 285 bp, Chlorella sorokiniana
  Clone ID: LIB3602-085-Q6-K1-E7
gcggcggctgcacgagtagcggcaactgggcagcaagggcccatgtgacagccggcaagctgctacacttgcttccctgggcgggagcacgtgtgtgtgccacgcacatttgagcatgcctgcctatcctgggcatgccaatgctgccagttttttgcagcgggtctcatgacctgcggccatgtattccttcaatcacttgctgtgtgtgtgtgaaaacatgctcgttccttgtgtcaatgcgtcaaagcgtctcgtgcatgagaaacaaaatggatgtaaggc

SEQ ID NO: 5979 - DNA, 575 bp, Chlorella sorokiniana
  unsure (1)..(575): unsure at all n locations; Clone ID: LIB3602-085-Q6-K1-E8
ctcttgcccagccctccacgggggggaggggggggggaggccaacttcgccgggtctaagctgcagcttggcgcgcgcgtcagccgcaagagcgtgaacaccaccgtggtggcctccagcggcaagaagatcgacatcagcaagcagggcctgaactccatccanaatgagaggggggggggcaacctgatgggcaagtccaagaccatgggagagcaaggactgggtggacccccagggccgcaagggcaagggctacggcgtgtaccgcttcgccaacaagtacggcgccaacgtggacggctacagcccgatctacacccccgacacctggtccgaggctggcgactcttacaagctgggcaccaagggccttattgcttgggccggcctgattgtggtgctgctgggcgtgggcatcaacctggggatctccacctctgccctgggccagtaaatggcgacgccccccgcgtcggcagcagcagcagcagccagcagcattcccttgcagctaccccccgagaagacaaaccctcaccctaccctagctggcggcgtcaccatgcgccgct

SEQ ID NO: 5980 - DNA, 606 bp, Chlorella sorokiniana
  unsure (1)..(606): unsure at all n locations; Clone ID: LIB3602-085-Q6-K1-E9
tacgggttcgcgtccgccaccaaggggtggggcgggggcgtgaagccgtcgtcaacctggggcgacctgggcatcccatattaacggggggcagccgggtttggacaagcacacacaacatatgagattcccaacctccctgcgcactgcttgtaacaatcctggctccctcttgtggcgtgggccgcactcgggcgtggatatgtaacgttccgcggggaaaaaaaaaaaaaaaaaaaaaaaaaaaaaaaaaaaaaaaaaaaaaaaaaaaaaaaaaaaaaaaaaaaaaaaaaaaaaaaaaaaaaaaaaaaaaaaaaaaaaaaaaaaaaaaaaaaaaaaaaaaaaaagggggggggggggcccttttaagggttcaaattttacaacccggggctgggaaggtaaaattttttttttggggcccccaaaataaaattcgggggccgggttttaaaaccggggggaggggggaaaaccctggggggccccaaattaaaggggtttggaaaaaacccccttttntcccgggggggtaaaaaacaaaaagggcccacccgaatcccctttcacacaatgtccccccccttaaagggaaaaggggccccc

SEQ ID NO: 5981 - DNA, 583 bp, Chlorella sorokiniana
  unsure (1)..(583): unsure at all n locations; Clone ID: LIB3602-085-Q6-K1-F1
ccggttcgacccagcgttcggccgggggnanagcacgagcagnacttcgtgaagaccctcagggcaagnacatcaccctcgaggtggagtcttcggacaccatcgagaatgtgaaggccaagatccaggacaaggagggcatcccccctgaccagcagcgcctgatcttcgccggcaagcagctggaggacgggcgcaccctggcagactacaacatccagaaggagtcgacgctgcacctggtgctgcgcctgcgcggcggcatcattgagccgtccctgcagatcctggcccgcaagtacaaccaggacaagatgatctgccgcaagtgctacgcccgcctgcacccccgcgctgtgaactgccgcaagaagaagtgcggncacacctcgcagctgcgccctaagaagaaactcaagtaaactactcgcttcggcacgagcggaagcggcatgagcggcagcaaccgctgcccccccccccgccccgccagccgggatgccatgacagcaccggttgctcagctgctgatgtgctgcatgtcaattgctgctgcggaaatgtaacggtggtagcgatcaaa

SEQ ID NO: 5982 - DNA, 571 bp, Chlorella sorokiniana
  unsure (1)..(571): unsure at all n locations; Clone ID: LIB3602-085-Q6-K1-F10
agcgtccgcggccgcgtgggcgcatctgcacaggggggatgtncggctaaactacccacgtccagcagcgcaaacagcggcagccagcagaggaggggcgcagaatgccggtctccgcgccgatcttcggcgcggcgctgggcgtgggagtgcagctgtacgtcaacgccgtgcgcaagcggcggggtatgcgcgacccttggctccatgtgctgtgggcgggcgctggggcctccttcggcacctggctcgtctcgtttgaggagcgcacggagaaggaccttgcggagctgctgcggaagcgcgaggaggccaacaagcacatccagcaatgagtgccatccaccttgcagtagcagcagcagcagcagcagcagcagcagcagcagcagcagcagcagcagtagcacggcggtgatggcagcggctaaagcattcagctagccagcgccacagcccgtgccgcagcagcaagtcggcagcggcccgaggcgcgtctttggaacaaagcagcggttgatccgcggcctgggctgccggcgattgtacactcattgtgcagaggcgctag

SEQ ID NO: 5983 - DNA, 59 bp, Chlorella sorokiniana
  Clone ID: LIB3602-085-Q6-K1-F11
aaaaaaaaaaaaaaaaaaaaaaagggggggggggaaagaaggaaaaaaaaccccttcta

SEQ ID NO: 5984 - DNA, 510 bp, Chlorella sorokiniana
  unsure (1)..(510): unsure at all n locations; Clone ID: LIB3602-085-Q6-K1-F12
nctagttctagnatcgcgacggccggggttggtttgtttgtttaaaaaatttttttttttttacataccatttgttacacattaagtcctggtaccagatcggcataagggacgcaaaaggcactgtacagtcgggccttgaaaagggtctggataccttggacgtgtgggtgagggggggggggagcatgatggatgggtttggcagcagctttgcatggcagcagccgctgtgtgaagcgcgggtgaagggtggacatggagtgaggtgtgggaggtaggatgtgcggcggtgagcggcaggaaaggtggcgggtggaagatgggtgcgggtgagggggggggaggtggtgcaacggcggtctttcgtttggggtggcagatttggtggatggggaggatggtgcatggagggcgttgagcgggtgatgggtggtgagtgggtggcaaaaaaaaaagcggagggaaggtgagtggatgggtggcaggtgggtgggttgggtgtgggtt

SEQ ID NO: 5985 - DNA, 460 bp, Chlorella sorokiniana
  unsure (1)..(460): unsure at all n locations; Clone ID: LIB3602-085-Q6-K1-F5
cnctattcggcagtgccagcagctgcagcagcaactggcgggcccgncgtgacggccctggccatgcaccgcctggacaggctcatcgctgtgcctgaggcacaggcggcgggtctgaccgaggacctcttggacacatttttttcctgcctgtacttcggcctggacgccgaggcacgccgtggtgtggccgccatgctgcagcagcgcatggatgatcgacagtatgcccgcatcgtgaagaacctgcgtgatgcggtggctgcggcaggtgctgcacgcagcgcaggatgacgatcctggccccgcttcgctgcccgagcgacccagcatgcacagccttgacgtgtcagcatctttcacttctctgcacatgcatcagactctcagccttgacatttactgctccatctttgtacagtgtatatgagcagcggccatcaatgtaatggctaatgac

SEQ ID NO: 5986 - DNA, 592 bp, Chlorella sorokiniana
  unsure (1)..(592): unsure at all n locations; Clone ID: LIB3602-085-Q6-K1-F6
tccgnaaaaaaaaaaaaaaaaaaaaaaaaaaaaaaaaaaaaaaaaaaaaaaaaaaaaaaaaaaaaaaaaaaaaaaaaaaaaaaaaaaaaaaaaaaaaaaaaaaaaaaaaaaagggggggccgttttaagggacccaagtttacgggcgcgtccttgcaaggtcatagcttttttttgggggccccttaaattaaattcccttggcctgtggttttcacaccgtatgaaatctggggagaaccccttggtttttaccaccacctttattgggccttaaaccaaattcccctctttcgccagttgggttaaaacaaaaagggccttccccgttgggctttccaaacaggggccccccctgattggcttttgggaccccccctttagcgggtctttaagcggggccgctcttttgtttccccccaaagggcccgttacttttgccagtcccctaccgcccgctcttttcgtttttttccttttttttctcgcccttttggctggtttcccccgttaagctttaaaggggggggtctttttcgggtcccttttaagggttttccggcccttgggccccaaaaaattgtttaggggg

SEQ ID NO: 5987 - DNA, 485 bp, Chlorella sorokiniana
  Clone ID: LIB3602-085-Q6-K1-F7
ttttggggggggggtggtttttttttattttttttttttttttttattttttttttgttgtttaaaatttttttttttagtggggggggtatatatttatagaatagggggtaatttttttattttttttaaagggggggggggggggaaaaaaaggggggggggggggggggggcaataaaaataaaaaagggtgtaaaaaaggggggccacagaaaaaggcccgaggagggggaaaattttgagaatattggggggggggaacgcgacaagctcctgggggtttaaaaagtgtcataaaaaaaaaaagaaacgggtgggggggggtaaaagacaaagagattttttttgagaaaaaagtatattagggggggaagagggggtaaaaaataaaaagggagggggagggagaaaaaaaagatgtttgaaaaaaaaagagaggttaaaaaaaaaaaagagaaggaagaggtgtaaaaaaaaagaaa

SEQ ID NO: 5988 - DNA, 567 bp, Chlorella sorokiniana
  Clone ID: LIB3602-085-Q6-K1-F8
accctgtgagtccccacccgtgggagccggggccgccacaaggctctgtccctcaggggaccgccactttcggcggcaagaccaaggctggcaccaaggccggcaccaagaagggcacccagaagcaggccaccaccaagaaggctgcccccaagaagtcttcctctggggcgagccagtggtacggccccgaccgccccaagttcctgggcccctacagcacgaacttcgtgcccagctacctgaccggcgagttccccggtgactacggctgggatacctctggcctgtcggccgaccccgccaccttcgctcgctaccgcgagatcgaggtcatccatgcccgctgggccatgctcggcgccctgggctgcgtcgtgcccgagctgctggacggcaccaaccacattgcctggttcaaggccggcgccgagatcttcggcgacgacggcatccagtacctgggcatccccggcctgatcaacgccaagtccatcgtggcgaccctgatcgtgcaggtggtgctcatgtcgtatgttgagggctaccgcgtcaacggcggcccgg

SEQ ID NO: 5989 - DNA, 579 bp, Chlorella sorokiniana
  unsure (1)..(579): unsure at all n locations; Clone ID: LIB3602-085-Q6-K1-F9
tgcctgtcggnaaaggcgcgcctggcggggggagggggggcgcaggagaagcgcgaggacgcccgctttgtggacttcttccagcagctgacgccagtgaacgagctgggccgcatgaacattgggtctcgccccgccaagcggcgctcgcacggctccattgacacgctgcgcgcgagggggggggacttcgcatggacccagatccggttccacctgcccgtgtggctgggcgtgggcgaggcgctcagctccatgatccaggccggcaagctggagctgctgcaggacatgttcaccaactggatgttcttccgcgtcacgctggacatgctggagatggtgtttgccaaggccgacccccgcgtggtgaagatgtactccaaggcactggtggaccccagcctgcattcgctgggggatgagctgctggccaagtttgaggacacggagcgcgcgctgctcacggtggtgaagcacagccggctgctgtcctccagctccaccgccttcctgcagcagaagctgcagctgcgtgcgccctatgtggcgcccctcaacatcctgcaggtcagttgc

SEQ ID NO: 5990 - DNA, 562 bp, Chlorella sorokiniana
  unsure (1)..(562): unsure at all n locations; Clone ID: LIB3602-085-Q6-K1-G1
cgctggcctgcatggggggggttgaacaacaagttctaccaggngacgggtaccagttcacgcccttctcgttcgagaccatngacaaggagccgntgtgaggagatcaaggaactntngtacggntggnagtatgagcagtgcaagcgtttnaaccagtcatgagggggggggggagnnngntgngaggcaacgangctttgnttgaagggggggaggaggtagtctgagtcgtgcaaggagncaaagagcggggaaggtagncgnnnaancgaagnagncgntnaacgaaagggaggagggagnaggatgctgagtgtggtggnggtggnacgtggtgttgaaatggtggaatggangtgctgtgaaggttgttgtgtttattgaggtttgaaaaaatatggatgggagatgattttgtaatggtagtgttcaaatgaaaaaaaaaaaataaaatagggtggtagttttagaggattgagggttagttatgggtgaatgggtaagtaatagattttgtatagtgtgtattaaatttaattcactggcccccccccccccc

SEQ ID NO: 5991 - DNA, 364 bp, Chlorella sorokiniana
  unsure (1)..(364): unsure at all n locations; Clone ID: LIB3602-085-Q6-K1-G10
naagnaaaggcggcngnaggctggcggggcgacggagccgctgcagccttttagccacacgctggcccacatccgggagcaaaggccaaggcggggaggcggcggcgcgctacgatgggctgcaggtgtgaggaccatcgcacccttgtggcggctgcagctgcagcgcgagcgtgggagcagcctgcagcggcgcatcaactgcccagcgttccagtgacacacgtggcaagcagcagggagcggcgattctccgcgccaacctgcatgtgctgccattgccagcatgcgcgcatgccagatggcatttttgtacccttgttgtagcatacactgcccgtatgattgtaaggcagctgtacac

SEQ ID NO: 5992 - DNA, 477 bp, Chlorella sorokiniana
  unsure (1)..(477): unsure at all n locations; Clone ID: LIB3602-085-Q6-K1-G11
gccgtcgtcgaggtaccacccgggggggggatgaangcccaaaaactgcgcggcaagggcaaggaggagctgctgcagcagcttaaggagctgaagcaggagctgagcgggctgcgcgtggccaaggtcaccggcggcgcccccaacaagctgtccaagatcaaagtggggcggggggggggggccctcgtgctgaccgtggtcaaccagaagacccgggacgctctgaaggaggcgtacaagggcaagaagtacgtgcccctggacctgcgcgtcaagaagacccgcgccatccgccgccgcctcaccaaggcgcaggccaacgccaagactgagaaggctgccaagaaggcgcgcgccttcccgcagcggaagtacgcgctcaaggcgtgaaggccttggaagcagcccgctgcagccgtgcaggcacacctctaggcagcggccgctccggccccatgtaacttgacgcccgac

SEQ ID NO: 5993 - DNA, 571 bp, Chlorella sorokiniana
  unsure (1)..(571): unsure at all n locations; Clone ID: LIB3602-085-Q6-K1-G12
cgcggctggntgcgcccacccccgggggggggncggggggtgcgataaaacagattgggcgggagacgagcttcactccctactgggtccacggcctgcagcaagcggtgatccggctggcgcccgagtggctggtcaaccgccaggtcatgcgcatgcaccagggcttccgctggggtgaggggcggcgcctggcgcggcagcaggcggaggcggcggccgctgctgcgggcgaggcctcggcgggtgagggccaggaggaggcgcctaagcgcgagctgcgccgccgcaagtgaagtgcacaccgcgagctcaagcccttgccagccttgagatggggcatgcagcgggccagcggcgacagtcagcagcaatgaccaagggtggcgttgtgctgtacgagagtgtgcatggcagcgaatcctcatgtagtgtctgtcattagctggcatggttgatttgacacaaggccgcagatgtaaacgtgacaccacanaacaaaaaaaaaaaaaaaaaaaaaaaaaaaaaaaaaaaaaaaaaaaaaaaaaaaaaaaaaaaaaaaagggggggg

SEQ ID NO: 5994 - DNA, 401 bp, Chlorella sorokiniana
  unsure (1)..(401): unsure at all n locations; Clone ID: LIB3602-085-Q6-K1-G2
ccggttcgacccagcgttcgtctcatctccatcccgccagnatgcaagaaccctgcaaccgtttgctcccacagttttgcccccgccccctattcttacgcctgagcgcgtgcccccaaaacagctccccaattgctgcatgcctcaccctgcgcccggcgtcccgcgcggcggcacctgtaccatgtatgctcatgcgctgctgcgcccatgcgctctcgcagcatttgcttttccccgcctctgccgccctcaaacacttgcctttgttcagccgtcatactgccgcaatcatacatacactcgctgtaaccctggttgctgaaaaaaaaaaaaaaaaaaaaaaaaaaaaaaaaaaaaaaaaaaaaaaaaaaaaaaaaaaaaaagggggggnccgtttt

SEQ ID NO: 5995 - DNA, 585 bp, Chlorella sorokiniana
  unsure (1)..(585): unsure at all n locations; Clone ID: LIB3602-085-Q6-K1-G3
tgagnaaacgaccccaactggtgcaggagttcaagcaggcgtacgagaaccatgaactgcccaagtttgagggcaaccacattgctgaggccaacacccagtttgcggcgctgctcaaggaggcggaggcgctggaggcggccagccgcacgcgcattgtggagatccagaaagagctggccaacatccagaaggagaaggagcggatctccaccaccaccattgacgatgagctggcggcagaccccaagctggcagaggagattgacacagagatccagaagaactacttcatggtgtcctgagctgcgcgcccagctggcgcctgattgtcgctggagcgcggggcggggcggcaggacgccgccaccagcagcccttgatagacggcacgctggagttgcagcatgcaccacggcctgcaccaccgctcccctgcctgcgctccccttctgctcgtctgttgcagcaccgcctggggcagcgtggggtcgctgacaagcctgccgcgggccgtggagcactggcgcgggcttgaggcccgcccgccactggccgcgagcagcccggctggatgccggcttt

SEQ ID NO: 5996 - DNA, 54 bp, Chlorella sorokiniana
  unsure (1)..(54): unsure at all n locations; Clone ID: LIB3602-085-Q6-K1-G4
naaaaaaaaaaaaaaaaaaaaaaaaaaaaaaaagggacgaacgatacaaaaaga

SEQ ID NO: 5997 - DNA, 570 bp, Chlorella sorokiniana
  unsure (1)..(570): unsure at all n locations; Clone ID: LIB3602-085-Q6-K1-G5
ggcgctggnacctgctgggctgcccngacctgcctgagagnagactggcctgcaacacctgcgcctgctcagcctgcacggtaccttctcgtgggatgacgtggatgatgagatgcagcagcccatcaacctgacagcgctgagcccactgaagcatctgcgggtgctgtccatctctgagagcttccgcctgataacgctgccgccagcggtggttggtctgacgcgcctcaaggcgctgcattctggaaaagtgccccgcgttggaggggcttcctgccaacctgctgctgccgcacctcgcgatgctcagcatcgactggcacgtcttgttcctcagccatgccgtcgtggcgcgccaacctaagctgcagcagctgctgctgggcagcatgcactgtgcactggaccaagcttttgtgccggcgaggcggacacaagaagagcttgccgcagtagaagccagcctgcagcggtgcacggcgcttaccaccctgtctgtgatcgtctacgcagggccagactcgggcctgacaatggactgtgccagcctcatgctgcgcctgccgc

SEQ ID NO: 5998 - DNA, 258 bp, Chlorella sorokiniana
  unsure (1)..(258): unsure at all n locations; Clone ID: LIB3602-085-Q6-K1-G6
ngactgcttgtactttattttgttgcccaagctgccaacatcgcggctgctgcaatgtgcatcgccacatccaagtgggtgcctcagggcggccaacctggcccgcatcttaattcgcagcgatgaagcattctggccacttctgtttgattcctattcgcaacagtggcgtttgtaacaacacagccgtcaaaaaaaaaaaaaaaaaaaaaaaaaaaaaaaaaaaaaaaaaaaaaataaaaaaaaccaaactaacaa

SEQ ID NO: 5999 - DNA, 399 bp, Chlorella sorokiniana
  unsure (1)..(399): unsure at all n locations; Clone ID: LIB3602-085-Q6-K1-G8
cctcctcatcggcggcgtcatgggggggggggggagcggaacaatgaacatgagcatcctggcgcgcgtngaanaagctccagcagattgtgcgcgacgccgtctaagcgtcccccctgctgcccactgcgcgcctcgtgcgccgccgcatcggcggcgagcgcgctagcagcggggggggggtgaccacagctgagctgcagccactgccatttgtaccgtctgtctaggtggcactctcttgcttcatgtggtgctgcaacttccttcactgctccacgctgcaccccgccccgagcaagccacacgcgctgctgagcagcgcatttgttcggcggggcaggtttctgataagcactgcaacctggtggccatagccgtctgtaaccgagccacatg

SEQ ID NO: 6000 - DNA, 261 bp, Chlorella sorokiniana
  unsure (1)..(261): unsure at all n locations; Clone ID: LIB3602-085-Q6-K1-G9
cctcttaacttacaaaagctggggggggggggcgcaacttaattcccctttacaccaactatccctcctttaccccagcgtggcggtaatacgcgaaaaggtcccgaaccgtatcgccctttcccaacagtgtgcctcancctgaaatgggcgaatgggaacccgcccctttgaggggcgcattaaacccccgccgggttgtggtggtgtgcgcccancttgaaccgttacactttgccagccgccctancgcccgctcct

SEQ ID NO: 6001 - DNA, 516 bp, Chlorella sorokiniana
  Clone ID: LIB3602-085-Q6-K1-H10
cagcgacgagcacatcgcaaccgcccgctggtttggtgcagcgctggcgtgtgacgccgccaccaccctgtctgtggggctgtctgagggcagccaggatgccaagcgcaacgcactgcgcgcggggggggggtgctgggtggcctgcggcggcatgcacctctacaacgcgggggctggtgtgcagaagaaggaggttgcctactcgtccgctgcgctggcaggcgtgctgggggcgctgtgcctgtggcgcggcttccgcaacaacgatgacgatgccaaggagcggtgagcttcaacacaatttctgacaccttttgtgtttgatgcgttgcacaactgatgggaacaatgagcaggacgcccaggcatgtggagacgggggctaaagggcagttgggggatgccgagctgcagcaggaggcagctggcgggacagcaaacagcctgactctgaatgatttttgtgcacagcagggacgaggcgcttgtgcatcgccctgccctggcacacgc

SEQ ID NO: 6002 - DNA, 296 bp, Chlorella sorokiniana
  unsure (1)..(296): unsure at all n locations; Clone ID: LIB3602-085-Q6-K1-H11
caatnttccctcacaccttttggggggggggggggnnnnncnanaccacnccnctccncaaattatactaaaagaagaaaanttcccctctttntnnttnttncttcttcctatcatcaaccancaattatcttctacacctnccttttnccctcccnnnaccacctnnnantactctttctccncagggggggggantccaccatcttttttttttgcctccctagtctgtccactctctccccctctctctctgtgcagggcctgtttcaagtttgattactcacgctgttgca

SEQ ID NO: 6003 - DNA, 555 bp, Chlorella sorokiniana
  unsure (1)..(555): unsure at all n locations; Clone ID: LIB3602-085-Q6-K1-H12
tgccggtcgcgctgttcacgcgggggggggggggggggaaaaaaagtccaccctggcacacagcagcagcttcatgacttgtgcaaagcgatacagcctttcttggtgggcatgggtgctgcaagtggtctcactcatcgccaccccaatcgccctcaccggctgccgggtgggggggggggcctnccnctcctactngccaccacagcgcttctngtcatgcaaaccgaggtgtgcacactctcgatgggcctccgctcctacagccccgccggccagagcggctgggcaagcacagtgctggcgggcttcatcatggcggcagcctccagctgggggctcatcctcagcctgcctcatcanctgcgtgcggaggagcggcgtcnggagcagcttggggcacttgccaaggaaatccagctgtgaggcgggcttcgcatgagcgccctgatgagggcctattggtctctgtacagtacatctgtgtgccattcatcgcgtgtacactgggccttttctcgacctgtgcactcaacaagccattaactagcaaac

SEQ ID NO: 6004 - DNA, 573 bp, Chlorella sorokiniana
  unsure (1)..(573): unsure at all n locations; Clone ID: LIB3602-085-Q6-K1-H2
ttctccgcntggagcttcggcgncagcgcccgcctgcctgcttcaattacacggctgcatctgcgagacaaaagtactgatatgccacagcagattgccgagttgccgcagctggcgcagcttgcattcgagtcctgtggcaactactcagccgccagcctggcgccgctgtcgcgcctgagcggctgcctgacgcgcctcgacttgctcgacgtcagcaacgtgcctgccgccttgacgtccctgacacaattgcgtcacctgcactgcgatctgggctttgaatccggcggcgcatttcacacctcgctgcagcacctgcctcagctcacatttctgatcctgcgcagcagagatctggacccgcctgccacgctggccagcctgaccaacctgcagcgctgctatctgcagcgacgcggccagaggagtccaggcgctggcgcggtgccgccgctgcctggcggcccctggcttcgaggcctgcgctggctgggtgccaatgttgacactctagccagcagtgcagcggtgctggaggaggctgaaagcctcgagtttgtcggaagccaa

SEQ ID NO: 6005 - DNA, 579 bp, Chlorella sorokiniana
  unsure (1)..(579): unsure at all n locations; Clone ID: LIB3602-085-Q6-K1-H3
cccggtttgacccagcgttcgctgcggcatgtgcgggcgcgcctactcgcctgcattcctctactgtggcccaatgcgcgtatcagtgtgatgggcggcgagcaggcggcaacagtgctgtcactggttgaagccgagaacgggcgcgggaggggcaggagtggcccgaggacgaacgcgagtactttaaagagcgcatccggcagcggtatgaccgggaggggcagcccggcttcgcatcggcgcgcctgtgggacgacggcgtcattcggtcgcaggacacgcgcatggtgctggggctgagcctggccgccgagctcaaccggcccctgagcgacagccgcttctgcgtgttccgtatgtaagacttgaacgagcaaccgcagtagctcacagaccggaccagtgcgcttggacctgtgcatttggctgcacccggttgcacgtgctcgccaaactgggagccgcctgctgctgcacaacggatgcgcgcacgcctttttgagcaactgggttggaaacccantgcagcatgacagggtataccttccagctggcctttaaaacgcttaagttcaa

SEQ ID NO: 6006 - DNA, 538 bp, Chlorella sorokiniana
  unsure (1)..(538): unsure at all n locations; Clone ID: LIB3602-085-Q6-K1-H4
ggnatgggcaattcgttcgcgaggtgacgtcccgaacccaanaagccttctgcaagggcaaggagtgccgcaagcacaccatgcacaaggtcactcagtacaagaccggcaaggcgtcgctctacgcgcagggcaagcggcgttacgaccgcaagcagtccggctatggtggccagaccaagcccgtgttccacaagaaggccaagaccaccaagaagattgtgctgcgtctggcctgcaccgtgtgcaaggcccagcacatgcacgccatcaagcgctgcaagcacttcgagatcggcggcgacaagaaggtcaaggggctatactagtaaaaaaaaggagagcggcaggcggagagcatgaccgagaaatggaggcagcggcgcccgctcaccctgggcggcctgctccccgcccggcgcctcgctttggccgcctctggccactcgtacgcctccttgtccatgcccttgtgcttcctgagctgcccaacctggcatgcaagcagcctggccgtctgtaatgccattggcgtgtg

SEQ ID NO: 6007 - DNA, 660 bp, Chlorella sorokiniana
  unsure (1)..(660): unsure at all n locations; Clone ID: LIB3602-085-Q6-K1-H5
ccggtnccggncattcccggtgtcgnacccacgccgtccggaaaaaaaaaaaaaaaaaaaaaaaaaaagaaagaagggagaaaaaaaaaaaaaaaaaaaaaagaaggaacacaattaaacggacagagtgcttgctagcggaaaacgggcttcaataacagttaacgtgggaaggattaccctggctcgatgttttcaaagcgtggctacattcagcgacaccctggcctttagccgggggggagtctccttacatatgcttccttgtcttgccttgctcgccttatttacctaagaggctttgccgcgggggcgccttcctaacagttcgtgcccacctgattggcccaatgggaacccgctctttggaaccgcgccttgaaacgcgggggttggcgctggttacgcttctttgggtaccgcttcgcttagcccgttacttttggccggctcctttcgcttgcttccttttttttcttgccttgtttgcttttatttccccgccaggttttccccttggggcttccctttgggggccccgctttagggctttactgcactttttgccgaaaattctggtttagggagctggtttaggttgagggccttccttcctgttagagggtctttataggttttattttggatttcaccttttta

SEQ ID NO: 6008 - DNA, 341 bp, Chlorella sorokiniana
  unsure (1)..(341): unsure at all n locations; Clone ID: LIB3602-085-Q6-K1-H6
gnaggtgatcaagcggtcgtccctcaggacccagcgcgccgctccagccctgagaccttcatcaaggtggtcaactaccagcacatgatgcccacccgctacacgctggaggtggacctcaagggcgtggtgaccgccgagtgcgtggacaacagcaccaagaaggtggaggccaacaaggaggccaaggcgctgctggaggagaagttcaagagcggcaagaaccggtggttcttcaccaagctccgcttctgagggagtttcttggagagcctaggttgcagcagccgtgacgtgacgtgctccttgccccgagacgccatgtaacgtcacaccccgca

SEQ ID NO: 6009 - DNA, 339 bp, Chlorella sorokiniana
  unsure (1)..(339): unsure at all n locations; Clone ID: LIB3602-085-Q6-K1-H7
ggtcgaccacgctccggcagcgggcgctgcagcggcggggatctctcgccccttngagcacatagaatcccttgcgcgtgcaattgcccgcgcattcgctctgtaagtgccgtcagagcaaaaaaaaaaaaaaaaaaaaaaaaaaaaaaaaaaaaaaaaaaaaaaaaaaaaaaaaaaaaaaaaaaaaaaaaaaagggggggggggggggggaaaaaaaaaaaaaaaaaaaaattactataaaaaaaaaaaaaaaaaaataaattctataaaaaataaaaaaataaaattaaaaaaaaaaaaaaattaaaaaccactaacactaaaaaaaaactantcct

SEQ ID NO: 6010 - DNA, 218 bp, Chlorella sorokiniana
  unsure (1)..(218): unsure at all n locations; Clone ID: LIB3602-085-Q6-K1-H9
naaaaaaaaaaaaaaaaaaaaaaaagggggggggggggggggggggtctaaaataataccaaccttacttacgcgctgcatgcgtacctactaccttattttttatatggcagcctaaataaaattaattgagccggcgcttttacaaccaacgtgactgggtaaaaccctcccttgcacccacctaactgggtgggggggggggatacacctttctt

SEQ ID NO: 6011 - DNA, 333 bp, Chlorella sorokiniana
  unsure (1)..(333): unsure at all n locations; Clone ID: LIB3602-086-Q6-K1-A1
cgcgnactttgtgnacccgccacgcacctgcgaggtcagcctgnaccaaccagcgattgggtacgagtgggcgccgcttggggctgacggcgcnntgaagcggctgatcaagggcacggcagacgatgggcntgatcttgcattgcagatggcgtgtcagcagcgctgacccgcggaatggagaccgtgagttgcccagccctgcaagcagctagccgtccagcggatcagaacggcgtggaagctgatgggctgggtggtccagtggcagcctggttgtggtgcgtgcagtcctgcacacttgtctgccccgctgtgtaacctaccgttgac

SEQ ID NO: 6012 - DNA, 573 bp, Chlorella sorokiniana
  unsure (1)..(573): unsure at all n locations; Clone ID: LIB3602-086-Q6-K1-A10
agcgttcgcggccgcgtgggcggccgcttggggggggggggggggggaagaaacccgcatctccatcctggagcccaagagttcttcggcatctccggctttggccagttctccaaggagaacgagctgtttgtgggccgcgtggcgcagctgggcttcgcctctgcgctgattggggagggggggggcggcaagggcatcctgggccagctgggcctggagaccggcctgcccctcaacgagaccgagcctctgctgctcgcgttcgtggcattcaccctcttcgcgggcatcaaccccggcagcggcaagttcgtggacgagaagtgaacgccctcctccaaaacgagtcatgcatgggaagaagccaagctctgtatcaccaccgaatgcgcacccgccgactgtggcagcagcttggttcatgccccaccccctacccccttgcctgtacttccccttgcccgggcgccggcctctgatgatccaggggggcccttctgtagcgtgggccacccgtctgaataaccggggggatnccttccatgtgcgtgtatttcggtagcgctgcta

SEQ ID NO: 6013 - DNA, 574 bp, Chlorella sorokiniana
  unsure (1)..(574): unsure at all n locations; Clone ID: LIB3602-086-Q6-K1-A11
tcgtaccagcttttgctcagggcgagtaccccngtggggaggggggggggggggggaaaaagaccgccgaccccgagaccttcgcccgctaccgcgagctggaggtgatccacgcccgctgggccatgctcggcgccttgggctgcgtgacccccgagctgctgcagcgcaacggtgcctcctaggggtcganggggtgtggttcaaggctggcgcccagatcttccaggagggcgggctcgactacctgggcaaccccaacctggtgcacgctcagtccatcgtggccatcctgctgacccaggttgtgctcatgggcctgattgagggctaccgcgtcaacggcggcccggccggcgaggtggtggaccccatctaccccggtgaggcctttgaccccctgggcctggctgacgaccccgacaccctggctgagctcaaggtgaaggagatcaagaacgggcgcctcgccatggtgtccatgtttggcttcttcatccaggccattgtgaccggcaagggccccgtgcagaacctgtccgaccacctggccttcccctccaccgacaacttc

SEQ ID NO: 6014 - DNA, 517 bp, Chlorella sorokiniana
  Clone ID: LIB3602-086-Q6-K1-A12
gcgagcagctcatgaaggacctgcaggagaagtgggacaaggtggagaacaagaccagcgtgattgtgtacggcgccggcggcattgtggtgctgtggctggcggccaccattgtgggctctctgggggggggggccctgctgcccaagatctttgagctggttggcctgggctactccgcctggttcacctaccggtacctgctgttcaagagcagccgcgaggagctggtggaggacatcgaggcgctgaagaagaagatcagcgagtaagcgtggctgtggcagcgtggcgctttcggcatggcgctgaagctctttgctcttagctttcgcttgggcatgccagcggcgcagccttgtccggcgccggtggcggcagccgtgcccgccccggcatttgattcttgatccttcggccctctttgttctggcccccgccctgcctgtctggcgggcaggtgggcctcagtcccccacccagccgggccgccaccggcggcttgcaaacgaaccca

SEQ ID NO: 6015 - DNA, 533 bp, Chlorella sorokiniana
  unsure (1)..(533): unsure at all n locations; Clone ID: LIB3602-086-Q6-K1-A2
cccggtntcgaccagcgtccgcgtgggccaggcccccgccctgctgctcagcagcgacacggctgcacctacgccgagtgcggcaaggcctctgctctgngacagcccgccgacggcgccagcggcagcctgcccaccaacgccgccgncatgggcgnccccgccatcgtgctgaccctgattgtggtcgcctttgtggaggtgctgatgcacttctgctgagcgcctcatctgaagtgctgaggtgatcctgtcaggcccccatgcagcacagcccaaacaggatctgcctggcgcggcacagtaccgntgctcggccggcacgctgttcttgggctgntgtgcattgcagcatgctgctncggcggcgcggtagggcaccttcccttgctgtgccgnacacaagtatgcccgtccttgcacgcctgcttcccaagcaagttaccctaccctgtggctggtacccccatgccgtggtgccgatctgtgctgccggtgttgtccggccagtgcagacgggccgtccggtcacc

SEQ ID NO: 6016 - DNA, 439 bp, Chlorella sorokiniana
  unsure (1)..(439): unsure at all n locations; Clone ID: LIB3602-086-Q6-K1-A3
naaaaaaaaaaaaaaaaaaaaaaaaaaaaaaaaaaaaaaaaaaaaaaaaaaaaaaaaaaagaaaaaaaaaaaaaaaaagaaaaaaaaaaaaaaaaaaaaaaaaaaaaaaagaaaaaaaaaaaaaggggggggcggtttaaggggaaacaaagggtcgttgcggggcaggggaaggacagggttatttttgggggtaacctaaatttaaatgaagggggggggttttaaaataggtggggggggggaaaaaccggggggtgtccaaaggaatgggttttggaaaaaattgccctatttggaaggggggaatgaaaaggaaaagggcacgggccctttagggtttcaaaaaagtgggggggacgggagggataagggcaaccttccttaaggggtaattaaacgccgggtggggggggggaaagggaaagaggggacgttt

SEQ ID NO: 6017 - DNA, 663 bp, Chlorella sorokiniana
  unsure (1)..(663): unsure at all n locations; Clone ID: LIB3602-086-Q6-K1-A5
gcctgctctgcggcccttctaccttgggcctttctgtatcatcttgcagcaatggcagccgggtgcatgtttctaacatcggcacctggccctactcgtctgtgtggccatgaccacgacgctgtccttccgaacggtctaccacttgcatagaacgcctccaccctaacccatccactctgccacaccatcgcactggacgcttatcactcacgctcaccaacactcgtgcacaccgcgactcacgcacaccatacactccgtgtcaacagccgctcgcatggcaccgatcctcacccatagcagccgaatatctgctcgaccccaaagacgcacgtatcgaccgtgttgcagccacactagggcggccccgctccaccacgcactccatgcttgccagcccagccatcgctttcgctgtgcgcgtcacctggtcgcaacagtcctacctgcccacacctcactccatgtgcacccttcacccgcgcttcacaccagcgtggtgctagccatgctaaagctgactgcactaaacccatactcatgcatgctncgcgacaaccgcacttcacacgcacaccgtncctaacgtgataacaggacccattttcaagggccgactgtacagagcctttttgcgtccttatgccgatctggtaccag

SEQ ID NO: 6018 - DNA, 467 bp, Chlorella sorokiniana
  Clone ID: LIB3602-086-Q6-K1-A6
tgcttgcgtggcgggtcatactgcctgtctgcctgctggcacctgcactggtctcaagtgccttccacacaatcatgtgcaggtctttgacacccagctgctgatcgcacgatttgattcggacgattatatctgggctagtgtcaatttgtaggggggacgttatcaacctgttcctgtacatcctgcggctgctgggggagcagcagtgcagcaactagacacgcaaccgtgctaatcagctggaggctgccacatccctgctctacgctcttgtttgctctcattggccatgtgcgggcgtcggttgtaacatttgttggtagcggcagccttctggaagcctcttgtgatcggcaatgggccgcatgtaaggtgatcggcagtcaaaaaaaaaaaaaaaaaaaaaaaaaaaaaaaaaaaaaaaaaaaaaaaaaaaaaaaaaaaaaggggcgggccgttttaaa

SEQ ID NO: 6019 - DNA, 582 bp, Chlorella sorokiniana
  unsure (1)..(582): unsure at all n locations; Clone ID: LIB3602-086-Q6-K1-A7
cccccgcaggggatgaanaactgcaggcgaagacgaggagcgctaacggccgcctggccatgattgcgtgcctgggctgcgcggcgcagggcgtcatgacgcagaagggccccttcgccaacctgctggagcacctggccgaccccgtgtccaacaacctgctgggcaacctggccaccatgcgtgaacagtaagcgtgctgccccaagccccggcctgggtgtgagggctgccagggcggcggccagccacatctagagcctttgcattccttggctcggggcggcgactggtggcgggccctccggccgtgcctgcctgccgccccgcagcgcaccctcactcaccccacttcacccctgagaagaaatcaactgcccaactcttgttttgttgccggtcctacgcttccgtgtgcctcttgtatgggataattgctgctacactcctgacagtgtaactctccgctgcccaaaaaaaaaaaaaaaaaaaaaaaaaaaaaaaaaaaaaaaagaaaaaagaggggggaagggaaaaaaggaagaagaggaaggagagggggggggggcacaggcccccccc

SEQ ID NO: 6020 - DNA, 243 bp, Chlorella sorokiniana
  unsure (1)..(243): unsure at all n locations; Clone ID: LIB3602-086-Q6-K1-B1
gcctgcttctctaattgtgacatnncgcagctgnncttgtaaatnnccggcctggtnannaaaaaaaaaanaaaaaanaaaaaaanaaaaaaaaanaaaaaaaaaaaaaaaaaaaaaaaaaaaaaaanaaaaaaaaaaaaaaanaaaaaaaagggggggacggttttaagaaggaatcaaagctttaacgtacgcgggggatggggaacgtaataagttcttttttatagtggtaacctaaaa

SEQ ID NO: 6021 - DNA, 134 bp, Chlorella sorokiniana
  Clone ID: LIB3602-086-Q6-K1-B10
caaaaaaaaaaaaaaaaaaaaaaggggggggggggggggggggaaaaaaaaaaaaaagggggggcgataataaaaagatccaaaactaaaaaaacacgtaacaaacaacaaaaataaactctttttataagggc

SEQ ID NO: 6022 - DNA, 571 bp, Chlorella sorokiniana
  unsure (1)..(571): unsure at all n locations; Clone ID: LIB3602-086-Q6-K1-B12
gcgttcgccccgcgtccgccccgcctccgggggtgggtnaggatggcaaaataccgcaccatggcagcggcaggccccagcggcggcgcggcagcgggcgcgcccttgggcggtggcggcagcagcagcagtggcaatggcatcctgtatgccctggtggcccgcggcagcgtggtcctgggggggcgctccaacgtgggcggcaacagcagcgtggtggcggtggggctgctgggcaaggtgcctccgcaggacggcttccgtgccagctgggcggcaggtcggcacatcttccacgtcctgcatgccggcggcctgacctacctgatcatggctgaccaggcggggggcaagcgcatcccatttgctttcctggcggacgcgcagcagcagtttgagcagcggtacggctctgtggccgagggcgccatcgcctacgagatgaacagcgagtttgcgccgctgctgcgggatcgcatgcactacttcaacacagacccgcgtgccgacacgctgacgcgggtgcgaggcgaggtgaccgatctcaagaacgtgatggtcgacaatattg

SEQ ID NO: 6023 - DNA, 318 bp, Chlorella sorokiniana
  unsure (1)..(318): unsure at all n locations; Clone ID: LIB3602-086-Q6-K1-B2
ccgggntcgcccagcgtccgcggcgagcacatnaccttcgntcagctggcgctggtggcgcccaccggcagcaactgcgtgctgctgcgcggccccaagacagccgcgaggccgtcaagcacttcggccccgcacccggtgtgcccggctcccacgccaagccgtacgtgcgcagcaagggccgcaagtttgagcgcgccgcgcgtgccgccggtaagagcaagggctacaaggcgtaagcgcccccacgcctcagcggccggcgggcggcggcggccgtggatgcgctgccgcagcgccgccggcacagttgacggc

SEQ ID NO: 6024 - DNA, 569 bp, Chlorella sorokiniana
  unsure (1)..(569): unsure at all n locations; Clone ID: LIB3602-086-Q6-K1-B3
gcgcgttgcgctntaggactgcacagcggccacagcagcatttgcgggggcacgggctgcccctgctgtagttgcattgctgcacagccccgaccaggaagtccagcagcaggcagcgggggtgctgggcaccgcagcgtggaaccatgcagccaacagtgcggacattttggcagcgggtgcagttcagccgctggtgcagctgctgcgcacgcccggccacccagcgcagcagtgggcagccgtcactgtgtgcaacctgtgtcggatgcagccggaggcagcggtggcagccatccagcaggctgggggcgtgcaggacgcgcttgcgaacatggcagcgggcagaggcgatgagaagggcgaggctgtcggttccactgcacagcctgcagcctcaccggcccgcgtgtgcgccgcccccggctgtggtgccacgcgcggcctgaagcgctgcggcggctgcggcacagtgcgctactgcagcgaggcctgcagccgtgcgcactggcgggcgcacaaggtggagtgccgccgcctgcaggcggagcgggcagcggcggcagtgg

SEQ ID NO: 6025 - DNA, 350 bp, Chlorella sorokiniana
  unsure (1)..(350): unsure at all n locations; Clone ID: LIB3602-086-Q6-K1-B4
ggnggcgcaggttgcccgcagaagcggcgcaacgtgaacaaggcggccacccgctccgtggcgggcgccagcctggaggtgatccagaagaagaagagcgagaagcccgaggcgcgcaaggcctcccgcgaggcggcgctgcgtgagatcaaggagcgcgccaagaaggccaaggccgacaaggcggtgcagaaggcgcaggccaaggcctcgggcgccggcaaggctgtcaagaacatgcctaagggcgcgggcaagggcggcgccaagagcaccggccgctaagccagcggcaatgcagcgggcgtagcggcctgctgggccgctgccgttgtaacgcacttcctcgg

SEQ ID NO: 6026 - DNA, 571 bp, Chlorella sorokiniana
  unsure (1)..(571): unsure at all n locations; Clone ID: LIB3602-086-Q6-K1-B5
ctgncatagcaccgcagaactaggcgtgtgccctgccaagttagggtttccgaccgcgcttgcacgctcctgccggggcctccgcccctcccagcagcctctgatcagagcaaagatgcgctcgagtcgcaccgccatggcctgcctgctgctgttgggcgccgcgcttgcaaacaccgccgccgccggtgcgccggctgtaaacgtcacgctgttcggcgaggcgctttgcccatacacggcaaagttcttcacagacattgtggcgcccttgctgacgtacgacaaggagattgcagacattgtggacttcaagtacgtggcctggggcaacgcgcacaacaccactgcacagggcgtgcagtgccagcacggccccaacgaatgcgcgctgaaccgcgtcgtcaactgcgccacgagccactacccagaccaggcccagtggctgcgctttgtcaactgcctggagtcggcgccgctgcgccagatgctggaggctgtggatgagtgcgcccacaagtcgggcatggatgcctctgcgctgcacgagtgtgccgaggggcgggagggc

SEQ ID NO: 6027 - DNA, 559 bp, Chlorella sorokiniana
  Clone ID: LIB3602-086-Q6-K1-B6
gaggaaggcacccactaatcagccatcaccgagagaaggtgcccacaataagtcttactctggagccagccagtggtaccgacccgacacggcccaagggcctgggaccctacagaacgaacttcgtgcccaagttacctgaccggagagtttcccgttgactacggctgagatacctctggtgtgggggaacgaccccttcatcttcgctcgcttccgcatagatcgagacatccatgcccactgggccatgctctacgccctgcgctgggtcatcgcccaagctgttggacggtaccaaccacattgcctggatcaaggccggagccacgatattaaggaaatactgcttacataacatgggacatctgctggctgatcaacgtcaactccatcagggcgaccctgatcgtgcacgtggtgctcatgtgcgatgttaaaggctaccgcgtgaaggctgccccgggcggcaccgggctggccgctgtatactcctgctgcaactttgacctcctgggcctggctgatgacccctacacacttgctgtgctgcaggtga

SEQ ID NO: 6028 - DNA, 599 bp, Chlorella sorokiniana
  Clone ID: LIB3602-086-Q6-K1-B7
cctggttcgaccacgcgtccgcagctggcctttggccgggggtgcccgggggggggcgaacccaatggaaggcgtggaggtgcagcagcagctcaagtcagcggacaatgcagccctgtaccagtacttcctgaagtggtgcccacctcctactccaacctgcgcaacgaaaccatcctcacaaaccagttcagggggggggagcactttcgggaaacggcgtcccccagcgcggggggcggccagctgccgggcgtctttttgttctacgacctgagccccatcaaggtgcggttccaggagagccgcatctccttcctctccttcatcacctccctctgcgcaatcatcggcggcgtgttcacagtgagtggcatcatcgacgccacggtgtaccacgggcagcaggcgatcaagaagaagatggatttgggcaagctgagctagcagcgggagctccctgcttggtttgcttgccacagcaggcatgcaaactcgctaccaggctagctggcgcttacacccgtgtttgcacaaggcacctggtcaatccaattgcaaattttgcacccgcggttccccagccagctgtcggtttc

SEQ ID NO: 6029 - DNA, 290 bp, Chlorella sorokiniana
  unsure (1)..(290): unsure at all n locations; Clone ID: LIB3602-086-Q6-K1-B8
tggcctggcatacttaggcccatgttatgcaggagggtgtggctagtgctccagcaggatgccagcgtgcgggttgcaaggttggaactatttggcgtggggtcctatgcactaggtatggtatgactccannatggggacttcgcgggagggggggggggcgnagnatcaccacagttagacgttgctctttcatcttcgtttaggtgcgtgacttcaacgattctctttcattatggtgtggagggcgcctgacatgtagacacccatgtaacatacaatgtggtgag

SEQ ID NO: 6030 - DNA, 576 bp, Chlorella sorokiniana
  Clone ID: LIB3602-086-Q6-K1-B9
cagcgttcgggctattgtggtcaacggcgatgcgggcgggggggggggcgtggaaaaagcattcactgccattgatggagtagatgcggtggtcagcaccatcggcggcacgacagcagaccccattgctgactcgcagggcaacattaacctcatcgatgctgctgtgcggcatggtgtcaaagggggggggcgggtgaccagcattggaacaggcaacagcaaagatgcaccacccccgcacgtgtacgatgtgctgaagccggtgcttctggagaaggagaaggctgaggaacggctcaaggcagctggagacaagatgacatttgtgattgtgcggccaggtggtctgaagagcgagccggctacaggcaccggagtgttgacagaggacataacagtgtgcggcagcatcacccgggaagacgtggcagacctggtactcaaggcgcttcgaagtgatctggccaacaacaaagtgctgtcagctgttgacagtgcatcgctggacgctcaatttgaagtgttcgcattgtagtagcagtcagaaagagagcagtgcagccagtacagccc

SEQ ID NO: 6031 - DNA, 571 bp, Chlorella sorokiniana
  Clone ID: LIB3602-086-Q6-K1-C1
tgaaaaaaaaaaaaaaaaaaaaaaaaaaaaggaaaaaaaaaataaaaaaaaaaaaaaaattaaaaaaaaaaaaaaaaaaaaaaaaaaaaaaaaaaatataaaaaaaaaaaagggggcggttttttttgacggtttccatttttcctccagccttggttgcaaccctgtatctttctttttattgggcgcgcttaaatcaattcacatggctccgccttttgaaaaccttggaggattggggaaatcctgggtttccccaactttaatccgtttggggctgattgcccttttggccggttgctgtattggcgaaagggccccgccggttggcctttccaaaggttggtggacctttactgtggaaggggccctaccttgcgcggcttttttatgctcgcctgtgttggtggttacgcttaggggtaccgttaattttggtttgtttttgggcccccttttttgggtttttttcattgctttattgcccctgtaccccgtttttccgggtaggctttaaggggggggatccttttggggtccggattaagggttttacggcctttgaccccca

SEQ ID NO: 6032 - DNA, 563 bp, Chlorella sorokiniana
  unsure (1)..(563): unsure at all n locations; Clone ID: LIB3602-086-Q6-K1-C10
caccgncctgcagcggctgtggcggggggggccgggcgcgggggtgcccgctaagacagggtgccccgcctagatggcgggaagatgggcgtgtttgccacgcgctcgccgcaccgggcctgccccatcgggctcagcgtggctcaagtgctgtcggttgatgggcgcacgctggggcgggggggcgcagacattgtggatggtgaggcgatattctgtttggactgaacgccaacaagtcgaactgtttagtgcatcaagtgctgccggtactggagggcgggacactgatgctggaaagcaccgacatcgtggatggcagccccgtgctggacatcaagccctatgtgcccttctgcgacagcgtgccggctgccgccgcgccgcactgggtcgcgatgcgggcggaggacgagcctctgagcattggcgtgctgcgcatcagccctgaagccgaggctgagctgcgcacagcttgggggcgacgtggccagcgatcggtgtttgccagctttgacgacttccgggggctggtggagcaggtgctgtctcncgacatccgc

SEQ ID NO: 6033 - DNA, 82 bp, Chlorella sorokiniana
  unsure (1)..(82): unsure at all n locations; Clone ID: LIB3602-086-Q6-K1-C11
tcctgttcgtcccacgcttcgaaaaaaaaaagaaaaaaaagggggggggggggggggagnnanaagacnncccctctaaaat

SEQ ID NO: 6034 - DNA, 523 bp, Chlorella sorokiniana
  unsure (1)..(523): unsure at all n locations; Clone ID: LIB3602-086-Q6-K1-C12
aaaaaaaaaaaaataaaaaaattgtgggggggggggagagggaaannannaaaaaaaaaaaaaaaaaaaaaaaaggccacccatggtcggggctccatactgatccacccttccttccccgggcttgcctcttctttgctttcttttttttttacttcaattcccttcattttccgtgggggggggggggcaaaacctgggaaaaaccccaccttacccccctttaagagctttcccttttttccccttttggccatctcgaaaaatcccaaacaggcccccctttctaccctttcccaacatttgtgggcctttggtgcccactctgacccccccttttacggggggttaatcccgggttttttcttttttacccccatcctttcccctacattttacagccccttacttcccgttttttccctttttttccctccctttttccccgctttccccaaatttccctaaaaaggtttatatcttgggctccctttttggttccttttcaggcctttcccccccc

SEQ ID NO: 6035 - DNA, 568 bp, Chlorella sorokiniana
  Clone ID: LIB3602-086-Q6-K1-C2
catgctgcagccagtggcagcagcacacatgcgggctgctctctccgctgctgtactgtctctgcttcatgccagtgtttgcactgacacagtgtgagcccaaatataccgtactcagcagttatcctcagctacacttgtccctgtgacttgcgaactccatgctcctgtaacacatcacgccctcataaaaaaaaactacaacacctattaacaaaaaacgcagaaggggacacagagcatctacattgagggcatcacgaccgtggctgctcaggtaccagcctgccctggaccatgggctggctgcgctgctgcacacgttgcggcggcccgatctgacaattctggccgaggcgctgcaccactttgcccagcggacgccggtgctggagtggtttgtgcgtggaccggctggcgggcccgccccgcgagccttcatcacaaacgggagtcacgcgccacgcacataggcgccagggcagtagcgtttcgtgcctgctgcaaacgtgcatgtgcaaaccacagtgtgcgtgcatgctctgtaacgaacactttgggctacaat

SEQ ID NO: 6036 - DNA, 293 bp, Chlorella sorokiniana
  Clone ID: LIB3602-086-Q6-K1-C3
cgtccgcagaagaagctgcggaggcagcgcgtgtggacggcatgcaggtacaaggcctgctgctgcacgtttctaggatacctgctagggatacctgctgacgagcaatgctgggattcaatgagaagacgtgtggacccgtcgagcattgcaaactggcatgcattcatgaggccatggactgtgctctttctaccagagcacttcgctggaatgcctggcggcagtgccaagcagggcgagcatcctggtcatctggtggttctgacctgccctgtctgcggacaggcgca

SEQ ID NO: 6037 - DNA, 373 bp, Chlorella sorokiniana
  Clone ID: LIB3602-086-Q6-K1-C4
gctctctccatccgcaccgtaccgccaccctgctcgcaccacacctcacctcaccttgctgcgcatcgcgcggtccgctctcgctgtcaccctttgcattgtccgccgggtgtttgccagtcgtgcccctgtccagcgattcgatttcctccccaaaccctttttccagacattgagcgaacagaacatgctttcattgccgggccgttgcccccctctgcatgccacgcacatgtgtggccccctctgcatcccatgttgcccccactgcctgcccatcatgtggccctctgcaccacttgcgcttgactacgcttttctaccagtttgggtttgtaatctagcagaattcacaaaataaaagaggatgaac

SEQ ID NO: 6038 - DNA, 622 bp, Chlorella sorokiniana
  unsure (1)..(622): unsure at all n locations; Clone ID: LIB3602-086-Q6-K1-C5
cgcggnacgcgtggngnaaaaaaaaaaaaaaaaaaaaaaaaaaaaaaaaaaaaaaaaaaaaaaaaataaaaaaaaaaaaaaaaaaaaaaaaaaaaaaaaataaaaaaaaaataaaatatttttttaaaattttttaaaatttcatttgtttgtttttgcgtttttctaacgtttttttctgtttattattttggtgtggggggagttgtatntgtgttgaaaaaatttttgacttttggaccatttgtttattttattgggttagttcattttttgttggtttttttcttttagttgttttgccttgaatgttttaatttgtaggtagtgttttgtttttttattttttttctttagttttttttgttttactgtggagtttgtttgttgccctttttttttggctttttggttgtgttatttttagtttgttccttttctttttttttttttttttttgttgttttccctttgttttgtttttttgtggtttttttttttttgtttgtttggttttttttttttgttgttggttttaattttttgttttttgtttttttttttgtgttttttgttttttttgttttttgtttaggttgtttggttttttattttttttttt

SEQ ID NO: 6039 - DNA, 580 bp, Chlorella sorokiniana
  unsure (1)..(580): unsure at all n locations; Clone ID: LIB3602-086-Q6-K1-C6
ggcctagttctagtacgcgagcggccgcccgcngactagnactaggtcacacgctgctcctcaccgggcgctcgtcaagcaagctgcttgtgtctcggtgtatgggaaccatcacgcacgccgacctcatctccacctacgattcgcgtttccagctggagcgcggccaagagacggtgccattccgcctcacccgcaacatgcagtccttcattggcccacagggcatggaaggcatggtggtttgcgccatcactgcagcagcgcaggcgctgcaggcagagcctgccatcacttcatctatcgttgccctgttcttcagggatgacattctgtcctgggcagctcggcgcagtggagcgcgctgcatcgcggcactgaacgccagcctgaagacctcccagctggagacgtgcgtggcctggaacaccgcaacctgcctgaaccgtgtgggcaccatggcacctgcacgcaacggccatccgcagcagggcacccgggctcttgtggcagaagcagtagcgcctgccaatctgtgtcgcatgtgccctacgtggtttgcctggctgtaacacggcca

SEQ ID NO: 6040 - DNA, 479 bp, Chlorella sorokiniana
  unsure (1)..(479): unsure at all n locations; Clone ID: LIB3602-086-Q6-K1-C8
cccggttcgaccaccttcggcaagatgccccccgaggggggggggggctgcaaaacctgtccggggagtgcggctgggtcaaggagctggctcaagaagactggtgcttcggtcctcgaaccaccgggcccaactggggggggacatcaccaagggtgtgcagtacctcaaacgagatcaagggggggggggggggcgccttccattgggccaccaaggagggggttatggctgaggagaacatgcgcgggatcggcttcaagatctgcgatgtggtcatgcgcgctgacgccatccaccgtggggggggacatatcattcttaccggccgcacgtccatgtacgccgggggggtgacggtgcanacaagcctggtggagaccacctacctggtggagatccagtgcccttagcaggggctggggcgggggtgtacagggtggttgaaccagaagcgcgggatgggtggttgaggagat

SEQ ID NO: 6041 - DNA, 509 bp, Chlorella sorokiniana
  unsure (1)..(509): unsure at all n locations; Clone ID: LIB3602-086-Q6-K1-C9
tgtcttggggcccanaggaggaacggtgcagcccgcgcggcgacgagcggcgctgggccgcgtcgcgcagcgtgctgcagcaggggctggagcgcaaccgtgacgcgccgccgctgctgcaggcctggggcctcctcgaggagcagcgcggcaacctgctggccgccgtgatgctgcggggaccggtctgcgggcctggagccgaagaaccgccccgtgctgcgctgggcaccagtgggggaggctcncaagacggtgggggagcgccgcggcaccaggcgcctacagcgcgacatccgtgtggctgccagtggcggggagaactggcctgagagcgacgaatgagcacccgagggtagcccggttccagctgcaagccatcccgcagttgcacccaaggtttgcccccgaccggcactgcgtatataggtccccttgcctctggaccatgctgcccaaggttgcaacgagcctgccttgccaccttactggttgcgaagatgcccccc

SEQ ID NO: 6042 - DNA, 490 bp, Chlorella sorokiniana
  unsure (1)..(490): unsure at all n locations; Clone ID: LIB3602-086-Q6-K1-D11
agcgtccgcggncgcgtggggactgctcgcccgtgtgcctggtgtggnaactaccagggagtgctcgaggggctgcaccgttacgcgggcacggtggttgcaacgctggcgggccatgcccacatggacggcatgggaaccgatgcagcgggcatccgccaccgagtgtgcaaagctgtgctggggaggcggcctggcanggagtgctacggcatcgttgatgtttattccgacaccatccacatcaggggcgtggatacgttcgcctctgagcactggctgctgccgccggtggctgcgcccgcgcccgccgtggcggcagccgagcggccgcatggggtggcggtgcgggcatgagggcgctacggcctgatcagccatgtatcgtgtgccaagctgtacagcaacccttccttgtgccaccatgaccttctggctccggttcagcatttcatcgcactgccatctgccctttaatcgcttctcatcc

SEQ ID NO: 6043 - DNA, 560 bp, Chlorella sorokiniana
  unsure (1)..(560): unsure at all n locations; Clone ID: LIB3602-086-Q6-K1-D12
cgcttctggntgtggcctgtcccggggcgcggggggggggcctaatgtggctcgcagggtcagtctaccaaatgctgcgcgggtcggaaatcgtgttcacagcgctgctgtcggttgtgttcctgcggcggcggctgactgtgctgtatgcangcggcctggcccttgtgagtggggtgtggggtgtgttntgggagtggccggcctgctggcgcacccgcgagggggcgccctcagacgtctcccgccgccacgcgcttgctggcatgctcatcacagtgctgtcagaggcgctgcacgccgcccagattgtggtagaggatcattacctctcaaatctgggcctgcatccactgacggtggtgggcgtanagggcgtgctgggcgtggcgaccatgctggcggtcgtgctgccgctggcgcancgcctgccgggatcggacggcaagggcctgcatgaggacagctgggacacgctgtacatgctgaggcacagcgggcagctgcgggcagttgccctgtcatacgttgcggtggcgggcgctttcaactcgtcaggc

SEQ ID NO: 6044 - DNA, 564 bp, Chlorella sorokiniana
  unsure (1)..(564): unsure at all n locations; Clone ID: LIB3602-086-Q6-K1-D2
gccggnagtagnagcggngccagggcagcggcggcggcgcacccgcaaacacggcagcagcaggagcggctgngaaactccgctcctgcagcgcaggcggccggcggcgcagcagggcggccagcgggctgctgctgcgatagctgcggcggcagctgactgtggccgccagggcggccctggcaagctgtggcaggagcaaggtgcagcggggcgtgctgtggagcagccggtcagcgagcagcggcagcagcagcagcagcagcggcagcaaggggaggctccccgcgaccgcaacgcctgcttcttctgcggggccacaggccactggtctgcggcttgccctgagcggcggcgctgcttccactgcaaggagattgggcactggagcaaagactgtccgaagctgcaacgcgggtcgtgctaccgctgcggccagcccggccactgggccatgaattgccccaatcgctgagctgcggcgacggccacgcacagcggaccggcttccgtcttgcctgcctgctagcatgcgggagtattacatgccctgctctgcaagcg

SEQ ID NO: 6045 - DNA, 432 bp, Chlorella sorokiniana
  unsure (1)..(432): unsure at all n locations; Clone ID: LIB3602-086-Q6-K1-D3
naccacctgccacccatccatcaccttccctccgccacaacctctgccacccactcaccacccatcacccgctcaacgccctccatgcaccatcctccccatccaccaaatctgccaccccaaacgcacgtccgccgctgcaccacctgccgccccctcacccgcacccatcttccacccgccacctttcctgccgctcaccgccgcacatcctacctcccacacctcactccatgtccacccttcacccgcgcttcacacagcggctgctgccatgcaaagctgctgccaaacccatccatcatgctcgcacacccactcacccacacgtccaacgtatccagacccattttcaaggcccgactgtacagtgcctttttgcgtccttatgccgatctggtaccaggacttaatgtgtaacaaatggtatgt

SEQ ID NO: 6046 - DNA, 579 bp, Chlorella sorokiniana
  Clone ID: LIB3602-086-Q6-K1-D4
agcgtccgctgctggtcactagccacctgtctgctgtttgtgcggcaaacgtcgatcggggcttaatggaatgatgtgcatttcgagaggcgccgattgcgcgccgtgctgtgcgaccactctgggtccaggtgcaagacattgcagtataatgcgctcactggtaagtggcgagtccaatgcagacactatgacagtggaatgcaccactcgctgcagcatatgctgtgccgaggagccatgatcctcatgcattgacgagcggcttcagcacagatctgctggccctgctggtacttgtcatggacaggtctgcgtacaagatggaggcggagcaagagctgagcaagtgtggtggaggggaccttgtagctgaagtgcacaagctgaccatggaattgaatagggtcgtggcagttaccgaggcggtggccgccccgtggtatgagaagctgagctccgacctgctgtgacgaagcgagaatgccaatgagcctgctggctccctttcacccctgccgcccgctagcgcatatgatggacacacacagtgatgaatgtgcaatgtgatgcccctgt

SEQ ID NO: 6047 - DNA, 536 bp, Chlorella sorokiniana
  unsure (1)..(536): unsure at all n locations; Clone ID: LIB3602-086-Q6-K1-D5
ngagccctgcgcgcccctgtggcctccaggcccagacccgcagcaacgccggccgcaccgtcgtggtgtgccgcgcgcagcagcagaacctggccgctaaggccgcggctgcgggcgtgtctgtccccgccctgctggcggcgcaccccgctctggcgctggtggacgaccgccttgcgggcgagggcaccggcaagatcctgggcatcaacgacccctccctgttctgggccatcaccattgtgttcaccatcgtgtggggcgtgttctacgtgtccacccgcgagattgacgctgcgtctgaccgcgagaacgacgatgactttggcctgaccctctgagcgggcgcccagcatcaggcggcccgcgcggcgtaggcccacgggcctgccgggcaaattttcgtccttctgttgcagcttgtccgccatgtgtacgctaaatccaaatttcaccccgagaagagaactcgctatgtagcacccttgtgtgaacaccgcccctctggggctcccgaccaaaaaaaaaaaagatan

SEQ ID NO: 6048 - DNA, 581 bp, Chlorella sorokiniana
  unsure (1)..(581): unsure at all n locations; Clone ID: LIB3602-086-Q6-K1-D6
ggcaggcggcgactcactgggcaaggggtcagcaaaggcgngacacgccagtgtgcaagcaccagccagcaagttagcgcacacaccagcgagggtgtgctggactcgcacggcagcggcgagaccaaggcagacagcttgatgagagcccgcgtgggcttcattgaggggctgacgctgggtggtgtgcttggtggtggcgcacagggcaaggtctacaaagggaggtggcgaggcacgccggttgctgtcaaggtcatccagaccacagtggtgccggaagccagggtggacttgaaccacgaatcgatgctgagcacgtcgctgtcgcaccccaacgtgtgccagagctacaagtcgtgcgtggtgcaggtgctgccagatgctggcggcctggacggctgcggcatcgcagcagatagcgccagcagcccccgagtgtcgcccagcactggcaccttcaaggtagtcagctcgctcacagaccgcaacacacttgtgcgggtgatggaccctggagcagtgctggaaccgggcatgtacgaagcatggatcgtcagtgagtttgcggaccgcggcag

SEQ ID NO: 6049 - DNA, 557 bp, Chlorella sorokiniana
  unsure (1)..(557): unsure at all n locations; Clone ID: LIB3602-086-Q6-K1-D8
tggtgctgtggaccacgcgcgccgtggctgcgcggaatttcggacgtgctcatggggggggtgcctcgcggcctgtgcatcaagacgatcaatgatgacatgagccgggtggttggagtggaggaggttcatgacctgcatgtgtggtcgctgaccccaggcatcccggtgtgggcgcggggagcaacctntcacccnnagcaaaccccaccgcagtgctggtggagctcaacgagtactgccgctccaaggaattggccactccaccatccagctggtggtcaatggtagcgcctgcccctgcgtctgctgatgccgccgctctgcgcacagcgcgggtgcagcacgcagcggccgcgccatgcagcggcgcccgcagctggcctgtcgttgccggtagtgcagcggtgcggttgcaatctgtagtgactggcagcaattacgatgccacatgcgtacgttggcgcaaaacagncctggggtgngggctgctttcccctgaatggtttgggtggactagcgctgttttagccatgcaccttgcttgtttgaattct

SEQ ID NO: 6050 - DNA, 373 bp, Chlorella sorokiniana
  unsure (1)..(373): unsure at all n locations; Clone ID: LIB3602-086-Q6-K1-D9
cgcgnagcggtgctgctggtgtttgccaacaagcagnacctgcccanacgcgatgaatgcagcggagacaccgacaagctggggctgcactcgctgcgccagcgccactggtacatccagagctgctgcgccaccagcggcgagggcctgtatgagggcctggactggctgtctcagaacatcgctaacaaagcttaaaaaaaaactggcgagccgggcggccaggtgccgccgccggcagcagcagcagcagcagctggcgaggcgcatactgcgtctcagttagcttagaattaacccccttgtgtggactttccctttcttgctcctcctctgggggggggtcaaacaatgatgcaacatcacgggaatc

SEQ ID NO: 6051 - DNA, 556 bp, Chlorella sorokiniana
  unsure (1)..(556): unsure at all n locations; Clone ID: LIB3602-086-Q6-K1-E1
ggcgggcagnaaaacgctggtnggcgctnnggcgctcatctttgccatccagggctgcgaccccgcccccttctacctctttgacgagatcgacgcggccctggacccgcagtaccgcaccacggtggcggccatgctggggcggctggccaaccgggagcgtgaggcggcgcagttcatcatcaccaccttccacccgcagctggtgggagtggcggacaaggtgtacggcgtgagccacaccaaccggctgtcgcgcatcgacaccatcacccgtgacgacgccctcaccttcctggcaagcgaggagcggcgcatggcggcggcgcagcgcgagcagcagcgcacggnagcggccgaggcggnggcggggcaccgngcgcgcaagggcaaggcgccgttgcagcagctgcctgcggatgaggaggtgcttgatgaggagatggtggatgcagacgacgagtgagcgagtggcagttgctcagnttggcctacactggcctagcatggtctagcttagccttagcagtgtgaccagtgggccactcaacaactg

SEQ ID NO: 6052 - DNA, 574 bp, Chlorella sorokiniana
  unsure (1)..(574): unsure at all n locations; Clone ID: LIB3602-086-Q6-K1-E10
agcgtccggcgcaccatgcagnccgccctgtggggggggctgggggcccctgtggcgctccaagggccagacccgcagcaacgccggccgcaccgtcgtggtgtgccgcgcgcagcagcagaacctggccgctaaggccgcggctgcgggcgtgtctgtccccgccctgctggcggcgcacccgggggtggggctggtggactaccgccttgcgggcgagggcaccggcaagatcctgggcatcaacgacccctccctgttctgggccatcaccattgtgttcaccatcgtgtggggcgtgttctacgtgtccacccgcgagattgacgctgcgtctgaccgcgagaacgacgatgactttggcctgaccctctgagcgggcgcccagcatcaggcgggccgcgcggggtaggcccacgggcctgccgggcaaattttcgtccttctgttgcaggttgtgcggcatgtgtacgctaaatccaaatttcaccccgagaagagaactcgctatgtagcacccttgtgtgaacaccgcccctttggggctcccgacanaaaagaaaccccaaccccc

SEQ ID NO: 6053 - DNA, 488 bp, Chlorella sorokiniana
  unsure (1)..(488): unsure at all n locations; Clone ID: LIB3602-086-Q6-K1-E11
gggggggggggggggggggaaaaaataaaaaaaaagggggggcctttctaaaataatccataccttacttacttcagtgcttgcatacctctaacctcttttttggtgacacctaactttcatttaattgagccgtccttttacaaccatcttcacttggggggtgggggggggggcccaactaaatcaccttactccacatactcctttctttcccctaacttactaactaaaagggggggcccgatcggccttccttacaattgctgccccttactgacgaatggggcgccccctctcttgacgcattaatcccgcccggtgtggggggggggcccaccctnaccgttttttttattagggccctacctaccgttcctttctctttcttcccttcctttttttgtacgctcgctaggcttttcttcctaagctttaaataaaagggctcccttctttggatgcggttttatttgcttttttgggcc

SEQ ID NO: 6054 - DNA, 533 bp, Chlorella sorokiniana
  unsure (1)..(533): unsure at all n locations; Clone ID: LIB3602-086-Q6-K1-E2
agcgtccggcgcctacacaggtgctggntgcgcgggcgcgcgccgccaatgagtactggcaccccttcctagagcagctgtccagcactgtgcgggacgaggtggccagctgcagcgagcatgcctacgcctccctcacactggtggacgcgcaggcactcctcatgattggcagccaggcggaggcggaggcgtacgcaaagcagcgcggctgggaggtgtccaacggccgcatcagcttcaagaccgcggccgagaaggagggcgggccgggcggcgcgccgcttgcgtctctggagatcatcagccactgtctcaactacgcgcgtgaggtggagcgcattgtgtgatgcgggaggcaagggctgcgcctgcaggccggcacaaagagatcccgtggcgtgcactatctgcgcacgtggccgcgccccgacagcggcgcggcatgtcaaagtaccagctcccttcaggtggcacattgaatgtgcgccatcgccttcatacagcagctgcatgtaacattcagcatgtag

SEQ ID NO: 6055 - DNA, 543 bp, Chlorella sorokiniana
  Clone ID: LIB3602-086-Q6-K1-E3
taaaaaaaaaaaaaaaaaaaaaaaaaaaaaaaaaaaaaaaaaaaaaaaaaaaaaaaaagaaagaaaaaaaaaaagaggaaccaaaggtaaaggacccaagatgaacaaagattttagatcctttttaagtgggccggtttttcctttttttccttgggtcgccgtttttttggccggccgggtttggggccattcctggggcgggtggcccggtgcaattttccttgcggttctccgccttgtgttgcctggcgggtttctcccgttggggcccttgccggtaggccctccttgccggtggggaccccccttggcccagggggcgcggcctggggggggccctttttcggggcccttttggcgcgttcggtccgggggttctggtccctttgcccccctcctttcgcccgctcctttcgctttcttgctttcttttttttccctgcttttcggttttttttgggggggtttttttggtgtgttttttttgggttttcccgttttttttttttgggggttttttttttgggctctgggtttggg

SEQ ID NO: 6056 - DNA, 567 bp, Chlorella sorokiniana
  unsure (1)..(567): unsure at all n locations; Clone ID: LIB3602-086-Q6-K1-E4
ccggcggcggccggngcagcggcagcaggccggccagggtcggccggggccgccagcggcgggcaagcggctgccagcaacggccacctgttcagccagcggtaccgcagcagcagagagggaggtgagcgggtgggctctccgggcttccagggctggccggccacaggcgcggcgcgggcggcagagtggcgcgccagcggcggccggtcagcggaggatgcctgggacgcagccatggccctggaggtagcgggcagcacccgggaggcacccacccccaagtttggtagcggctggcagtcggcgccagggtcggcaggcgggcagagggtggtggtggacgcagcccgggcaggcagcttgcctgccgacccgctgggggccttgcagcagcagcagcagcggcagcagcagcagcgaggcgcggcggcggtgccccccagcgacccgctgccggtgccggcgccgcgggcggggctgcagctgcgcctcgctgccacgcgcagcctggaccccgacttcaccacctctgccgagcgcacagggtttggggagtcgccggtc

SEQ ID NO: 6057 - DNA, 461 bp, Chlorella sorokiniana
  unsure (1)..(461): unsure at all n locations; Clone ID: LIB3602-086-Q6-K1-E5
acanacccggtccagtgctcgtgggcgcctcatcaaggcggcccgcgtgaggatgccacccgcattggcagcgccggtgtggtgcgccgccaggctgtggatgtgtcgccgctgcgccgcgtgaaccaggccatctggctgatcaccaccggcgcgcgcgagagcgcgttccgcaacatcaagaccattgcggagtgcctggcggacgagctgatcaacgcggccaagggcagctccaacagctacgccatcaagaagaaggacgagatcgagcgcgtggccaaggccaaccggtaaacggctgttgcgcacccaccaaaacagcagcccgccacagccggcacccctgggcaggatgccagaccgccagtgcagcagcacggtgtggttcagctgctgttatcgtggcaggctttccaattaggcgcgggtgttaggattgtgtaacacagcgcacccaa

SEQ ID NO: 6058 - DNA, 589 bp, Chlorella sorokiniana
  unsure (1)..(589): unsure at all n locations; Clone ID: LIB3602-086-Q6-K1-E6
ggcacccaaggcaagnaggtcgcggcggcgcccgccgccgtgaagaagcggcggcccccgccaagcctgtcaacccgctctatgagaagcggcccaagacgttcggcattggcggcgacctgccggccaagcgcgacatgcgccgctttgtgaagtggcccaagtacgtgcgcatccagcggcagcggcgtgtgctgaaccagcgcctgaaggtgccccctgccctcaaccgcttcacccgcacgctggacaagaacatggccgagagcctgttcaagctgctgatgaagtaccggcccgaggacaaggcggccaagaaggagcggctgctgaaggaggcggaggcgcgcgaggctggccaggaggttgagaagaagaagcctgtggtggtcaagtacggcatcaaccacatcacgcagctggtggagagcggcaaggcgcagtgcgtggtgattgcgcacgacgtggaccccattgagattgtggtgtggctgcccgcgctgtgcaagaagatgggcgtgccctactgcatcggcaagggcaaggcgcggctgggcaccgtggtgcacaagaagtacgccaccgcgct

SEQ ID NO: 6059 - DNA, 586 bp, Chlorella sorokiniana
  unsure (1)..(586): unsure at all n locations; Clone ID: LIB3602-086-Q6-K1-E7
ccgcggnccgcgtgggggggggtctcagggggcggggaggggaagttcctgaaagcccgggnaagggggtgcatccttctgtccggcgcgctgatgcgggcaagaaaggcgggtcgatcgtgaagaactacgtatgatggcaccagcgagccgcccctacggcgcacgcgcgtcgtgtgcgggcctgtctaaggggcgcgggggagggtgatcaagcggtcgtccctcaagacccaggcgcgccgctccagcctgaagaccttcatcaaggtggtcaactaccagcacatgatgcccacccgctacacgctggaggtggacctcaagggcgtggtgaccgccgagtgcgtggacaacagcaccaagaaggtggaggccaacaaggaggccaaggcgctgctggaggagaagttcaagagcggcaagaaccggtggttcttcaccaagctccgcttctgagggagtttcttggagagcctaggttgcagcagccgtgacgtgacgtgctccttgccccgagacgccatgtaacgtcacaccccgcgnaaaaaaaaaaaaaaaaaaaaaaaaanggggcggccgctct

SEQ ID NO: 6060 - DNA, 514 bp, Chlorella sorokiniana
  unsure (1)..(514): unsure at all n locations; Clone ID: LIB3602-086-Q6-K1-E9
ggcgggcgccgcgtgnaggccatccaggcgggtgggcagggcggggaaactatgagctgcacccaccttcatcacttggccgtgacatggcggggcgtgcaagtgccagcgctcacctgggcgagggacgttctacgggccacctacgatgcgccagggacctttgccaagggcgcacgcctccggnagcctgggccatggagagactgggggccgtcgctcaacgtgggtgtacactcgagggagaaggggctacgtgaccgcgtgacattgcgtgaggcgcgagggggctgcacactcaagaagctcagcggtaccaagttccgccaaatgctgcgcagcggggaacagatcccggagtggttctccttcagctccgtgagtgatgtgttgcgcgagcaccagcagcaccagcagcagtgagcagctgggccaccctgcagcctgccccatcgtctgcatttcatgccaataaagctgccattccagttgagcgctgtaagtttacactgct

SEQ ID NO: 6061 - DNA, 498 bp, Chlorella sorokiniana
  unsure (1)..(498): unsure at all n locations; Clone ID: LIB3602-086-Q6-K1-F1
gctggngacggctgcacacactagggcgttcgtttgctgcaaactcgcaaggtctcctgactagcacaagctccggcgaagcctgagacagccggcaggcagcgcggagcggcagccagcaagcgaggcagcaggatgccccgagccaagaattcaaggaggagcacccgtttgagaagcgggaggcggaggcggnccgnatccgagacaagtaccctgaccggatgccggtgattgtggagcgcgctgacaagagcaacatcccggacattgacaagaagaagtacctggtgcccgnggacctnacggtgggccagtttgtgtacgtgatccgnaagcgcattcgngtgtngnccgagcaggccatctttatgtttgtgcgcaacgtgctgtcgtccatggtcgtgctgatggtggacgtgtatgcagaccacaaggacgaggacaacttnctttacattacctacaggggtgagaataagtttggctgaggctggg

SEQ ID NO: 6062 - DNA, 528 bp, Chlorella sorokiniana
  Clone ID: LIB3602-086-Q6-K1-F10
cttcaggaaaccatggtgactcggcgcgtcgtgttcagactgatccctacatatggggaacctctgccgaatgctggccttctttgtgggcatggtgtttcccacattcgagtcgttcaaggccatcgaaagcaagaacccaggggggggggggcagtggctgatgtactgggtttgctactcggtgctgctgtcgctggagcaggtggcctggcccgtcctcatgtggattcccttctaccgcctcgtgcgcgtgggtgccctggcgtggctggcgctgccgcagacgcggggcgcgtcgctgctgtacgagtcgttcgtgcgccccttcctgctggtggcggttgagaaggcacgtgagctgccagcggtggagccctatgtgcgggacttcatgcccaccgccaagcgcaagatcgaggcgacttttgagaaggcgaagcagcaggcgggcgccagcggcaccgaggaggaggaggagcgcccctatcagcccctgaaggcgcacgccacctaagcgtgcatgcc

SEQ ID NO: 6063 - DNA, 559 bp, Chlorella sorokiniana
  unsure (1)..(559): unsure at all n locations; Clone ID: LIB3602-086-Q6-K1-F11
cccgggtcgcccatcttcggttacagccaccccaactgcgcccgcaataaagcgcccgtccgtgccgcgatctgtgcgcgcccccagtcagcgccaacccctttcagttcctttttcctttcatttgcccccgccccaagcatgcctgtctcctcctcgctacccgcccacccgcccacagagtgcggggggggggggtttnctgctgctacngggtaggccccgcgcagccctctgctagctttgctcgtatccgccccgccatcactgattccctgcctgcactgctatcaagcaacgcgcccctgctgccactgctgtatagcgtcgcacctctgccatcccctgatccctgcccatgcctccactccccatccgatactgccatacgtgacgtgttactgccacagcaccatgcatactgcccatcccctacctctattctgttcatcctgcaccctttctgcatccaccctttcgttccatccctctatacttgcaaggttgccttgccagcgccggagcacagtttccctctgcaaacaatgacgcacaggag

SEQ ID NO: 6064 - DNA, 543 bp, Chlorella sorokiniana
  unsure (1)..(543): unsure at all n locations; Clone ID: LIB3602-086-Q6-K1-F12
ttcgcgatccacagcttgcctcacagggggggtgactcgcacgcgacaacaaaactttggccgatgggccggcagctctgccggcagaggttcagctggcggccagctcctgccggccgctgctgcagcagctgccaccttggctggtagagctcancggcctgtgctctgatgcgcgggggggggggacggtgccnccnattggccgcccccctgacccaggattgatcactgctcttgaggccagcctgcaggcgctgctgagtgctgcagctgcagcggaggtgcctctgcctgaccaccaatccccagctgagcagcanctagcgatggatgcagcgcgtggcaagctgcgctgctgcaacccggcctgcaccaactttgcaggcagcagcgaggggcagctgccctccaagctgtgctccggctgccgcactgtgcgcttctgctgtgaggcgtgcagccgtgcgcactggccgcagcacccggcgcgcgtgcaagctggtgggccgcgcgcgcacatgccggctgatgtgaacatgc

SEQ ID NO: 6065 - DNA, 574 bp, Chlorella sorokiniana
  Clone ID: LIB3602-086-Q6-K1-F2
cccggttcgacccagcgttcggctcccttcagcgagaacgaccaggtacggctgcagttcctgtacgaggagtgggcgcacccctactttgtgtccaaggaggagtacggccgcatcatggagggcaccggccagctggagcaggttgagctggccgactggacggcgcccaccatcaactcgtggcgccactccatgtgggtgggcgtgtgggacccctggatcgtggtgttcaagggcccacgcatttggtacaagactgtgcgtgagattgtgacgctggagcgcatgcaccgcgcctttgacgacggcctgatggagtacggcatgatgaaggccaagaagaaggccgcgtgaccgctcggaggctgcacttgagccagcctgcaatttcactcgtggcagcatttgccagcggagcagcggcgcattctttccgttcccccttttattgttgaccttcattcacgattgcaccaaggttttggctttagtatcattcgcccatcaacgcaatgagtgcacgttgttaagaacggcaggtacattttttaatagtgtaatttttttggta

SEQ ID NO: 6066 - DNA, 593 bp, Chlorella sorokiniana
  Clone ID: LIB3602-086-Q6-K1-F3
gcctcgaaggcgaatccagtggtaagggaagccgctacagcgcgcgcgtacatcaggcctccactggtgcggctgacacttccacccgcgaccgctagctagtcacgtgcaggcgatactaacggactacaccacggcagacgaccaagaaaccccaacggcaagctgcgcctgctgaacgagtgcgcccccatgtccatgatctgcgagcaggcgggcggcgccggctccaccggcttccagcgcgtgctggacatcgtgcccaccaaggtccacgagcgccagccgctgtttgtgggcagcaagtgagaggtctagtacctggagagcgtgctgcaaaacaagcccgcgccccagtaagcgcagaagccagccacttgccgcggcccccagctggcgaccgcctggccccagctgcaatcgccgcagcccccaacgtccctttcttgtgccccctattcatttcccgcccctgttgtttgctcatcctaacgtttgccctcacctgagaagatccctgctccgcatcgccacccgatccatcgctacgcgctgctgtttgttcccccaacgtattttatacggcgcggcac

SEQ ID NO: 6067 - DNA, 571 bp, Chlorella sorokiniana
  Clone ID: LIB3602-086-Q6-K1-F4
ctgctggtcacagccacctgcctgctgcttgtgcggcagaacgccggccgcgagcttaatggaagtgaagtgcacctcgcgaagcgccgtttgcgcgccgtgctgtgcgaccccgcggtccggctgccagacattgcagcagaatgcgcccagctggcaggtggcgagtccaatgcagcacaagagcgtggaatgcacgactcgctgcagcgcatgctgtcccgcggcgccggtgccctcaatgcattgacgagcggcttcagcacagatctgctggccctgctgctacttggcatggacaggtcgccgtccaagatggaggcggagcgagtcctgcgcaagtgtggtggagcggaccttgtagctgaagtgcacaagctggccatggagttgagtaggctcgtggcagttaccgaggcggtggccgccccgtggtatgagaagctgagctccgacctgctgtgacgaagcgagaatgccaatgagcctgctggctccctttcacccctgccgcccgctagcgcatatgatggacacacacagtgatgaatgtgcaatgtgatgcccctgt

SEQ ID NO: 6068 - DNA, 91 bp, Chlorella sorokiniana
  Clone ID: LIB3602-086-Q6-K1-F5
taaaaaaaaaaaaaaaaacaaaaaaataaaaaaaaaaaaaaaaaaaaaaaaaaaaaaaaaaaaaaaaaaaaaagaacaaacaaaaacaggg

SEQ ID NO: 6069 - DNA, 226 bp, Chlorella sorokiniana
  unsure (1)..(226): unsure at all n locations; Clone ID: LIB3602-086-Q6-K1-F6
naaaaaaaaaaaaaaaaaaaaaaaaaaaaaaaaaaaaaaaaaaaaaaaaaaaaaaaaaaaaaaaaaaaaaaaaaaaaaaaaaaaaaagaaaaaaaaaaaaagggggggccgttttaaggggccccaggtttccagtcccctggcttggcaaggtcttgaccttttattttggtggtccccttaacttcatttcggggggcggggggtttgacaacgcctgttggcg

SEQ ID NO: 6070 - DNA, 447 bp, Chlorella sorokiniana
  unsure (1)..(447): unsure at all n locations; Clone ID: LIB3602-086-Q6-K1-F7
cccgttcgtaccagcgttcgcaggtgcaggcggcggtggcggggggcggggggggacgaanaaacggccaccaaggcggggattgacaagtacattgctgacaacccggtggtggtgttcagctggagcggctggcccttatggagcgcgccaaggggtcctgggtgccacgggcgccaagtacacctgtgttggggtggggcagatggncgacggnaaggcgctgcgggctgagctggtcaagaagaccggtcggtccaagtgcccaaatttggttgggggaagatgtgggcgggtgcaaagactggcccggggtggtcatgctgnaggacaagggggagctggtgccgatggtgaagggcgatggggcgctttgatgcaggaggagggtgaaaaggaaggtgttgcctggtgccttgtcgggtggtgtttgttatgcacgagcta

SEQ ID NO: 6071 - DNA, 573 bp, Chlorella sorokiniana
  unsure (1)..(573): unsure at all n locations; Clone ID: LIB3602-086-Q6-K1-F8
tcgcgtcgccaacagcgacgcttcagggggggggggggagggggtcatagccaacctgtgccaagaaggcgacgaggggcacctggtgcacgtgatcccccggctgcagctggctgccacctacggcgcgccgcccgtcgacttcctgccgttccaggaccccccagcctatgagacagggggggggaccgcanaanactttattgccaagcgggcgctcacacacgtgggcaacatcacgccgcagcccgtggtgcacatcgtcaagtacgagatcgacaccgactcgattggcaacgtggtgtgcaagaaggccgaggagctggaggcggcggtgactgtgctggcgcggcacagcaaggcaaagctgcaagagttctttttggggtctgttagcaacttctgcgtgcaccactgcaagcgcccggtgctggtgcacagcggctgaacggctgagtagcggggcagggccacccacattgcttgtgccgggagcacagcggctgaacggctgagcagcaggcgcggccgcctctactgtttgtgccgggagtcgcgctcacctgatgctgc

SEQ ID NO: 6072 - DNA, 567 bp, Chlorella sorokiniana
  Clone ID: LIB3602-086-Q6-K1-F9
tggtgagggggtgctgggttgcatgctggcatgtcgctgccaagtaagcgtaccgcagtgggagggcctttggtgctgcacctgactgcttttgcgctgactggcgggcatgtgcatgctgtcagcggagtggctgggaactgcctgctctcctttgtttgactttctaccgtccggccttgctgcaggcgcgccttgcgcaggcggcggttgctgtgcactgctgttggcggcagcgtaggcaacagcggacagcagcggcggcggcagagccggagcgaggcggagcacgaaatggcacaacttgctgcagctgaggcggcaaatctgctgttggcatgctggcagcagaaggtgagtcatcccgtgtgcgttggcattgcctactgccaatctgcagcagctgcggcgtgcgctgtgcttagcgccgcctatgctttcaatatcagtgtgtggctgcagcgtatggtactcacttttgcaggaatgacaatgctgctgcctgtgccatgctgtgcaagctggcagagtgccgctcgccagggtgtgggcagaagggcatgtgtc

SEQ ID NO: 6073 - DNA, 559 bp, Chlorella sorokiniana
  Clone ID: LIB3602-086-Q6-K1-G1
cgatgcccagctcggcccttgcatgctcgccctgccctcctgctcaccctgcccctcccccaacttcctccctccctccttgcccaccctctcgtcaggtccgcgtggtgtccatgccctgctgggagctgtttgaggagcagccgcagagctacaaggacagcgtgctgctgcccgaggtgaaggcccgcgtgtctgtggaggccggcagcacatacggctggcagaagtgggtgggcgacaagggcaagtccatcggcattgacgagttcggcgcctccgcccccggccccctgctgtacgagaagtacggcatcaccgtggacgccgtggtggacgccgccaagcagtcgatgtccgcgtaagcagccatccggcagccgcagcagcgccgcctccccggcggcccaccgttgagtcgtgccaaccgcccgccagcccccccgcgcggtgcggacgcccctcgtcgaattattttttgccgcattgctcccttccgccgcccctggatggctttcctgctcccctctgtctcgtcggttcctcaggcctcggggcg

SEQ ID NO: 6074 - DNA, 574 bp, Chlorella sorokiniana
  unsure (1)..(574): unsure at all n locations; Clone ID: LIB3602-086-Q6-K1-G10
cgtaccagcgtccggctggcaccgtcgcacccacgggggggtggctgcgggggcttgggccgngagcggcggtggcagaggtgccagggccgctgttcccgcagccgcagatcagcaccagcagcagcgaggagcttgcggagcgctggctggctgaggtgctgtttgacggcgcacccgccgagggggggagtgcatacgaagcactgctggtgtctgatgtgtggtgagcgacgcaccacagcactgatgtgtggtgagcgaagcaccacagcacagtccgcccaccacgccgtttgccgcccacataacgccgtttatcctttgcccatttacttgcgaagcagcgcctttggctgcccaccacgccgtttgcccattgacttgcgaagcagcgcgcttggcttgcgctgccacaagtttgcatttttgctttttgctccaatttgttgtctgtcgtccggcccacacccttttgtttgaacatgctccttcccttgcacccgtactagctacccaaacttgatccaaacccccttgtgtatgccgcatgccgtataacccccttgcttta

SEQ ID NO: 6075 - DNA, 520 bp, Chlorella sorokiniana
  Clone ID: LIB3602-086-Q6-K1-G11
ttaaattaacctatgatatgcaagttgtagtggtatggcattattcatgcggatgccgtcctgctgctgcatcactgacactgacacagttcctgccctgccccccacccaatcgccaccaagtggggggggggcgacgaacagtgggcatggtgcggttcgctgtgctctgctatgctgcacacgtgttgacagtgtggagcggcgctcggtgtcgcacattggcagcgcctgttccagttcatccatctgccctgctgcagctgtcaagtttgcagcgtttacggctgagagtcggctatattaatcgttgttcataagatccttcctgtttcccctctgcagctgttcgtgctggcagaggctgtggacgagctgccgccccgccccaagggcctgccggcctgccccaagacttgcatccagaatgccgccccctggagcaagccgtttgtccaggagaagttcggcaagagcgggttcgagctgccctgagcggctagcttgtgcggtggtatgc

SEQ ID NO: 6076 - DNA, 470 bp, Chlorella sorokiniana
  unsure (1)..(470): unsure at all n locations; Clone ID: LIB3602-086-Q6-K1-G12
aaaaaaaaaaaaaaaaaaaaacttttgtgggggggaggggaggggaanncacccaaaaaaaaaaaaacaacataaaaaaaaacctaccactttaaaaaaatccaaactaacataacccactaacttacaacaacataaactattttgtccttccttttttttttttctccactcccccccctttttttttttggggggtgcccaaaaccctgaccccccccattttatttcacctaccaaaaaatacccctttccccacttgccaaaacccctgaatatccccccctctaatcccctttccccaacattcccttttccctcaattggctaatattaacatacccttcctccccctttttcctttccccaaaaattttccccctttctttttcttattaaccaccacccttttcacccccctttcaccccctcctttttttttctttccccccctttcttcccctttactt

SEQ ID NO: 6077 - DNA, 143 bp, Chlorella sorokiniana
  Clone ID: LIB3602-086-Q6-K1-G2
cgtccgtttttatttttttatttttttttttttgtttatttttttttttttcccaagggtaacgaggagacgcggggggccctcgccaaattgtatacgaagcgtgagggttgtttgccttatgtggttggaactacggagag

SEQ ID NO: 6078 - DNA, 576 bp, Chlorella sorokiniana
  unsure (1)..(576): unsure at all n locations; Clone ID: LIB3602-086-Q6-K1-G3
ttcggcgcggcgcaacgtgnatcacctcggacctcgggcctcccgcgtatcttgcacatggtggaacatcggtgctgcgtgtggctgacgcgaggccatgcctctccaagctgcgcggagatctaccgcacactagagcaccgactacgtcanagcgcgtgcntgccctccatcatgccaggaacacgctgtaagagcgtgagttgcgcagtacaacgccttgcagctgctcacgatgcgtgaggtggtcagccgcgacatccggcggatactgacgcagcgggcgcgctacttcaacattgtgctggatgacgtgtccatcacgcagctcaccttcagccgcgagtacacgggcgcggttgaggccaagcaggtggcgcagcaggacgcggagcgtgccaagttcattgtggagaaggcggagcaggacaagcagagcgcgatcatccgcgcgcagggtgaggcgcattcggccatgctcatcggccaggccatccagcagaaccccgccttcctgacgctgcgcaagatcgaggcggggcgcgaaatcgcgttcaccgtggttcgcctccgcca

SEQ ID NO: 6079 - DNA, 142 bp, Chlorella sorokiniana
  Clone ID: LIB3602-086-Q6-K1-G4
gcagtgcggcgccgcacccctgctcttgctgtgccatcaccaccacacttacaccctcggctcccgttcgttcctgctccctgctgtttatgccactctcgataggttctctccaacgatgtgtaatgtttcctcgggcaac

SEQ ID NO: 6080 - DNA, 574 bp, Chlorella sorokiniana
  unsure (1)..(574): unsure at all n locations; Clone ID: LIB3602-086-Q6-K1-G5
agcgtccggactccccacgtgttcngaccctcgttggcgccgcccggcaagcacctcatccacgcctacacagccggcaatgagccttatgagctgtgggagggcgtgaagcgcggcacaatcagatatgctgccctaaaggaggagcggtcgcagtgcctgtgggctgccttggaaaaaacatccccgatgtgcggattcgagctgaactggcgctcgtgggcactcccttgacgcacgagcgtttcctgcggcggtacaagggcacctatggccccgcaatctcggcagcagacagcagcttcccaggccccggcacgcccctgcccggcctgctgcgctgcggcgacagctgcgctcccggcattggtgtgccagcggcagctgccagcggcatgattgcagccaacacactcgctccggtgtggagccactggcagctgctggacgctctggggctgtagcgaggactggaggggtggcgcgctgttttaacagctgacgtgaaagccgccgcccgtgccgtggttgatttgacttgacgttctgtttcattcagtaatcaggtgtactg

SEQ ID NO: 6081 - DNA, 268 bp, Chlorella sorokiniana
  Clone ID: LIB3602-086-Q6-K1-G6
cgccacctttcctgccgctcacgacgcacacctactaccaaccttatcctgtccacccttcacccgcgcttcaacagaggctgctgacatgcaaagctgctgccaaacccatccatcatgctagcacacccactcacccacacgtccaacgtatccagacccattttacaaggcccgactgtacagtgcctttttgcgtccttatgccgagctggtaccaggacttaatgtgtaacaaatggtgtgtgaaaaaaaaaaaaaaccgatt

SEQ ID NO: 6082 - DNA, 539 bp, Chlorella sorokiniana
  unsure (1)..(539): unsure at all n locations; Clone ID: LIB3602-086-Q6-K1-G7
tccggcggagcggcgcgctcgcgaatctagggcggggagcgggggggctcaagacagctgtccttcctgttgcgagtacatacggggaggtgggcaaggactacatctactcgggggggcctgtgctgggagacgcgctgatggatcgagaccttgtgcaccgccagaccgcgtgcgctgttgggggggggggggggctaggcntggcaggcctggggtgcgaggacacgctcatgcacctgctgaactacgtgttccccaacatcttccaggtgtcgccccacattatccagacgacgacgggcgcgattgaggggtgccgagtgtcgctgggcccaggcatcatactgagctacctgatgcagggcctgttccaccccgcccgaaaggggcgcgaggtgtactggggggtttacaacaacgtgtacattggggcgcaggactcgctggtgggctgctacccgcgggttgaagacgatggggtnaactccttacggcggcacgaggaggatgtgttcatttgattggggggatgggcc

SEQ ID NO: 6083 - DNA, 479 bp, Chlorella sorokiniana
  unsure (1)..(479): unsure at all n locations; Clone ID: LIB3602-086-Q6-K1-G8
ggcctttgtctcgccagagcctggggggggagggggggggtgggcccaacttatggtgtcgccgcagcgctgggcgtccccgnccgcacgcggcgcgccggcggcggctggctgcagnncagcagctgctgggctgggcggcaggcgcccagcaggcgggacgcctgnnagcacgacnnatgcaccagnnctcctgnnctgcgtggtgggggaggggtgggccacgctggnnatggctgacccggagccatatcacacccccaacgacacatttcgtcgtctgggcccacatccccgcgcaagggtgagcacccaatnnaaacatcgcagnagctgcgctacgtacgcgcaccgtgagctctgcaatgcgctttgtggcacccgcgattttgtgagcgcgctggttnnncatcaagcgcttcagtgggcgctgcgcttgcggtccatctggttgcgttaccccccgcctncnnctgcgc

SEQ ID NO: 6084 - DNA, 343 bp, Chlorella sorokiniana
  Clone ID: LIB3602-086-Q6-K1-H1
gcgtttcgctggtacggctggacacactaggttttgtttgctgtaaactcgcaaggtcttctgtgtagcacaagctccgcaaaagcctgtgacagccgggagtaacaggggagggggattgagaaagctagggatcagggagcaggggtagctatttaattaatagtatgagtaggcaggtgtgagaagatgggggttagggcagggcaataattcgagataagtaccctgtatgggatggaggaagattgtgaaaaggtgtttgataagagcaatatgctgggacattgttaagtggaagtagttggtgtgaagggaactgatggtgggttattttttttag

SEQ ID NO: 6085 - DNA, 221 bp, Chlorella sorokiniana
  unsure (1)..(221): unsure at all n locations; Clone ID: LIB3602-086-Q6-K1-H12
tccgcccgnctgctgggccccttctctgcggggggtgtgagcgctcttgccgttttcaaccctccctttttgaccgcactttcggtttgctcagcttcagctgcactgttccgtgagcgcccgtgagacctccaagnttctctgccattcacactgtgtctatgttgcaatgctctgagggcgggccggggcctgaattatgtgctgtaacaacacagccg

SEQ ID NO: 6086 - DNA, 558 bp, Chlorella sorokiniana
  unsure (1)..(558): unsure at all n locations; Clone ID: LIB3602-086-Q6-K1-H2
acgacacnnggtgctgnncgcctgtcggnngcgtggcccaccgnnccgcttaccagcgccactngctgctggnntggtgcccnncgcacctcccacgnannnatcttctacnngtagcgcagnaatggnatcccccacggcctagcgactgatgtcacatcagcaaccctgcccgcttgnngtttggtggcgagcggcgtggcngnntgtgacnngccgnnccaccacncnnctgtctngtnnggggcttgtgctttgagggnncagccaggnaatgccannagcgnncaacgcannctgcgctgcaaacggcnnnctgtgctgnnggtggctctgcggtcggtcattgcaccctttctacaacnngcctggcgctggnntgtgcanngaagaaaggagnngttgccnnnactcgtccgcttgcgcctgnngcaggctgtgcttgtggggcngnnctgtgcnnctgtggnncgcggcttttccgctaaccaacgnagtgatcgaaatgccaaggnnagctnngtgagctnntcaacanncaatttctgnnagcacctt

SEQ ID NO: 6087 - DNA, 155 bp, Chlorella sorokiniana
  Clone ID: LIB3602-086-Q6-K1-H3
gccccttgttctgccatgttgggcttcaatagccaaataggtccgccccgacagcctttcccaatagtggcgaatcctgaatggggactgggaccctccttgtacaggacaataaatcgcgtcagctgttgcgtttactctcatcttgcacacgt

SEQ ID NO: 6088 - DNA, 534 bp, Chlorella sorokiniana
  unsure (1)..(534): unsure at all n locations; Clone ID: LIB3602-086-Q6-K1-H4
cagtttttgtgcccggcggccgcttttgcggggcgggtgactgggccagcccagtcgctctccccacccaccctggcccatgacacactcccagcctggcgatgcgtgactccggttttggttcccttcaacaaaaacagacgattcccttctgcctgactgtaccccgcactccgccgcagatttggtcgcgccctgtagccaagcccgctattttgcctagcgccgcagcgaagcttgcttgaccctcgagaccagcaggccaaccctctccctcagctagttgtttttattggcacgcccgccgggccggccggggcaatcggggccctctggcagagcccagtttttccgctgcgccggcggccgcaggcaccggcccgggaaactgccctccgatctgagactgtccgccctgttgtatntgccctctcagcctgcctgcctctgaaaagttgggtgccacgttgtgccacgctcgccatgcctgaccccatttgtgtaagcatccatccattaaaaagaaaaataaaa

SEQ ID NO: 6089 - DNA, 576 bp, Chlorella sorokiniana
  Clone ID: LIB3602-086-Q6-K1-H5
ggcacccggcgcgcgtgggctggcccgtggcccgctccggtgccatgggcttcaaccaccgcactgagtatgaacaagaggtgtaccgcatcggtgtgaagggcgaggccagccacgccgccaccaccgagcacgacgtgacggtgaaggacattaccccctgggcggcttcccccactacggcgtggtcaaggaggactatgtgatgatcaagggcgcctgccccggcgtcaagcgccgcgtcatcaccctgcgcaagagcctgttcccccagaccagccgcaaggcgctggaagatatccgcctgaaattcatcgatacgtccagcaagttcggcaacggccgcttccagacctcggaggagaaggccaagatcctgggccgcctcaaggcctgagcccagaaggcgtgctgagcggggagcgcagcgcgcacagcacgccgcccgcccgccggcggcggcggcgctctgcgcccgcccagctagattgcggcgcaggcgtaggcggctgggccgctgcgccggccgcctgagtgccctgcagcagctgtgcatgcatgcctgggaggagcatg

SEQ ID NO: 6090 - DNA, 580 bp, Chlorella sorokiniana
  Clone ID: LIB3602-086-Q6-K1-H6
gcctgtggcacctgtcacactcagacgggcacagtcgagtcaccatgactcgcgtggcggttcttgctgtgccctgaaaactatgtacaatgccgcagagcgcgggacgaacaggtgctgctgcgcccctcctccaaggtgctgatcaagatcctctccctcatgatgaatcaccggtacatcggcgagttctagtttgtggacaaccaccgctcggacaagattgtggaggagctgaacggccgcctgaacaagtgcggcacgatctcgccccgctacaacattgcggccaaggacattgaggcgtaggtgggccgtctgctgcccttccgccagtctcggccacatcatcctgaccacctgccagggcatcatggaccacgaggaggccacccggaagaaggtgggaggcaaggtcctatgcttcttatactgagcggcctttgttgatgcgccgcagcagacacggaggaccacagccgtggcagatgcaacacgggcggcgcgcccggccgcggtgtttgctgcaaaaccggcgggagccctgggtgctgcccccctcttacatgctgcaccgtac

SEQ ID NO: 6091 - DNA, 539 bp, Chlorella sorokiniana
  Clone ID: LIB3602-086-Q6-K1-H8
gcccagcgtccggtgggccgtgccgggggcggggggggactgaaaacagaaggaggcagcatgcaggcagcagcactcagcggcaaagccatggcggagtggattgcagccagcaggggcaggctgcccagtgatgtttcagacctggcgattgggctgaccacgccgctgaagcgggggtggggcgaagagattgggcagttccctgccagccagaggggcggcgagagcgctgctgcagcaccgcagcacgagcgtaagcagcccagcaggcagcagcagcagcagcgggcggggttggagcagcagcaacagcggcagcagccagcggcagcaggagcaggggtggcagccaagcagcgcagcaaagaggcggcgggctcggatgctgctgcccccgagctgctgtcccgccctgtccgccgaagctgacaaagcccctgcgcaagctctctccgagtttgttctggatgaaatgactgtgttgcagctatattgtgatgccacttcacagggcaaaaaaaaaaaaaaaatataaa

SEQ ID NO: 6092 - DNA, 502 bp, Chlorella sorokiniana
  unsure (1)..(502): unsure at all n locations; Clone ID: LIB3602-086-Q6-K1-H9
gtgcggggcgggcaanaagaagggcgcgctggacgacattggcaagcgcggcggcatgggcgcgggcggcggcggcggcagctactaggaccagcacgcgggcggctcgggcccccccccctagtttggggggggggggcgntanncnncncanaacanccanactcttcanccaaggtgccgtctgctcaacagtttgttcggtgctggccctggctgcatcctccttgcttgcgtgtacactagctgaactctgccctgttgctggcttgccccctctctccctgccacggggggtacgcacgtaactctccctcgctgccatttgacttgctacaagtttcatccgctttgcgcctcggcgccgcagtgttggctgccatttgtcttgcttttctgtgggcagccatgccacaaaatgtgacaggatgcagaaaaaaaaagaaaaagagaggagagggcggggtacaaaagagcttaaaaaaaaaaaagggggggggcc

SEQ ID NO: 6093 - DNA, 378 bp, Chlorella sorokiniana
  unsure (1)..(378): unsure at all n locations; Clone ID: LIB3602-087-Q6-K1-A1
cgacgcgcgtctnatgcctttgnagctggcgcctnnggctctgcagnaagctgaacatggnnacaagctcaaggggcctgccactcgcnntggccgacaaggtcggntgnnaacttccaggcccaggnnatttcctggnaggggacgagnatgagctgcccaggccccaagggtggtgaagggtagctgnnggagactatgtgtnngcgagctcaagnncgcgtgggcaaggggccacnnagcgtcttccactttttgatgagagggattgaccagggnagggcctgacnntgctgcggcgtgaggctgactncaggcagaaagttgcaaaggggcgcagnnntgcagaaatnnggcctgcaagcccagnnnggcgcc

SEQ ID NO: 6094 - DNA, 487 bp, Chlorella sorokiniana
  unsure (1)..(487): unsure at all n locations; Clone ID: LIB3602-087-Q6-K1-A10
agcgggtgcaccgtccgttcccaanagcgagaacccctatgtcaagctgctggtgaagctgtaccgnttnctggtgcgccgnaccgagagcgacttcaacaaggtggtgctcaagcggctgttgatggggggggacaacctnccgtccctttttctgtncaagctcgccaagttaatgggcggcaaggacgggaagattgcggtgctggtcggnaccattaccgacgacgtgcggctgtttgaggtgcccaagctgngcgtgtgcgcgctgngcgtnaccgagaccggttgggcccggattcttaagggtggtggtgagatcatgagcttngattaggtggggctggtggggcccaaagggagaaactgggtgcttgttggcgggcccaagaacaggtgtgagggcgtcaagcacttttggtcttggacccggtgtgcctgggtttttaggtcaagccgtacgtgcgcagtaaggggccttaagttt

SEQ ID NO: 6095 - DNA, 583 bp, Chlorella sorokiniana
  unsure (1)..(583): unsure at all n locations; Clone ID: LIB3602-087-Q6-K1-A11
cctgttcgtaccagcgtccggcctacgctttgtccgctggggggggggntgggggacaaaagcgcttcctgtgctcggccgaggccatgccgttcgagctgtttgagaacatccagaccaaccaggaagcgagagaggcccgaggcgcaaccggcgcggcacactcntatgccnacagcnnctgcgcggggggggggcggcgggcatgccgccaaagatcttctcctctttctagacgctgtagagccgttcgagcagtgtgcggtgcaatgccttgctcgcgtggcgacggttgcttgcctgtgcaatgcagtgatctgccttccgcattgatgcacatctttgcaggtggtggacgacaactcgggctttgccaaggaccgcatcaggagagctgcacttgtttacagtctctgactcggttgagagaacaatttgcacatttctttgcaggtggttgacgacaacctggggtttgccaaggaccgaaccatcagccggctgacggagatgcagagcgaggagtatctgcgggcacacgccaaggcgcacgccccagagctgctgctggcgctgggcgaac

SEQ ID NO: 6096 - DNA, 492 bp, Chlorella sorokiniana
  Clone ID: LIB3602-087-Q6-K1-A12
agcgttcgggcgcctggcattcggcagggcggggtgggggggggggcacccacgagggcgcaccgtgcgctaccccgaccccgaggacaaggtgaacgacacggtgatgctggacctggagactggcaagatcaaggacttcatcaagttcgatgtgggcaacctggccattgccaccgggggggaggacaacggccgtgtgggcaccattgtgcacaagggagaagcacaagggctccttcgacattgtgcacatcaaggacgcggccggccacacctttgccacccgcgtgaacaacgtgtttgtgattggcaagggcgacaagcccatgatctcgctgcccaagggcaagggcatccggcagagcatcctgcaggagcaggccaagctgtacggcaagtctgcctaagcgcaggcgacgccacatgagctgagccgacgccggcgagggccgcccgctggcggcccccacggcagacgcgcagcacaga

SEQ ID NO: 6097 - DNA, 505 bp, Chlorella sorokiniana
  unsure (1)..(505): unsure at all n locations; Clone ID: LIB3602-087-Q6-K1-A2
gtcgccgcctgtctgctcagctggtgtgggagcttgtgaagaagaacaatgcgttcatccgcaagtcggtgaaccacaccgtgttctccgccgagcccggcaacgtggccaacaagcacagctacaagtacagcggcctggccaaccgcggcgccaccgtggatgtggccgccgccgagggcgccgtggtgatcagcaagagcagcaagaagggcaagctggccggcagcgtgtgcaagaagaacgcgcgccgcaccaactttgccgcggccgccgaggcgcagtctgcaggccgncccgacctgaagcgcgccgnccaggcccgcgcctctgctctgtccaagggcatccgcaaggccaaggccaccgtcgccagccagtagatgggtgctgcctgcgggcgtgcgccccccgcgccagcccacatgtaatgctcgttggccaaaaaaaaaaaaaaaaaaaaaatatttaaaaaaaattaaaaaaaaattaaaaaaattttata

SEQ ID NO: 6098 - DNA, 560 bp, Chlorella sorokiniana
  Clone ID: LIB3602-087-Q6-K1-A4
ggaacacctgttccaggctttggctcgggcacgggcggcacccacacgccgtgctcagctccaccgaaaacatgtccaccgccatgcgcagcctgggcaacattgaggacggcttctacatcgcccctgccttcctggacaagctctcgattcacattgccaagaacttcctggacctgcccaagatcaaggtccccctgattctgggcatctggggtggcaagggccagggcaagaccttccagtgcaacctggcgtacaagaagctgggcattgcccccattgtcatgtccgccggtgagctggagagcggcaacgcgggtgagcccgccaagctgatccgccagcgctaccgcgaggcctccgacatcatcaagaagggcaagatggcgtccctgttcatcaacgatctggatgctggtgccggccgcatgggtgacgccacccagtacaccgtgaacaaccagatggtgaacgccaccctcatgaacattgccgacaaccccaccaacgtgcagctgcccggcgtgtacaagaacgaggagatcccccgcgtgccc

SEQ ID NO: 6099 - DNA, 569 bp, Chlorella sorokiniana
  unsure (1)..(569): unsure at all n locations; Clone ID: LIB3602-087-Q6-K1-A5
agnaagagganaccgggccagggggtgcgggttctcttccctgacccagnacagccctcggnggtcatgcccaccaagcaggctctcaggctggcgcggcagcaggagatggatttggtgatggttacaccgcgagccgacccgcctgtggcgcgcatcaccgagtggagcaaggtgatatacgatgttcagaagcgcgagaaggcggcggccaagcagctgctggcgcagcggcgggcggcggaccccaaggaagtgcgcttctcctgccagatcggggagcatgacctgggcgtcaaaatggcgcaggcccgcaagtttctggaggagggcaacctgctgcgcctggtggtgctgttcaagggcggcccgcagatcgcgctgggacatgaggtcacgctgtacctggttggacagctggcagacctggctcgggtgaaggatgagaagcacttgcagcggccgcagcgcaaccaatgggccgtcatgctggaaccgctgccgcccgagaagcccaccaaaaagaaggacaagcccgcggcagcggcatccacagatggtgcagtccc

SEQ ID NO: 6100 - DNA, 422 bp, Chlorella sorokiniana
  unsure (1)..(422): unsure at all n locations; Clone ID: LIB3602-087-Q6-K1-A6
ccagcgtccgactgtccacgagcttactcaggtgaggggtgacgtgtacaagaacaagcgcgtgctcatggaggccatccacagcagaagcggagaagatccgcgagaagaacattgcggaccagctggaggcgcggcgcgccaagaacaaggcggcgcgcgagcgcaaggcggcccgccgggaggagcgcttcgcgcagggcgtgaccgccgccaccgagagccagaagtaagcggctccgtctcggcggcagcagccgcggcggcggncgacncantgtgctccccccgccgccgcgcgttgttcttgcagcttgcaggctgggcggccggccgcggggcagccccgcccaggactctgtgtatcgttagcgccagcggggcagccggcgccggcgcccggtgtgtaagaccacacgtgc

SEQ ID NO: 6101 - DNA, 494 bp, Chlorella sorokiniana
  unsure (1)..(494): unsure at all n locations; Clone ID: LIB3602-087-Q6-K1-A7
ggcgccaggnaagcggnactgtatttttctgtcccggactctttcagatcgcagcgcttttggccggttttgcgctgctgtaatgccttctgctgaccaaaaaaaaaaaaaaaaaaaaaaaaaaaaaaaaaaaaaaaaaaaaaaaaaaaaaaaaaaaaaaaaaaaaaaaaaaaaaaaaaaaagggggaaaaaaaaaaaaaaaaaaaaaaaaaaaggggggggggttttaaaaaaaaaaaattttacattgggttaattgcgaagtaaaaattttttaatgggggaactaaaataaaattaatgggcgggggtttaaaaaggaggaaaagggaaaaaatttgggttaacaaaattaaatgggtttgaaaaaaataggtttttngcaagtggggaaaaaaataaaaaaggcccgaaccaatggtttttccaaaaagttgaaaaattttaaaaggggaaaaggggaacccgcccttttaagggggattataaaaccc

SEQ ID NO: 6102 - DNA, 505 bp, Chlorella sorokiniana
  Clone ID: LIB3602-087-Q6-K1-A8
tctccaggggctgatcaaggcctttcgctccatgatgaagcacagttacttgggccagttggagtttgtggacaaccaccggtctatcaaaagtgtggtggagttgaaccaccgcgtgggcggggggggggtgatttaggccagctacgacattgcagccattgacatccaggcttgggttggtcttcttcttgcctacggctagatccagcacatcatgatgaccttattccaggctattaagaaccagcaggaggcctttttggaagaagagcccaggggggtgacccgcttcttctactaagccagccttttgagaagggcgccagcactcaccgaggaccacagggctggcctatgcagaacggacggagcgccagatctgcgcctatactgcagtaccgggcttatccctccgtgctgacttcttcttagattgctggaccgcacgggtcacacaaatggtacatggaaatattggggctgttaaccttacccggggggg

SEQ ID NO: 6103 - DNA, 153 bp, Chlorella sorokiniana
  Clone ID: LIB3602-087-Q6-K1-A9
ttcactcggttggcatcaatagcctagaaaggacttcgctgcatcgccctaaacaaacaaatggggcagcctgtaatggaggaatggaaactcgaccttctcagcggatccataaagcacagctgttgtatgagggtaccctacaacgggagg

SEQ ID NO: 6104 - DNA, 513 bp, Chlorella sorokiniana
  unsure (1)..(513): unsure at all n locations; Clone ID: LIB3602-087-Q6-K1-B1
atagttctgnacgcgggcggccgcccttttttttttttttttttttttttttttttttttttttttttttttttttttttttttttttttttgtaataaggaaaaaaggggggggaaaaaaagggaccaggggggggaaaaggaaggggggaaaagggggagggggaggggggaggggggggggggggcaaagggggggggcgaaggggggggggggggggggattaaaaaagggggaaaggggggagggcgggaggcgaaaaaaggggggagaaattggaatatgttggtaagaaaaaaggggggaaggggtgtaaaattaggggggtaaggggagggaaaggagggtaaaaaaaaaaaggggagggggtggagaagggaggtaaattggggaaaaaaagggggaggggggggaaaaagggatgaaagagagaggggggggagggggaaaaggggggggaaaattggtagaggggggaggacttattgagggaaaatttggggagggggggg

SEQ ID NO: 6105 - DNA, 448 bp, Chlorella sorokiniana
  Clone ID: LIB3602-087-Q6-K1-B10
taaaaaaaaaaaaaaaaaaaaaagggggggggggggggggggggaaaaaaaaaaaaaaagggagggacaataataaaaggaaacaaaatataaaaaacaaaaaaaaaaaaaaaaaaaaaaatgggtttatgggggttacctgaattcaaatttactgggccgtagttttcaaaacgtctttgactggggaaaggggggggggggacccaatttaaatgggcttgcaattacatacccctctttagccggggtgacgttttagcttaagaggccttttatccgattggccttacctaccagtttgcccagcctttaatggcaaaatgggaagggggccctgtagttgtcgctattaagcacgagggggtgtaggggggataggggaaagggggaccgttactttatgcgagggcttatagcgcccgggtgtttttgggttatattccct

SEQ ID NO: 6106 - DNA, 539 bp, Chlorella sorokiniana
  unsure (1)..(539): unsure at all n locations; Clone ID: LIB3602-087-Q6-K1-B11
ttcggcgctgnccgccatcaaggtgggtgtggggggggggggaaaaaaatgcaagaggctgaggtggacctgagcaagcgcgccggcgagctgtctgccgaggagctggagagcatcatgaccatcgtggccaacccccgcgcctacaagatccccgactggttcctgaacaggggggggggggtgaaggactgccgctactcgcaggtgacctcctccgcgctggacaccaagctgcgcgatgatctggagcgcctgaagaagatccggaaccaccgcggtctgcgccactactggggcctcaccgtgcgcggccagcacaccaagaccactggccggcgcggcaagaccgtgggcgtggctggcaagaagaagtaagcagcttcttgcgggcgcggcctgcggcacgggcggatgctggcggctgggtgacggcggctggcgccgcccgcgcagcaaccccactggcagagccggcggcagcaggtggatccacaccagtcgttgcagtgctgccggtctgtaatgcacccttcgcg

SEQ ID NO: 6107 - DNA, 278 bp, Chlorella sorokiniana
  unsure (1)..(278): unsure at all n locations; Clone ID: LIB3602-087-Q6-K1-B2
gtgnccgcccaagcgagnacgccgcctctcacccctgntcctgcatacacgtctttacaaaaaacaaaagctgccttacttcgtttctcgccctttttccccgcgctgctagctaggagcccgcccgtcgttccttgagcccgcatttgcagcccacagctaatgcatatctgccctgccatgctgcagcccggtagtctgctccgctcctagctcggcccccatgctggctggctgggtggtgcggncggnagncgnccgccccagccccagcccca

SEQ ID NO: 6108 - DNA, 388 bp, Chlorella sorokiniana
  unsure (1)..(388): unsure at all n locations; Clone ID: LIB3602-087-Q6-K1-B4
ggnggcgcaggttgcccgcagnagcggcgcatcgtgnaacaaggcggccacccgctccgtggcgggcgccagcctggaggtgatccagaagaagaagagcgagaagcccgaggcgcgcaaggcctcccgcgaggcggcgctgcgtgagatcaaggagcgcgccaagaaggccaaggccgacaaggcggtgcagaaggcgcaggccaaggcctcgggcgccggcaaggctgtcaagaacatgcctaagggcgcgggcaagggcggcgccaagagcaccggccgctaagccagcggcaatgcagcgggcgtagcggcctgctgggccgctgccgttgtaacgcacttcctcggaaaaaaaaaaaaaaaaaaaaaaaaaaaaaaaaaaata

SEQ ID NO: 6109 - DNA, 677 bp, Chlorella sorokiniana
  unsure (1)..(677): unsure at all n locations; Clone ID: LIB3602-087-Q6-K1-B5
gtggtnggtgcgcacctcgcccgcttcccgnccgcccccgnccgcccgcccccgtnccgccaccactgnngcagcagcagctggcgcccgcgnngcaggcggtcaagaaagaaatgcgtcnngcagcaagaaagggcgnngccggcggttttttgagaaatgggggtggnngccccgnnnggcagcgccctcgtcgnncggcgtaagcgtgtgcgggcggctctttggcggagtnnggcggtgtgccatttgcagcgcttgcctgcnnccccgccggccccctccctttgctcttttttgccccctttgcgcttcactttctctttgtagctttcctttttgccgccgcatttgtgcgtgctcgcttgtatgnannacattcacgtttcatttgcccatttaccaacgaatnngccgttgctttccccttcagctcttttcttgaacccttccccncccttggcccccttgcnnaccgatttcaaagctttcttccttccaccttgccccttctctttgcgtgccctttcaccggcgnntgcaaccccccttcccagcttgcacccttcccttgnaggggtgcgcttgggcctctttccagttttgctttaaagccccacgcgnnagtcgacactttcccaacacggtcattggacaccacaagtcttttgcccgtg

SEQ ID NO: 6110 - DNA, 458 bp, Chlorella sorokiniana
  Clone ID: LIB3602-087-Q6-K1-B6
ggagaagacagcggctctgcaaccatggcggagtccgtccagactttcggccgcaagaagaatgcggtggctgtggcctatgtgaagcgcggcaagggcgagatccgcctcaacggcgccccgctggagctggtgcagcccgagacgctgcgctggaaggcgtttgagccggtgctgctgctgggcaagcagcgcttctccaacgtggacatccgcatccgcgtcaagggcggcggccaggtgtcccagatctacgccatccgccaggccatctccaagggcattgtggccttctaccagaagtacgtggatgagcagagcaagaacgagatcaaggacatgctgctgacctacgaccgcacgctgctggtggccgaccctcgccgctgggagcccaagagttgggtggccacggggcccgcgcgcggtttcagaaatcttacaggataaggctgccc

SEQ ID NO: 6111 - DNA, 318 bp, Chlorella sorokiniana
  unsure (1)..(318): unsure at all n locations; Clone ID: LIB3602-087-Q6-K1-B7
gaaaaaaaaacccgggggggggggggggggggaaaaaaaaaaaaaaaaaaaaaaggaagaaaaaaaaaaaattaactaaatgaaaaaaaactgaataatatgaaaaaaaggagaatatatagtaatgagacgctggtagatggttttttttttgtgtcaacaagtacatgtttttgggggggggggggggttttattaaacaatactctttcttatgaaatcattaatagagatgcgcatnattaagatgatttggtgagaaggaggagatatggtgtatataggtatgttaggagtgttagagaagaaatttgttgt

SEQ ID NO: 6112 - DNA, 291 bp, Chlorella sorokiniana
  unsure (1)..(291): unsure at all n locations; Clone ID: LIB3602-087-Q6-K1-B8
tcgaccagcgtccgtgnacacccgccaactcacatgggggggggcgggggggggaacaaacgtctggctggctacttggccctgtttgcggagggttggctgtgccctagagatgcagcgtggggttcaaggtggactttgggtgggtccttgcctaggatggatgctccagagggggcttccgggggggggggcaccagatcacccgttagcgttgtcttcatttgtttagtgcgtgcttagcgttctcttcatttggttgggggcgctgacatgtgacccatgtaacat

SEQ ID NO: 6113 - DNA, 257 bp, Chlorella sorokiniana
  Clone ID: LIB3602-087-Q6-K1-B9
ctgcgggtggccaactgggggggggggggggggcgcgtagacattcactgcgacctgcaggccgttctgctgctgacctacagatacggttgtctgatgccgatggcctgctggtgggaggtgatcatctacgatgccatgcgccacaaagacccctcgctacgctctgggggggggggggtgggacagcatcacattggtcctgaggacgcaaggccgcattcaaggtatttggggtgcctgtgatgggcccacac

SEQ ID NO: 6114 - DNA, 479 bp, Chlorella sorokiniana
  unsure (1)..(479): unsure at all n locations; Clone ID: LIB3602-087-Q6-K1-C1
gcctttggcctgcgctggtgacagtcaagaggcgnagggcgacaagcgctaggaggtgtgcacccgcgagtacaccctcaacctgggcaagcggctgcacggcatcaccttcaagaagcgggcgccccgcgccatcaaggagatccagaagtttgcggccaagcagatgggcaccaaggtggtgcgcgtggacgtcaagctgaacaaggcggtgtggagccagggcatcaagaacgtgcccaaccggctgcgcattgtggtgcagcggaagcgcaacgaggacgacgaggactctgaggagatgttctccctggtgaccctggctgaggaccagaacaccaagaagggcgtggttgtgctggaggcgtaagcgcctgccgcacgccgcagcaccaaattgacgtcacctcccaccgcagcagccgcactctcccgacttccctgcacgcgttgcagcagcatgtaacgcgcgcgctagc

SEQ ID NO: 6115 - DNA, 76 bp, Chlorella sorokiniana
  unsure (1)..(76): unsure at all n locations; Clone ID: LIB3602-087-Q6-K1-C10
naaaaaaaaaaaaaaaaaaaaaaaggggggggggggggggggaaaaaaaaaaaaaaaaggggcggggcgttctaaa

SEQ ID NO: 6116 - DNA, 52 bp, Chlorella sorokiniana
  Clone ID: LIB3602-087-Q6-K1-C11
agcgtccgcaaaaaaaaaaaaaaaaaaaaaagggggggggggggtggggggg

SEQ ID NO: 6117 - DNA, 551 bp, Chlorella sorokiniana
  unsure (1)..(551): unsure at all n locations; Clone ID: LIB3602-087-Q6-K1-C12
ctggnggcacagcatggcctacgcagggggggagganagatcaaaaaagagagactcggtcatcattgacgtggacgccgacggccagatcagcgtgctcaacggcgacaagaagatggggactgccatccccaccgccaccggcatcgactactctgcgtaagcgccgccacggggggggggggcggccnnacngctctacaccccncgccctcctcccatttcattcaaaccgcttttctctaggcaggctccccggcctcttgtctcccacaggggcggcacgccaccacgcgccgcccccggcccgtgcgcgcgccatgcataccgtgcgcagcggcggggggcgcanactactcagtgttctctaagactgctggtcgccaagggatgaagcagcgatgtgccgccgaaaggggccggtgcctggccctgaccgcacggnggcggacatatggccccattggccgtcggcgcagccgccggtgcccggcgcgcgcgttttgtcacgtgacacctcgttcccccaactcttctcactggtgctgcac

SEQ ID NO: 6118 - DNA, 388 bp, Chlorella sorokiniana
  unsure (1)..(388): unsure at all n locations; Clone ID: LIB3602-087-Q6-K1-C2
ggcgagcaagnagctcaggcggcgtacttgcgggtcatcgcggcggataacgccatgcagcttagtcaggaatgcagnttagtcaggactgcagtcactatgtcgaagcaatcgtgctaaaggtcttggtatcatctncgtcctggtatcatctncgtcctggtgtgatgtgccacccttccacacctnttncacggncgnagagggggcacagngcatntacattgagggcattcgtccgtggntgntnaggtaccagcctgccctggaccatgggctggntgcgctggtgnatacgttgtggtgggctgatctgacaattttggccgaggtgctgtaccactttgtccagtggacgccggtgctggagtggtttgtgcgtggaccg

SEQ ID NO: 6119 - DNA, 390 bp, Chlorella sorokiniana
  unsure (1)..(390): unsure at all n locations; Clone ID: LIB3602-087-Q6-K1-C3
ccgncgtgctgcgggccagcggcgtggcggcctgcggccccgtcctgctgctgcacttctttggctacctgctgggatacctgctgccgcgcatgctgggcttcaatgagaagacgtcgcgcacggtgagcattgagacgggcatgcagtcggcggccatgggctatgcgctttccaccaagcactttgcggatattctggtggcggtgccaagcagcgtgtccatcctggtcatggtgtggatcggcgctgcgctggctgtggtctggcgcatgatgcccatcaaggaccagtaaacgagcggtggtgggatgccgctctaaaagtaacctctctctgaagggcggtggcggtctacaggcatgcgcagctgttgctgctgtgcagggc

SEQ ID NO: 6120 - DNA, 418 bp, Chlorella sorokiniana
  Clone ID: LIB3602-087-Q6-K1-C4
cggccgcgtgggcggccgcgtgggatgggggagtcggcattaagtaaagaatctggcctgagactctttacgccgcacgcctgcgcccgagcctgcagattttggccaacgaaattgaccaccaccatttcctctgaatgcctagccggccgcagctctgcccgtcgatggccggctgaactgcctgctcctgccccaatgttacgcttagccctcaaagccctcgttggaatcatccagtcttgcacatgcccctccactttactgattctaatccatgtctgtcagccaaccagccttgcactgcttgctgcccttgcctgtccggggctgctggcagtgttgacaggtgccagctactggggctgcacagccaggctgaacctctcaggataatttgtaactacttcttgctgca

SEQ ID NO: 6121 - DNA, 187 bp, Chlorella sorokiniana
  unsure (1)..(187): unsure at all n locations; Clone ID: LIB3602-087-Q6-K1-C5
agcgtccgnagtgnaacctaacagcaccatcaaaaaaaaaaaaaaaaaaaaaaaaaaaaaaaaaaaaaaaaaaaagggtggccgataaaaaaaaaaaaaaaaaaaaaaaaaaaaaaaaaaaaaaaaaaaaaaaaaaaaaaaaaaaaaaaaaaaaaaaaaaaaaaaaaaaggggggggggttgtaaat

SEQ ID NO: 6122 - DNA, 106 bp, Chlorella sorokiniana
  unsure (1)..(106): unsure at all n locations; Clone ID: LIB3602-087-Q6-K1-C6
naaaaaaaaaaaaaaaaaaaaaaaaaaaaaaaaaaaaaaaaaaaaaaaaaaaaaaaaaaaaaaaaaaaaaaaaaaaaaaaaaaaaaaaaaaaaaaaaaaaaaaaaa

SEQ ID NO: 6123 - DNA, 539 bp, Chlorella sorokiniana
  unsure (1)..(539): unsure at all n locations; Clone ID: LIB3602-087-Q6-K1-C8
tcccggttcgaccagcgtccggcgcccgctgncatctttgnggggggggaggggtgggccgacctgacaaagcggctgccgccggtttcacatccgagctggcctgctccttctcctcgctgctggacatgctgccgcccgcccagcaggcagccaaggaggcacggctgcgtggccagctggagcagcgcagggggggggacgccgctgcactggcacgctcagcgctggaccttgcccttgcccgctgagcgggttgagtggcagcaactgctgtggaactcgagcggcgcagttggcagacgacatcgttggggaactgggatgctgaaccgcaagacctgcatgggtgtcgtgggtgcagaactgctcacaatggacagtgtagatgttttgcaactttccatgtgtgtaaatatgttcggtgcanaaaaaaaaaaagaaaaaaaagggaaggaggaggagggggggaggaggaaagaaaaaaaaaaaagagagggaggagaaaagagggggggggggcgtttttaaaggatcca

SEQ ID NO: 6124 - DNA, 522 bp, Chlorella sorokiniana
  unsure (1)..(522): unsure at all n locations; Clone ID: LIB3602-087-Q6-K1-C9
gtggttcaaccacnnaangcagtgcagcgagccggganactctgcctggtcctcgttcgtgtttccgcggcgcaaccagtactgcctgtttggtggctgccaagcgcacggtgtgctggacgccatgcctcaggagccgggcgccggggagcaggccccacgcatcgccttcctagtgaactggtgggcggcgcgccccaagagcgtggtgcgtgccacagccgaggatgtggcggcaggccgccttgcacccgccagcgacgtcctggcgctaggcttttccggaagcggcagcgagcaagagccgccacgcgtgcagtttgtctgcctcgatgcgccggtgctgcaagagggcgagctgctgccggtggatgagctgctggagcagtgtggcgtgcggctgtgcggcgagggcgcggctgatgcgctgaccatacgccacccgggcctcaccctgttcccgctggatgacgagtcggtggatgcctcggggccgcagctgcaggtcatgggggccctcat

SEQ ID NO: 6125 - DNA, 559 bp, Chlorella sorokiniana
  unsure (1)..(559): unsure at all n locations; Clone ID: LIB3602-087-Q6-K1-D1
ctgcactttggcgcaggccccgggctcatcgngnctcgtgaggcgttcgtgggcgctagcaggcttgtagagcagcagcagcggtggcggcagcgatgaacaagctgatctttgccgactcggcgggccccgccttccagcggatttacaacaacagccactttgcgctggcggccctgctgcccgcctcgctcgtgtcgccgcaggacggcaccattgccaaggtggcggacgtgggcctggcggcgaccatcactgtgcacaaccacatcgcgctcaactacgtcatttctgactacgtgccgngggcgctccaggtgcctgttcggggcggngtgctggcgctcagcgcgctgacggctgtggggctgacgaagctggcgctgtccggccctggcattggcggcgcagtgaaggagctttggaagaagaagtgaaggcggnacaactggttgctgcacacgtggcaaacttggctgctgccatggccagncacacgaagcttnttagttagtgccaaacacgtttcggccacatgcaatccatgaaatgaaccaac

SEQ ID NO: 6126 - DNA, 524 bp, Chlorella sorokiniana
  unsure (1)..(524): unsure at all n locations; Clone ID: LIB3602-087-Q6-K1-D10
agcgttcgtctaaaacgcgaacggccgccctttttttttttttttttttttttttttttttttttttttttttttttttttttttttttttttttttttttttttttttttttttttttttttttttttttttttttttttttttttttttttttttttttttttttttttttttttttaaggggggggggggtttaaaaaaaaaaaaaaaaaaaaaaaaaaattttttaaaaaaaaaaaaggggggtttttaaaaaaaaaaaaaaaaaaaaagggtttaaaaaaaaaaaaatttttttaaaaggggaaaaaaaaaaaaaaaaaaggggggttttttaaaaaaaggggaaaaaaaaaaaaattggggaaaaaaaaaaaaaaaggggggaaaaaaaaattttttttggaaaggggaaaaaaaaaaaaaaagggntaaaaaatttttttttaaaaaaattggggaattaaaaaggaaaaaaaaaaaagtttttaaggggggaaaaaaaaagggggggttggtgggt

SEQ ID NO: 6127 - DNA, 359 bp, Chlorella sorokiniana
  unsure (1)..(359): unsure at all n locations; Clone ID: LIB3602-087-Q6-K1-D11
gggggggggggggggggcccacaatcccaccccatttnnacacctcatnnttncattacccnccacccactcaccttnccccttnctncgggcctcttcacccgttgatcaccccttgccaacctnccctacccctnctcttccttggggggggggggggtctnaatacnttccccacttcatttgttccactgtgtagagctgccgctaataagtgcaccccaacacgctgtgccggctctttcctggccaatttgcgaacgccagctggcggctgctggtgtnnatgcacccagctccatgcatgctggggggggaaaacacgtgctanaactttttacgtgtaactgaatatgagg

SEQ ID NO: 6128 - DNA, 596 bp, Chlorella sorokiniana
  unsure (1)..(596): unsure at all n locations; Clone ID: LIB3602-087-Q6-K1-D12
ccggtngctgggggcggggggggcgggggtctgccacatttatgtggggatgcgagcggctgacatgggacaagggcgcgcctgcgatctgcgtggnacgtccaaggtgcgactacctccgcntgcatgccgaacgcgtgtggagaaagatttcttggtgcatcgagaanncctggcgggggtacaggggtgggggtgcgctcntcaagggcgcgtgcaggaagcgggctgtgacgctggcatgggcggcgaagccgggcggcagctgacgctgggggctgccagcccgccccctctgcgcgggacgagtacagcagcctggactgcacgctggagctggtgagcgggctggaccaggccatcgaccacatccacacccacggcagcgggcacacggagagcatcatcacggaggaccaggcaggagctgacgacttcctgcggcgggtggacagcgcgtgcgtgttccacaacgcccacacgcgcttcagcgatggctaccgctttgggctgggtgctgaggtgggcattagcacagcacgcatgcatgcccgcggccctgtggggcgtggagggcctgcttaccacgcgctacc

SEQ ID NO: 6129 - DNA, 561 bp, Chlorella sorokiniana
  Clone ID: LIB3602-087-Q6-K1-D2
cccaccgtcgccactccagcctgtggctgatggcctaccgcctctccaagctctatgaggcgggcaagatgacccatgagcaggcgtccctggtcaaggcgtggaacacgctgcgcggccgtgaggtggtggctctgggccgcgagctgctgggcggcaacggcatcctgtccgagttcctggtggccaaggtctttgccgacatggaggcgtactacagctacgagggcacgtatgaggtcaacgcgctggtggcaggccgcggtgttacggtcatttctgccatcaagcccccgggctcgggcaaggtgcaggtgcaggcctgatgtctgactggctgctcagtagcaaggaggcatgcagttggcgtgctgctgagtaagtgcccgcctgccgccaggctgggtgtgcagcactggctctgtactctagtcaaggaggccaggatggagtgccttacatggcgcatgcagcggcaattaaaaattttgatacaaacagccgggcgctcgcccaaacagtgccacacaatttttggaatgaaaggaccggtggcacata

SEQ ID NO: 6130 - DNA, 469 bp, Chlorella sorokiniana
  unsure (1)..(469): unsure at all n locations; Clone ID: LIB3602-087-Q6-K1-D4
nacagccggtcacctggtgcagcgcctcacctatcgccggcgtcacaagctaccgccaccaagtccaacaagcagcggatcctgcggacccctggcggcaagctggtgtaccagctggccaagaagaagacctcccaccccacctgccccatctccggccagcggctcaatgggctgcccgcggtgcgccccaacagcctgcaccgcgtgaacaagagcaagaagacggtgcaccgcgcgtacggcggccacctggcggcgggcgtggtcaaggagcgcatcgtgcgcgccttcctggtggaggagcagaagatcgtgaagaaggtgctgaagctgcaggctgccaaggaggctgcgcaggccaaggccgcggcggcaggcagcaagggcaagaagaagtccaagaagtgagcggcgcacgcgagcggacagttgcgccccatgctcccgctgtaatgcaccctcgatg

SEQ ID NO: 6131 - DNA, 429 bp, Chlorella sorokiniana
  unsure (1)..(429): unsure at all n locations; Clone ID: LIB3602-087-Q6-K1-D5
tgcatggcagggccgctcccgtcgcgagcaggaaaacaggnagcgcctgcacgccctcgtgactctgagcagctctgtgccctttcatccaccccaagcaatcgtgtttgacctgggcaaggtattgttggactttgacttccacaagtcctcccggcggctggcggaagcatgccaggcacctacgcccacacggcaggcggcgcttctggagctgtttgggcactcgccgcagcccacgggcctgctggatcggtggggcggtcgctcgctggtggagcaaatggagcgcggccagctcagcagccacgagttttatgagctggtccgcgataaatcaggcctgcaggtcgactaccaaaccttctcagagctgtatgcagacattttcacgcccatagagccgctgatcgcacaacagcagctgct

SEQ ID NO: 6132 - DNA, 434 bp, Chlorella sorokiniana
  Clone ID: LIB3602-087-Q6-K1-D7
agaacctgcgcaagtccagagcgcgtactaatgggcctgctttatgtgcccaatgatgaacccggcaataccaggtgggaggagtgaggcgggcaaatgcacgctgttgttggcgggggattagaaatgtgacaattggttggacgaactcttgtgtgcggatgtagtgacattgtccaagataggattgcgtgttcttgcagactgcgcccaagaacgaacgacgatattatgtgagcataagctacctcccttgagataccaacagttttgatgcatgatttaccagcgcttgttctgcgcattaatatcttccactgccactgtgtgacaaaagttgtatcgttaccacatgagaagctcaaatgtaaagttcgatggttaaaaaaaataaaagaaaagggaaaaaataataaaaaaaaataaaagggggg

SEQ ID NO: 6133 - DNA, 371 bp, Chlorella sorokiniana
  Clone ID: LIB3602-087-Q6-K1-D8
tcgaccagcgttcgcccgctcaagccctccagcggcggggggggagcgggaaaatgacccccaacgcacgtccgccgctgcaccacctgccgccccctcacccgcacccatcttccacccgccacctttcctgccgctcaccgccgcacatcctacctcccacacctcactcctgtgcagggtgacgggcgcttcacacagcggctgctgccatgcaaagctgctgccaaacccatccatcatgctcgcacacccactcacccacacgtccaacgtatccagacccattttcaaggcccgactgtacagtgcctttttgcgtccttatgccgatctggtaccaggacttaatgtgtaacaaatggtatgtt

SEQ ID NO: 6134 - DNA, 431 bp, Chlorella sorokiniana
  Clone ID: LIB3602-087-Q6-K1-D9
ccgggtcgcccagcgttcggcgcggcggcagcagccctcatccagcgccgagcccccgctgctgcacgacagcctgggcgaggcagactacagccactacaagcggcagcgcaccacgccgcgcatgagcagcatcagcgagcgcagatactacctgaacaactcgctgtctgaggggacgtacggcatgccgggggtggggcggcacaagcgcacgcagggctcctcgctgcggggcgggcccaagccaatgatgatgcagcgcatcgtggtggtcaaccgctcggcggcccaggacgacaagccggagcgcctgcacgactccttctccggcgtcgactacagcgccagccgctgagcgggagtggggcgcagttgtgcgcccgcagacgactggtgatggcccgagccagctggcctgtggggggcag

SEQ ID NO: 6135 - DNA, 392 bp, Chlorella sorokiniana
  Clone ID: LIB3602-087-Q6-K1-E1
gtggagcacgcggctggcccagtcgaacgtctaagaagtcgggatcgtcggcaagtacggcacccgctatggcgcttcgctgaggaagcagatcaagaagatcgaagttagccagcactccaagtacttctgcagcttctgcggcaagttcgccatgaagcgccaggtggttggcatctggaagtgcaaggcctgcaagaagacccaggctggcggcgcgtacgtgctcaacactgcggcgtccgtgactgtgcggtccaccatccgccgcctgcgggagcagaccgagaagtaagcgagcggccattgaggagtgaagcgggcggcggcggcggcgctgcagcagcgcgctgcagcgtgccgggtggccgctgcttcatgatgtaacgcag

SEQ ID NO: 6136 - DNA, 561 bp, Chlorella sorokiniana
  Clone ID: LIB3602-087-Q6-K1-E10
ggcaggcatcagctggtcagggggctgcaggcgagcgtgtcggggccacggttcgccgcccggctgggcgcggcgccgaggcggcggcggcaggtgccgctgccgctgcttgaggcacagccccgtgcgttggatgcagctggcagatttgggggagtctgcccctgcatgctgcttcacgcctttcagccttgagcttgctcggctgtcagcctgaagcccgcgtgcgcagctgcgtgccccccgagtgtgcaaccgcagcgccctgcagctcccagcctccccgccagtcagtgcaagccgccagcgtgccgccctaggcggctgcatcagtcttgacagcggcagctccctggtcccttttgctttggctgggctcagacccattcccttccccatacaccccagggccaccgcacccggagctgcgtcgcgcaggcgcggctgcggccgggttgcgtgccaggcaagggcggcggggcgcagcgctgcggcgcggctgttttgcgtgacgccccctgtggcgtttgctcacgtgagtttcgccgtattgtgccaccc

SEQ ID NO: 6137 - DNA, 581 bp, Chlorella sorokiniana
  unsure (1)..(581): unsure at all n locations; Clone ID: LIB3602-087-Q6-K1-E11
cccagcgttcggccggnccagtgactgacgatgtgtgcggcgtngaccgttgactatgcgaccttgcatgctccatgcaccctgngattagcacgctattgctgcacttgcccgccaagcagcgggcgcgcgacacccctgccccatcgcatgcagcattccacttgcattttgcactacgaggcgggggggggggctgctgggctgcggtacggcaagcagcccgcctgctggccatgcggctttgatacgaccccaccccccaaacccaacgacagcttcattcccgccaaagtttttcaaaccccttccggagccgttggacggcgttcctttggttttgcaaacacaacccgctcactttgcatggcattctgcaagtgccacccccacggcccctccctttgacctccctccggctttgctttgccgcctcatgtttccctccgtctcccccttcccacttcatttctcctgcaagcgggcgtggctcatgccccctgcgctgccaccccatcgctgctggtctgtgaacctcgttttaattagcctgcgtccagtgcccgtttctgcggttttgt

SEQ ID NO: 6138 - DNA, 568 bp, Chlorella sorokiniana
  unsure (1)..(568): unsure at all n locations; Clone ID: LIB3602-087-Q6-K1-E12
cgcttcagggacagctgccgcccagggcggcatgttcngagccctactcacacagccggcgccatggcccgcaccaagcagactgcccgcaagtccacgggcggcaaggcgccccgcaagcagctggccaccaaggccgcacgcaagtccgcccccaccaccggcggcgtgaagagagggggaccgctaccgccccggtaccgtggcgctgcgcgagatccgcaagtaccagaagtctacggagctgctgatccgcaagctgcccttccagcgcctggtgcgcgagatcgcccaggacttcaagaccgacctgcgcttccagagctccgcggtgctggcgctgcaggaggccgccgaggcctacctggtgggcctgtttgaggacaccaacctgtgcgccatccacgctaagcgcgtgaccatcatgcccaaggacatccagctggctcggcgcatccgcggcgagcgcgcgtaagctgcgcgtgcgcctcctgcgcatggcatcaacacggcctcgcagcggctgggcaggtctgcctggaggcgcagtgccagctcgctggcccac

SEQ ID NO: 6139 - DNA, 364 bp, Chlorella sorokiniana
  Clone ID: LIB3602-087-Q6-K1-E2
ccttccacgcgcctccctggccaagcgggcatgcccaagcagaacggcatgacccacctgcaggctggcgatgctcgcgctgaagaggcgtctttcattctaaagaccaacgaccccgccggcttcaccgtcgtggacgtcatggcctggggcgccctgggccacgctgccgccttctacatcctcgcaacctccagcctgggcctcgaccgcaaccccttctaaaccagtccacggccgcagcctgcgcccaggccacaaccccatcccgagaagagcatttgtccggcgctgtgcctttttctgttgggcatggcgactgcagccacgcatgtgatactgctatgtaaacgaccgcttgtac

SEQ ID NO: 6140 - DNA, 362 bp, Chlorella sorokiniana
  Clone ID: LIB3602-087-Q6-K1-E3
cccgttttcgctgccgcccgcggcagccaaccgtcactgcaaatcagatccggtcggtcaatattctgctgccccctcctcgctccctccagtgcctcttgtttttgcccctcgtgccaaccgacagtgtagcgcccacacatgcagcagccaccggtgcagcagacatctgtgcacacccttgctgcagctttttttcctgtaacatcaacacccaaaaaaaaaaaaaaaaaaaaaaaaaaaaaaaaaaaaaaaaaaaaaaaaaaaaaagggagaaacgaataaaaagatccaaactaaaatacagcgagcaaaacaaaaaaaaaaaaatataatataaagaaacctaaaattaaattaac

SEQ ID NO: 6141 - DNA, 560 bp, Chlorella sorokiniana
  unsure (1)..(560): unsure at all n locations; Clone ID: LIB3602-087-Q6-K1-E4
gcaggngtggctgggcgttgtngaagcagagctgctgaccgcccaggacgagctggccaaggtgaagcaggcggcgcgctccgacgtgcgccagctgcagctggagctggtcagcagccgcggggagtcggagcagcgtgcgcgcgacctggctgccgccgaggccgagattgcggatctgcggcgccagctggaggcgcagcagcaggcagcagccagcgccgctgcagatgccgcccctaagccagccgccaagcgcggccgcaagaaggcaaacgggacggggcccgcaaccgcagtggaggttgagcacatcaccgccagccaggcggcggacgcagcggtggcggcggcgcaggcggacgctgcggcggcgcagcagcgtgcgattgagattcgcgccgaggccgcgatgctggtggaaaccgtggaggaccgcgcctatgcggctgtgatggaggcggagggcaaggccaagactgctgagcgcgaggccgagcgcctgcgggccaagctgcgcgccctgagcagccgggatgaggcctgagcgccgcccgctt

SEQ ID NO: 6142 - DNA, 570 bp, Chlorella sorokiniana
  Clone ID: LIB3602-087-Q6-K1-E5
gcctgttcctctgcttccgcaccatgttcacctcgctgttcgtgtggccaacgagcagaaaagatgttgaaggagagggcctctggcatgtaccgcctgtcggccttctacctggcgcgcaccgcctcagatattccggccgacctgtccgtgccgagcatcttcatcgccatcatctacctgatgggcgggctgcgccacggcggctacttcttcctcaattggctcaccgtgctgctgtccacgctggtggcgcagactctgggcctgctgatcggagccacagtgatggtcgtcaagactgcgcagacagtggcagccgtgctgatgctcacattcatgctagtgggcggcttttatgtgaccaacatccccgtgtggattgcctggatcaagtggctgtccttcctcacgtacaccttcagcctgctgctcaagattgagtttgcggggcgggacctgtgggactgcagcattggcagcgatgagaacttcaacccatccgacccctggaactatgtggcctctgggcagtgcgagccggtcaaggacctgaacgacagcttcaac

SEQ ID NO: 6143 - DNA, 567 bp, Chlorella sorokiniana
  unsure (1)..(567): unsure at all n locations; Clone ID: LIB3602-087-Q6-K1-E6
gncagcgccctccatccgcggtacgatggcggacccatttggtgcgctgagcgggcctccctngatgaggacttgttccctcaggcagccttctccaagaaagccctacgtcctttgtcgctcatacatactccccgcgcacgcagcggcctcagccttgcatcccgccactgctgcccctgtaccaacaccacaataacctcaccaacagcgcccacgcgccctctgcatgacccccaggcttgaacccaactctactgcctctgtctctgataacctgccgtcccgccccacccccgtgccggcccttgcccagtactgcccgtctgcccttgcttgccagtccattcatgttgtccaaccgtcatgtgtgcgcatgcctgcacagcccgacatacaaatgcgttacctctgtctgtgacctccttgcttgcaacaacatgtttgtccacctaacccctttgtgcattgcttagcccacctttgtttgcagcccctgcttgcttagcccacctccctcttgccttttgccctgtgccgcctgcctgcgccttgcatgccgcacag

SEQ ID NO: 6144 - DNA, 558 bp, Chlorella sorokiniana
  Clone ID: LIB3602-087-Q6-K1-E7
cacattgggctggtctggtcacactgggtaagcgggcagttgccagccagtttgtgcccctccagtgtgccgccaagcaagtcggcaccacaatcaaccatacgcgcaggtttgcctgcaagtcagacctgtcgcccgagcagatcagccttccgccgggcggctggctggccagcttgcagcggctggaggtgccttatgagatagtggcagcacagcatgtgcagaggcagctggaggctgctgatcagctggaggagctggttgttgacggcctgccactgccaccgccaggccccctgccggcggcgcttgcattcatcccctgggcggctggccggccgcggatgcagcggctgacaatcgtgcttacggcgcgctggcgccccggggagcgcagccagctgcagcggtctgagagcagcagcccagcaggggagcagagcgactcccagtttgctctggagcagcaagtgttggcagccatgtgcgcccttactgccgctgcactgcaagcgcaagcgcgccggcccgggctggcggttcaactcacacgca

SEQ ID NO: 6145 - DNA, 471 bp, Chlorella sorokiniana
  unsure (1)..(471): unsure at all n locations; Clone ID: LIB3602-087-Q6-K1-E8
tgtttgccttgcactccactcaggcgcaccatcatnagctccaaaagaggcagggggggggtgttccncggcgccaccaccgacaccgaccgccgccatggcgaccctgatgccgggggcctgacctctggagagaatactctttatcgcgtgnatacctaccaaagacgggggggggggggcannccaancannanncctcccancantactcctctggaaagggagttnanctggacaagggccccggcaccgactgagcaagctgtgcgtttgctggcctgctgtagcaggcttgcctgctagcctgccagacgatgagcatgggtcagcccagatggcacagncaccggcctgcgcctgtcccttaacccccaagaccccttcccagttgtgcgctgaaactgttagcgaaccctgtgatttgacactggatgttatattggctgtgaatccctttggtctagcgat

SEQ ID NO: 6146 - DNA, 392 bp, Chlorella sorokiniana
  Clone ID: LIB3602-087-Q6-K1-E9
cagcgttcggcgcgcttggcttgcgctgcccggggggggagggggggtttttgctccaatttgttgtctgtcgtccggcccacacccttttgtttgaacatgctccttcccttgcacccgtactagctacccaaacttgatccaaacccccttgtgtatgccgcatgccgtataaccccgtgggttgacgcggtcacagtcccccttgccttaacaacgcttccacaatacgcacacgccacaaggcttacgcggcccaacgcttgcaatctgctcgtgtactggctggcttgcaactgcctgcccgtgagcgccttgcccctcctgtacgaccaccaccccacctgtgcactcctcacgctctaccgaaacctctgtaaacgcctcctggt

SEQ ID NO: 6147 - DNA, 477 bp, Chlorella sorokiniana
  unsure (1)..(477): unsure at all n locations; Clone ID: LIB3602-087-Q6-K1-F10
acgctcctgcctgcgcatacgcgtcgtgatgcacaccacaacccacaaggcgatgccggcgagnactactgcgagctggtgcgcggcctgggcgagacgattgtgagcggcaccgtgccgggcgcggcgctcacctttgtggcccgcaaggacgacattgagaaccccaggtgctgctgtacccctccaaggcgagggcatgtttgtgcccgagtccctcatcttccgctccgactccaatggagaggacttggagggctacgcgggcgcaggcctgtatgactcggtgaccaccgcgcacacggagcgccgcaaggtggactactcgtccgacccgctcatgactgaccccggcttccgccaccgcctgatggtggaggtgtgcaaggcggggctggccatcgagcaggcgctgggatccgcgcaggatgtggagggcgtcntggacgccgacggcaccctgaccgtggtgcagac

SEQ ID NO: 6148 - DNA, 82 bp, Chlorella sorokiniana
  unsure (1)..(82): unsure at all n locations; Clone ID: LIB3602-087-Q6-K1-F11
gtgcttgcgacgtgttagcttttttataggggcacctatttttttttttttgcccnccnnttaacattttgggggggggggg

SEQ ID NO: 6149 - DNA, 588 bp, Chlorella sorokiniana
  Clone ID: LIB3602-087-Q6-K1-F12
cgttcgccccgcgtccgcgcagcctgtcgcgggtggtacgtctgaccaaaactcagcggggcctggatgctgcagcgcgccatgagcatcccagccgacctgcgctcctatcgcaccgacttcatcaataagctgctggcaggcaacttcaaggccatggagcagctgggcgagcccacgcgggggcccttcctgcaggatgtgatccagctgggtccgctggtgcggaccatgggcaagcagatggtcaccgagccgctcatggtgccacaaatcctgctgcgggtcgggccggcagctatggcggactggctgctgcatctgctgggcttggcaacatataccgtcctggactgggacctccagaagtacgagccggtgatcgacaagctgccgcccaagccgcgcttcatcatgcggcgcacgctggaaaacgtaaagtttggggcgggcaaagactaccgcctgtgatgggctgctaccatgcctgaaacgtatgacactctgcacaggcgctctgattgctcgtgcgatgtaggcgcctgccaaccgttgccccacctgccccgcactgcgccatttcattat

SEQ ID NO: 6150 - DNA, 422 bp, Chlorella sorokiniana
  unsure (1)..(422): unsure at all n locations; Clone ID: LIB3602-087-Q6-K1-F2
ggctttgcagttccttgtacgaggnagtgggnncgcacccctnactttgtgtccaagggagggagtacggccgcatcatggnaggggcaccggccagctggnagcaggttngagctggnccgactggnacggctgcccaccatttcaactcgtggcgccacttccatgtggggtgggnngcgtgtgggaacccctggnnatcgtggtgttcaaggggcccacgcgatttggtacaangactnngtgcgtgagaattgtgacgcttggagcgcatgcgaccgcgccttntgacgacgtgccttgatggagtactggnatttgatgaaggccaagtaagaagggccgtgtgaaccgngtcggtaggcttgcactttgatgctcagccttgcaattttcacttcgttgggcagctatttttgcca

SEQ ID NO: 6151 - DNA, 92 bp, Chlorella sorokiniana
  unsure (1)..(92): unsure at all n locations; Clone ID: LIB3602-087-Q6-K1-F3
gtggnngctgcaacccgtacatggcttgcgcagccagcgtgcatgtatccatacggcggcatttacaatacagggtgtaagaccgcttattg

SEQ ID NO: 6152 - DNA, 156 bp, Chlorella sorokiniana
  Clone ID: LIB3602-087-Q6-K1-F4
gaaaaaaaaaaaaaaaaaaaaaaaaaaaaaaaaaaaaaaaagaaaaaaaaaaaaaaaaaaataaaaaaaaaaagaaaaaaaaaaaaaaaaaaaaaataaaattttaataagagtaaaataaaaaaaaattcaatttttaggggggttgcttttttt

SEQ ID NO: 6153 - DNA, 420 bp, Chlorella sorokiniana
  Clone ID: LIB3602-087-Q6-K1-F5
cttaccatccgcactcgcagttcatgaccaaccggctgctgggccgcaagcagtttgtgctggatgtgctgcaccccggcaaggcaaacgtgtccaaggccgacctgcgcgagaagctggccaagatgtacgacgtgaaggacctgaactgcgtgttcgtgttcggcatgcgcacccagtttggcggcggcaagagctccggctttggcctgatctacgacaacgttgaggtggccaagaagttcgagcccaagtaccggctcgtgcggaacggcctggcggaggcggtgcagaagtcgcgcaagcagatcaaggagcgcaagaaccgctccaagcctctgcgcggcgtcaagaagtctggcaagaagtaagcagcccgaggagcgcgccacgcgcgcgacctgtaacacattgccttcg

SEQ ID NO: 6154 - DNA, 498 bp, Chlorella sorokiniana
  Clone ID: LIB3602-087-Q6-K1-F6
taaaaaaaaaaaaaaaaaaaaaaaaaaaaaaaaaaaaaaaaaaaaaaaaaaaaaaaaaaaaaaaaaaaaaaaaaaaaaaaaaaaaaaaaaaaaaaaaaaaagggggggcccgttttaaagggcccaagggttccgcccccctttgcgtggcccaccttttaccttttctttttggggggcccctaaatttacttttcctttggggggccccttttaaatacgattgaggtggggggaaaaccttgcgcggttccccacctttaaaaaccttgggggtcccccccttttccccggtgggcgtaatgcccctttggccgcgccggtgtcgcccttccaaagggctgcccagcctggttggcaattggggcgccccctgtagcggccatttaaccccgcccgttgtgggggttccccccaggggggccgtttcttttcccacccccctacccccctctctttcccttgctttcctttcctttttggtcccgttttcgggtt

SEQ ID NO: 6155 - DNA, 568 bp, Chlorella sorokiniana
  Clone ID: LIB3602-087-Q6-K1-F7
caccaccctgaatggcaggctttggcctcaaggcgccgaaaatgtgttcaacccgtcggccacggtgggcgcgctcagcgagccgatgtggcccatcgaggcgcgcaatgcggccattgccaacagctactacgtgggcgcaatcaaccgcgtgggcaccgaggtcttccccgaatgcgttcaccagcggggacggcaagccggcgcacaaggactttggccacttttacggcagcagctacgtggcggcgcccgatgcgtcgcgcacccccgccctggcccgcaccctggatggcctgatggtggctgactgcgacctgaacctgtgccagcagctgaaggacaagtggggcttccgcatgaccgcgcgatacgacatgtacgctgggcagctggcgcgctacgtacagcacgacttcaagccacaggtcattcgggacccctccctggagtgaagcgctggcgcagcgggggggcggggctgctgtagcaggcagcgagttgccctggctgagtgcagcggtgcatcctgtatttgcaaggcatcccagtttgcagctgcagctgt

SEQ ID NO: 6156 - DNA, 565 bp, Chlorella sorokiniana
  Clone ID: LIB3602-087-Q6-K1-F8
gcgccaaccacgtgctgggtgggggcggggcgagcggctaaaacgagctgtttgtcaaggtggagtggggcgcaggcacctccatcatggacaacctgcccggctcttctgcgccctccgcctcctcatcctcctccagcaccaacggctcctccacctcctccgctaagggtggcgggcggccactcctccagcagcaaggccatggccagtgcacgcagcggcaagtggggcggcctgctgggctgagcttcagtggtcaacctccgcccacacactcggcgcttgctgagccgggttcagctgcccaagtagcatcccacagccagaggccacaccccctcccctccccgccacctctgcttgaaaccaatttccgccaccaaaaccgccgtgccacactccccgtcgaaacccgcttcctcccccctgcaccaccacaccccttgagaaaatgaacgcttgcgactgcccatcctgtgtttcgtgtgcccgcaaggcatggcccgctctccccacccaaacccgactttgtccttgtctgcgtatctgatctgattggtga

SEQ ID NO: 6157 - DNA, 599 bp, Chlorella sorokiniana
  unsure (1)..(599): unsure at all n locations; Clone ID: LIB3602-087-Q6-K1-F9
ccagcgttcgctgtaccgcaacttcacaaacgggtggcggggagggggggatgtcgagaaggcgatgatggtggaaggtctggagcggcagctggctctgtgcgactccggcacagccccttcctggggctccgacacccagctgctgtcccagctgcgcacggggctcgaccacctgtggagcacgagtgtgacggggctnacgtggccttctccgaggtgtggagctggaagtttgaaaacggcggctaccgcaccgcctccctggcggagacctctgcaaccagcacagagagcaatgcagttcagctgtggagccatgccttcatcgctgttcccggtcccagcggcggtacactgctggagctttgatgtggccactggcggctggggatcccacacgctagcaagcttgcaaggattgcctctggcgagtgcacatagacttactgggaacgagcaaagcagtcgggacctcgccgctgttgagccgagtgggtgggtgcacagcatgctagcagctgcggcagtgacatgcctcccattcattcaagtgtagccatttcttgctgtcaccagtttgccaggagcgtgtaaat

SEQ ID NO: 6158 - DNA, 455 bp, Chlorella sorokiniana
  Clone ID: LIB3602-087-Q6-K1-G1
ccggttcgacccagcgtttcggcctagttctagcacgcgaacgggcgccctttttttttttttttttttttttttttgtttttttttttaactttagggacaggcaatgtgaacatgagggaccgcacaagaattcaagcaatgccctgctatatttggatcaggcagggatgatagccactagggctgctgccggcgagggcgcaagcagttttcctagacgactacgacttgctgatatgccgatggtacccttggccgttgaaggggtgtcacaggggatgataaaggggtagtggtgcagttggatgacgtagtacgggttgattatgtgcaaattggggtagggcagaagaggcatggacagattcatgtggtggagtagaagggacaggaggttctatacaaatggttaggataacagggtgagagattacagtagtgggagaacaata

SEQ ID NO: 6159 - DNA, 559 bp, Chlorella sorokiniana
  Clone ID: LIB3602-087-Q6-K1-G10
agcggggctccttcagggggcgggggttggcgccaaaaaacaggccctgccacagatgcgagccggcttgcgtgcatctgcagccggtggttccagcaccaagatggagccactcgtggcacctgtccgtgcccgctcctggcgtggcctggtccggctcggccttgggcggcggatctcaggcgagggtgcagccatgcgcctgcccaccccagagacgctgtgtcttgatggggcacgcctgcacgcggcacagggtgagcttcagcacctgctggtcacagccacctgcctgctgcttgtgcggcagagcgccggccgcgagcttaatggaagtgaagtgcacctcgcgaagcgccgtttgcgcgccgtgctgtgcgaccccgcggtccggctgccagacattgcagcagaatgcgcccagctggcaggtggcgagtccaatgcagcacaagagcgtggaatgcacgactcgctgcagcgcatgctgtcccgcggcgccggtgccctcaaggcattgacgagcggcttcagcacagctctgctggccctgctgcta

SEQ ID NO: 6160 - DNA, 552 bp, Chlorella sorokiniana
  Clone ID: LIB3602-087-Q6-K1-G11
gcgatcgctggccaccatcaaggcggggagcgcgagctgtttgtggcgctggaccggctgcactccctgggcatcgtgcaccgcgacgtcaagcccgagacattctgatcactgtggatggccaggtcaaggtgattgactttggcgcggcgtgcgacttgtccaccggcatcaacttcaaccccgagtatggcatgctggacccgcgctactcggcccccgaggagctggtgatgcccaagaacttcccgcgcgcgccgccgccgctgctggccgccgcgctggcgccgctggcctgggcctggggctgccccgacctcttcgactcgtactcggcgggggtgatcctcatgcagctgtcggtgccgcagctaaggccagcggtggcgcagcgcaacttcaatgcggagctgtcgcagtgcgactacgacctcaaccgctggcggcagtcctcggcgcgcgcccgccaaatggacttttcgctgctggatgccaacggcggccagggctgggacttggctgtcaagctgctgcgtgccaagaacagcctca

SEQ ID NO: 6161 - DNA, 393 bp, Chlorella sorokiniana
  unsure (1)..(393): unsure at all n locations; Clone ID: LIB3602-087-Q6-K1-G12
cgctggcggcgtgctgttcaaggcgacccctggcngacaaacaacggctggagcggctcaccattttccgagcctacaactggtacagcgtggcgcagcagctggacagcgtggcacgcctgcgccagctgcccttcctcacagtgctgcctgggcacggccggcgggcgcggtgggggagcgcccaggagcgggagcagcagctggcgtcgctgctggctgcagagggctggcacggctctggctgagcggtcgggtctagctgacagcataaggttgcattttttgatatgccgattatgtgctcaacctaacatgcacaactgttgtctgcaaggtcggtagtatgtggttctgtgttgagcactgtcatgcacgttgcatgcaactcac

SEQ ID NO: 6162 - DNA, 561 bp, Chlorella sorokiniana
  unsure (1)..(561): unsure at all n locations; Clone ID: LIB3602-087-Q6-K1-G3
ctgtgcgtggncgcgccgnctgcctcttcgcccccggccctcccccccgccttaaaaggcccgcccaagcgccgccaccgccatctgctgccacgccacgtgctctcagccactgctgctcaagcggttggcaaggcgtggccaggcgatgctggcttgctgacggccgcgctgcagccccgtgctgcggtcatgccgcgacgctcggtgctgcattcggccacgccccctaaggaaagccatgcagcgtgcggcccaagccagccgcccagctgccagcatgacagcagcagccagcagacggcaccccggctgggagcagccactctcagctggtcagcctcccatcagcctcctttcagctcagggcggtttgccccctgccgctctcgtggcgtcgctgacgcgccctgcacccggccgcgcgcaccgctgcgccgctgccgccgctcccccttgctcgctctgcagatgtgaaggacatcaagctggtcattaactatgacatgccctcttgtgcgggaagatacgtgcaccgtattggccgtccgggccgagcgg

SEQ ID NO: 6163 - DNA, 563 bp, Chlorella sorokiniana
  unsure (1)..(563): unsure at all n locations; Clone ID: LIB3602-087-Q6-K1-G4
gttttngacgcgnaattgaaatcctctagccctgctgctccaccgcagcccccctctctaccccctgtcccacttgcatgcccctgtttgttgccgtattgtgtcacaatgactcctactggcacatgcccattcaagtcaccccttgctacatcgagcacccttttcctccccctgccttgcaactcgcagcactgcgcagccagcttgacagtcactcaaccactcacttggctcccaacaactcgcttaaagcaacaaatgaccacttgcaagcaaagtgatgtaaaccggctgctgaaaaaaaaaaaaaaaaaaaaaaaaaaaaaaaaaaaaaaaaaaaaaaaaaaaaaaaaaaaaaaaaaaaaaaaaaaaaaaaaaaaaaaaaaaaaaaaaaaaaaaaaaaaaaaaaaaaaaaaaaaaaaaaaaaaaaaaaaaaaaaggggggcgggtttttaaaaatccaagttttggtaacgctttttggaaaacccaaatttttttttttggggcccctaaaataaaataacgggcccggttttaaaaaacggggccttgggaaa

SEQ ID NO: 6164 - DNA, 566 bp, Chlorella sorokiniana
  Clone ID: LIB3602-087-Q6-K1-G5
gactccccacgtgttcgacccctcgttggcgccgcccggcaagcacctcatccacgcctacacagccggcaatgagccttatgagctgtgggagggcgtgaagcgcggcacatcagagtatgctgccctaaaggaggagcggtcgcagtgcctgtgggctgccttggaaaaaacatccccgatgtgcggattcgagctgaactggcgctcgtgggcactcccttgacgcacgagcgtttcctgcggcggtacaagggcacctatggccccgcaatctcggcagcagacagcagcttcccaggccccggcacgcccctgcccggcctgctgcgctgcggcgacagctgcgctcccggcattggtgtgccagcggcagctgccagcggcatgattgcagccaacacactcgctccggtgtggagccactggcagctgctggacgctctggggctgtagcgaggactggaggggtggcgcgctgttttaacagctgacgtgaaagccgccgcccgtgccgtggttgatttgacttgacgttctgtttcattcagtaatcaggtgtactg

SEQ ID NO: 6165 - DNA, 576 bp, Chlorella sorokiniana
  Clone ID: LIB3602-087-Q6-K1-G6
ctcttgcccagcccgtccagcagcagttagcagccatgcaggccaccttcgccggctctaagctgcagcttggcgcgcgcgtcagccgcaagagcgtgaacaccaccgtggtggcctccagcggcaagaagatcgacatcagcaagcagggcctgaactccatccagaatgagaccgtgaagctcaacctgatgggcaagtccaagaccatggagagcaaggactgggtggacccccagggccgcaagggcaagggctacggcgtgtaccgcttcgccaacaagtacggcgccaacgtggacggctacagcccgatctacacccccgacacctggtccgagtctggcgactcttacaagctgggcaccaagggccttattgcttgggccggcctgattgtggtgctgctgggcgtgggcatcaacctggtgatctccacctctgccctgggccagtaaatggcgacgccccccgcgtcggcagcagcagcagcagccagcagcattcccttgcagctaccccccgagaagacaaaccctcaccctaccctagctggcggcgtcaccatgcgccgct

SEQ ID NO: 6166 - DNA, 565 bp, Chlorella sorokiniana
  unsure (1)..(565): unsure at all n locations; Clone ID: LIB3602-087-Q6-K1-G7
gcgagcggccgctcgcgaatctagaccaggacggcgtgctcaagcgctgtccttcctgttcgagtacatcggcgagatgggcaaggactacatctactcggtggtgcctgtgctggaggacgcgctgatggatcgagaccttgtgcaccgccagaccgcgtgcgcggttgtgcagcacatgtcgctgggcgtggcgggcctggggtgcgaggacgcgctcatgcacctgctgaactacgtgttccccaacatcttcgaggtgtcgccccacatcatccagacgacgacgggcgcgattgagggctgccgcgtcgcgctgggcccagccatcatcctcaactacctgatgcagggcctgttccaccccgcccgaaaggtgcgcgaggtgtactggcggctctacaacaacgtgtacattggngcgcaggactcgctggtgggctgctacccgcggtttgaagacgatggcatcaacttcttccggcggcaccagatggatgtgttcatttgattggcgggatgggccagatatgcccgagcaaaatgctgctgccgctggcaaggc

SEQ ID NO: 6167 - DNA, 413 bp, Chlorella sorokiniana
  Clone ID: LIB3602-087-Q6-K1-G8
aaaaaaaaaaaaaaaaaaaagggggggggggggggggggggaaaaaaaaaaaaaaaaaaaaaaaaaaaaaaaaaaaaaaaaaaaaaaaaaaaaaaaaggggctggaccttttaggggtccctattttactttcccttgcttgcccctttttttttttttttttacgccccctaaattttttggggggggggggggctttacaccttcctaaattgttaaaactcttggggtttcccattttattccccttgccccctttccccttttccccacctggtttaatatccaaaaggcccccccctttcccctttccaaacactttccctccctattgggccattggatcgggcgttgtatcggccctttaacctcttgggttttggcgtttcctccccgtttaaccctttcttttc

SEQ ID NO: 6168 - DNA, 467 bp, Chlorella sorokiniana
  unsure (1)..(467): unsure at all n locations; Clone ID: LIB3602-087-Q6-K1-G9
tcggtgtggcgcaaggccctgggtgccggggggggggggggggccctggcgctgagcgccaacgccgccactgtgaagctgggcgctgacaacggcgcgctggtgttcgacccctccaacatcaccatctccaagggcgagtctgtgacctttgtgaacaacgccggcttcccccacagggcgtnggggatgaggacnatgtgccctctggcgtgaacgccgaggcgatcagccgcgaggactacctgaacgcccccggcgaggagttcaccgtcaagctggacaccgctggcgagtacggcttctactgcgagccccaccagggcgccggcatggtcggccgcgtcaccgtgaactgagcgcagcatgctcagcgccgcggcgtgcactgacccatttttgaagcacttgctgtctctcttcggttgactggcctctattcagggtgtaacgctacacacgcatgc

SEQ ID NO: 6169 - DNA, 292 bp, Chlorella sorokiniana
  unsure (1)..(292): unsure at all n locations; Clone ID: LIB3602-087-Q6-K1-H1
gccccaacagnatgtcacctgtggtgcacggtcaaaacccaatgcgctagctgctgactgtggggtgcgggcgcatagcccgctgcccgagagagctccccctcccctgaccaaacgtgaccatgcatcctttccctggcatcctttcccccccttcttttcctggcgtgtcgcccaaccgttgcccgggccgcccattctgcggctcgtggcccattcagctgctgctgcggcctgatcgcaccccatctctggcattccgggtctgtatttgctgtaagcaatatgttac

SEQ ID NO: 6170 - DNA, 430 bp, Chlorella sorokiniana
  unsure (1)..(430): unsure at all n locations; Clone ID: LIB3602-087-Q6-K1-H10
gcgttcggccaccatcgcaggcccctgcgcgcggtacggcnnggccataaacggcgcctgagcctgagcgcagaccctcccttgcaactactactgctgtcggccgcaggcgcgcatgcgtcagatttagtgcttgcgctcggccgctgctctgctgctgcttactgtgcactctacgcgggggccgctgcctttggctgccgcttgttcgctttctctcctgtgcagtcatcctctcatgccccttgactttccctcccctgctcagcccatcagcatggggccccactatttgtacgcctcagttcacagctctgtaacatacgctgcagctaaaaaaaggggaaaaaaaaaaaaaaaaaaaaaaaaaaaaaaaaaaaaaaaaaaaaaaaaaaaaaaaaaaaaaaaaaaaaaaaaaaaaaaagggggg

SEQ ID NO: 6171 - DNA, 539 bp, Chlorella sorokiniana
  unsure (1)..(539): unsure at all n locations; Clone ID: LIB3602-087-Q6-K1-H12
cggacatggcaaggcaatggcgggggggggggtgtgaggggacatccgatggcgctgtcggggctgccgggcaggcagatgccagcaaagtgccctcctgatgtgccagccgcggcgcactttgtcgatagactgaaggctgcttctaatcaatgtgggcttacaccttgcctgcgggggggagggggtgccagaccacgccgctccgcaaattatactggctttgaaaagtggggatatttgtggttgttgctgcttcctatcatcaaccagcaattatcttctacacctgccttttgccctccggggaccacctgggagtactctttctccgcaccaccttttcagtaaaccatcttcaagaactggctccctagtctgtccactctctccccctctctctctgtacagtgcctgtttgaagtttgattacacacgctgttgcacagcagcaggtgtcaagcaatgtaacacacacgtcagtgnaaaaaaaaaaaaaaaaaaaaaactgggaaaaacctgaaaaaaaaccaaattaa

SEQ ID NO: 6172 - DNA, 584 bp, Chlorella sorokiniana
  unsure (1)..(584): unsure at all n locations; Clone ID: LIB3602-087-Q6-K1-H2
tccggccaggcatcccgctgtggnaacgtgcgggngcgtgccgggncgtgcatgcgcctggtgtgggnccctctccttcgtctccttctacttcctctacccctccaccttcaacatcctggaggtggctgcggttgatgagcccaagctgcacatgtgggagaccggcatcatgcgcatcacgcggcacccccagatggtgggccagttcatctggtgcgccgcgcacacgctctgggtcggcagcagcttcatggtggtgacctccctgggcctgatggcccaccatctctttggctgctggcacggcgacttccgcctgaagcgcaagtatggcgaggcgtttgaggcggtcaaggcgcggacgagcaccttccctttccaggccatctgggaggggcggcagcagctgccgcaggactactacaaggagttcctgcgcgggccctactttgcgctggtgcccttctgcatcggcgcatatctgtgccacccgctcatgcagcgcgcagcctactacctgggctggtgaaggaacgttcctggcctggcctcacctcagcagcagcagagcgacagcagca

SEQ ID NO: 6173 - DNA, 469 bp, Chlorella sorokiniana
  Clone ID: LIB3602-087-Q6-K1-H3
cccggtttcgcccagcgtttggcccaccctggcccgctgcggttcccctgccggcagccggccagtaggcaacacagcggctcgctcaatggcgaaccagtctgtacggaagctgctgcgcgttgtggaaatgaaaatcccatgcatgcatgcatacacagtgccaagctaggaagtgtgaacccttcctcaaacggggccgattcttccctctattttcttcctcttcacccagccatgaccttgcatttcgttcgctgcccaccagcgttctccgttcatgcaccgattttttcccgtacttcatcagcccatcctcatacgatcgccataccaagttgattcactgcaccaggcagcaccggcccaacctcacagcgcgtcagttgcctccctccttttcatttcaggctgtgccgaatttgcaccattacattggatcgattgcatcaaccagtgcaagattcag

SEQ ID NO: 6174 - DNA, 482 bp, Chlorella sorokiniana
  unsure (1)..(482): unsure at all n locations; Clone ID: LIB3602-087-Q6-K1-H4
gcaggctctggggcagnacgtggctngaccagtgctggccctgttgggcaagccatcagcacacccgctgctggaggcatcccagctgccgcacccagagccgttggagcaagttgatgcagcgattgagcgggtgcggcaacagcacgggctgtgatgcgagcggccgccctcctcccggccaggctcgactcgcgatgtgatcagatgctgcatggcggacagcacgccgccttgtcacggctgaatgggcaggagcgggggcctggtggctgaagccctatcgggtatacctttcaccgctttgctgttgccgccgctcatgtcccccgcaccttgttgattgccggctacaccagcaactgtgcaacccttttgtggtnaaaaaaaaaaaaaaaaaaaaaaaaaaaaaaaaaaaaaaaaaaaaaaaaaaaaaaaaaaaaaaaaaaaaaaaaaaaaaaaaaggggcgngccgttttaaa

SEQ ID NO: 6175 - DNA, 559 bp, Chlorella sorokiniana
  unsure (1)..(559): unsure at all n locations; Clone ID: LIB3602-087-Q6-K1-H5
cttcctcaactgggcgccctggcctacctgggcggcgactccgcgctgactgagnacaacctgccattcaccaacatcaagctctctgggcagctcgcttatctcgtttgngaaaagtgtgtacataacaaagcaagtctcattccgcaaccgcgtcctcatcctgtttgactgggtcaaggcccaggtgttcggccgcgacctgtccaacttctaaagaccgagctcctgacccacgcacctcgccgccgacttgcccgctgttcttaggcggctcgccgccggcccacccacccgctttgcactgctggcatgctgccgcagctgactaaacgaactgtcgatcaggagggcgccgctgaggctgcctggcacacatgtcgccacgcatatctatgaactgtctgctatagcatacgtttctgttgagaggttttgagcaccacagccgccatgctcgcccggccccgctttgctccccacatgtgcctgaatccctctgtatcatccccctgtatttagttatcatccgtttgcatcatcttgtaaagcaagctgc

SEQ ID NO: 6176 - DNA, 573 bp, Chlorella sorokiniana
  unsure (1)..(573): unsure at all n locations; Clone ID: LIB3602-087-Q6-K1-H6
gcctgcgcgtcagcggcgccaatgacagcagcccggnaggcatcaacagcaacacaagcagcggtggcagcactggcaatggcggcggcagaaagcaagccagggtgcaagcctggggctggcggtcagtggggtggagctcagcggtcacagcgtgcgcgctgaggtggatggccagcagctgcgtgcggcctggtgcctgggcagccatggagaggaggaggtgttggacctgtggctgggcgggcggcagtaccagttcaggcgcccgctggtgcgcaagtggcggcgcagcggcgcggcggcgcagcaggcgggtgcagtcgtcactcccatgccgggccgcatcgtcaaggtgtttgtgtctgccaatgcgtcggtgcaagagggcgacccgctggtggtggtcgaggcaatgaagatggagcacacagtgcgcgcgccctgctccggcactgtcgcagagctgcacagctttgtggatgcacaggtggaggatggccacgtgctggcagtggtggtgcctccccaagcagcagcagccacagcctgagggcccgcctggaactagct

SEQ ID NO: 6177 - DNA, 478 bp, Chlorella sorokiniana
  Clone ID: LIB3602-087-Q6-K1-H8
ccccacctggggctttgcggtggcgggggagggggggcgctcacaacggcggcagcccaccctacggcctctcccccgccggccagccgccgccaagcctgtttggcggcggcagcacagggctgcatgcctttggcgcaccggcgcctgggggtcttcacctcggcctgggaagggggggggggcgatcgtgagggatcgtgagggcggcctgactcagcagcgcaacagcttgcgctggcgcagtggaggccctcagtgcctccgccatagcatcagatcttttccaggacgattgccaccctcacagcccctaccctagcagcatctacacttcatgttgcttcgctttaggcagccgcctcctgtgctcgcccccctatctgtgccccaatcccctttgccaccttggctttgcagcgcattgctgcccgctgcccggaattccggcagcagccttgtaacactagacaatcaa

SEQ ID NO: 6178 - DNA, 510 bp, Chlorella sorokiniana
  Clone ID: LIB3602-087-Q6-K1-H9
tgcctgtgcgggggggggggggaaaaaaaaaaaaaaaaaaaagagccgcagaggcccctaaggagcagaagtcgaaggaggcgaaggcgcttgccgccgccaactccagcaagggcaagaagaagaaatggtccaagggcaagctaaaggagagggggggggagcctggtcctcttcgacaaggccacctatgagaagctgctcactgaggtgcccaagtacaagatgatcactccctcggtgctgtccgaccgcctgcggatcaacggcagcctggcgcgcgccgccatcaaggagctgctgggcaaggggctgattaaggaggtggccaaaagccgcgcgcagcagatttacacccgcgcgacggcagccgccagctaagcagccacccagcagtttggcagcatgctagtgcactcgttgtgcttgccaatctggtaacaggtccctcgcaaaaaaaaaaataaaaaaaaaaaaaaaaaaaataaaaaaagggggcgggccgtttta

SEQ ID NO: 6179 - DNA, 547 bp, Chlorella sorokiniana
  unsure (1)..(547): unsure at all n locations; Clone ID: LIB3602-088-Q6-K6-A1
gcgttcgcagnactggnacgcgagtgcgcgctggggggggcgcaggagcnggcgctgaaggagactgtgagggacctggagcgcgagattgagcgcatgcgactgccgggcaagcaggactcgattgagtacctgaagaacgtgctgctgcggctgtntgagaccggagaagcagactcggtggtggcggtggtggcgcnggtgctgcagttcagcccagctgaagtggcgcgctgccgcgacgcgctacactcgcgctccggccacctgactgccggcgccggcgcctatggcgtgtcgggcggtgtggccagctacgtgggctcatggtttggcggccggttgccttaggctggcgcgctgtgctgggcctgatcggcggggcctgcttcacagctgggccggtttcgcgtccgctctgcttgccgggccgtttcggcccgtctgcggttgccctggnggttctcggttgctgtctggctgcctcttcagtgtttgcctggtgctgccctgttgcttcctgattttgggaactcgcgggcgggat

SEQ ID NO: 6180 - DNA, 416 bp, Chlorella sorokiniana
  Clone ID: LIB3602-088-Q6-K6-A10
cttggcttcttcggtgagggaggggtggcagaacctcaaggcctgctcctgctggggctcttctgcggccgccagctgggcggcctccttgcgctgtgcggtggaggccgcgcacgactggttggctggcgtgtggtccggtgcggactggcctacgttgttggggctgtggtccgctgccttggcacccggctccctgccgctgtgcgcatggccgtgactacggctggcacgcttctgagttgctgcgggcccgccaagactttcgggtgtgggcgtctctcgcggccgtccactccctctctgtccttttcggcgcctggcgctgccttttcctgggttggctcgggggtgctggtggggtggcgctgggggagggcctttggcttatggttggttcccgtcctgttcttggc

SEQ ID NO: 6181 - DNA, 587 bp, Chlorella sorokiniana
  Clone ID: LIB3602-088-Q6-K6-A11
ttctgtaaaaaaaaaaaaaaaaaaaaaaaaaaaaaagaaaaaaaaaaaaaaaaaaaaaaaaaaaaaaaaaaaaaaaaaaaaaaaaaaaaaaaaaaaaaaaaaaaaaaaaaaaaaaaaaaaaaaaaaaagggggggcctttttaggggttccaagttttttttctcttgcttgcaacttattattttttttttgggggcccttaatttaattccattggccgcgtttttaaaacttgggaattggaaaacccttgggtttcccaaatttattggctttgcataaattccctttttccccagttgggttattaccaaaaaggcccgcccctttcgcctttccaaacatttgccccccttaattgggaaagggaaccccccttttagcgtccctttaaccgcggtgggtttggggtttccccccagggttccccttacttttgccagccccttagcccccttttttttcttttttttccttttttttttcgcctctttcgccgtttttccccttaaggttttaaatcgggggttccttttggggtcccatttaagggttttacggcccttgcccccaaaaaattttttta

SEQ ID NO: 6182 - DNA, 247 bp, Chlorella sorokiniana
  Clone ID: LIB3602-088-Q6-K6-A12
gcgttcgcagcccccgccgctcccccgcaagcaaacgccgcagcatgcgcacgtcggcgccccaccccatgccggggccgcgtctcatactagcccttctgttccttccccccaggcattttattgccacctccccttgctccccgctttgtattgtttcgttttgtgttttgtcgttgcgccgcagcgccaccacctgatcgcacacacttgagatgcagcactgcctgtaagtgatgaagagggt

SEQ ID NO: 6183 - DNA, 538 bp, Chlorella sorokiniana
  unsure (1)..(538): unsure at all n locations; Clone ID: LIB3602-088-Q6-K6-A2
ctctggcgccagccagtggtacgggggggggcgccccagttcctgggcccctacagcacgaacttcgtgcccagctacctgaccggcgagttccccggtgactacggctgggatacctctggcctgtcggccgaccccgcctccttcgctcgctaccgcgagatcnaggtcaggggtgggggctgggccatgctcggcgccctgggctgcgtcgtgcccgagctgctggacggcaccaaccacattgcctggttcaaggccggcgccgtgatcttcggcgacgacggcatccagtacctgggcatccccggcctgatcaacgccaagtccatcgtggcgaccctgatcgtgcaggtggtgctcatgtcgtntgttgagggctaccgcgtcaacggcggcccggccggcgccggcctggacgctgtctaccccggcggcaacttcggccccctgggcctggctggcgacccctgcaccctggctgtgctgtcggtgatggagatgcagaacggccgccttgccatgctgttcctgttcg

SEQ ID NO: 6184 - DNA, 288 bp, Chlorella sorokiniana
  unsure (1)..(288): unsure at all n locations; Clone ID: LIB3602-088-Q6-K6-A3
cagnacaagnanaanaanaagccaagtttgccaagagcggcgccatgtgcatcgcgcgcatcgctgtggagaagcccatctgcatcgaggcgtttgacaacgtgccgcagctgggccgcttcacgctgcgtgacgagggcaagacgatagccatcggcaaggtgctgcgcgtgcccaagcgcggcggcggcggcacgcaagcagagtgaagcggtggcttgccgatgactgctgcaccactgcaagttgtcatgtaatgcagccgctagttgtaaggcacgaggcagc

SEQ ID NO: 6185 - DNA, 412 bp, Chlorella sorokiniana
  Clone ID: LIB3602-088-Q6-K6-A4
cccggtcgacccagcgttcgcacccgcagggccccattgagaacctggctgaccacctggcggcccccgacgccaccaacttctgggtggactacgcccccaagtccgccggcatcggctactaagctgtttccgtcgcttgactggcgccgcccgctcgcccgcccgctgagtttacggccactcgcggcaacaggcagcagcggcgtctgtactttctgactcctccggcgattgctggtggcgcaccttgcttgctttgatgcttgcttcgggggcctaggcaccctcccatgcaacacatgaaccccaaaaaaaaaaaaaaaaaaaaaaaaaaaaaaaaaaaaaaaaaaaaaaaaaaaaaaaaaaaaaaaaaaaaaaaaaaaaaaaaaaaaaggggcggcccgtttta

SEQ ID NO: 6186 - DNA, 559 bp, Chlorella sorokiniana
  Clone ID: LIB3602-088-Q6-K6-A5
gcgttctgacggtaactgctgctgttctgcaggagccccaaacagccgcaggccttggttggcaagggctcggcgcccgcacgctgcggcagctgcgcactgtgcattgctagcacccagcaactctgcccgagtcccgggaagcgcgcccagtagcccgcagcgatgccgccgcgccggacgggtgtgacgtactcgagtgaggacgtggggccggtggtgggcgacaagccgctctacgtctactactgcaagtacagtggcaagcacgcgctgacgaccgactgcaacctggccacggcgccgcgccgccgcaccgaccacgcgctggtgctcgatacgcaggcgttcctggtcaagctgtacaccgctgatggcggagccaagctgctgcgccgcaagagcggagaggtggagcggcagatccggtacaatgtgggcaagctgccggtggcataccgcaccgagccagacggcaggtacctgtacatcctagacaacgcgctgaccacatacaccgcgggggagggcgacggcaaggcgccggtgccgccctgca

SEQ ID NO: 6187 - DNA, 324 bp, Chlorella sorokiniana
  unsure (1)..(324): unsure at all n locations; Clone ID: LIB3602-088-Q6-K6-A6
gcatccanaaaagtacgaggtcatcgagtgcgacattgcgccccagtggcctcgcgagccgtgaacgtggcgccctacaagggcaagcacgcgcagggcagcggcggcgaggcggcggcagacatctaccggcaggcggcagcggcagacccggggccctcaaccagcgcgcggccaccccggggcggccctgttggcctgggcggcggcacactgcacgtccaggaggtgatcgacctcacgggggacagccccgccccctcgcggcggcgcggaaccgctgcctcccccctgggcaagggcaagcgcaaggcagggtcgtga

SEQ ID NO: 6188 - DNA, 585 bp, Chlorella sorokiniana
  Clone ID: LIB3602-088-Q6-K6-A8
gcgttcggggacctgcgcctggtcaaatgccgggctacggcgtggatgccttcatgaccctcaacgcctcgaagacacagagtgggaggagtcgcgagcggagctgcagaccggcgctctgcatgctggggtcgtctccggcctgcccgaactgcacgactcgcaccccgctgtgctgcacgctgcgcatgcttcgcacgctgcggtgcaccgccccgcgcatgctgcgggcgcggggcaccgcccggcggtgcagcagcatgggcagcatgcacagcatgggcagcatgaggaaccggtgggaccattttcgcaccccgtccacttgcggcacgggcagcatgcacagcacgggcagcagcaggagcatgagcagcagcaccacgagcatgctgtgcaccagcagcagcatggctgatgcggcatcccggcagccagcgtgattgcacagtgctgcgcaggccgtcccggccaggtgtgctgccactgcgacacagcctcacgtaccacaaatcatcaagggtttttgcacactatcagattttccagcgtagcgcattttgagtcccgtctagcgaacccacc

SEQ ID NO: 6189 - DNA, 516 bp, Chlorella sorokiniana
  unsure (1)..(516): unsure at all n locations; Clone ID: LIB3602-088-Q6-K6-A9
ggcgggcatcgatctgtgngaactgccgtacgaggacgcgcgccccgagcgcctgcagtggctggccgagaacgcgggcaacccgcccnatggccaaaaacaagcgggccatgaagaaccccgagaagctggcggccagcaagaagacgccgctggtggcccgctacctgcacggcaagattgcctatgtgcgcgccgactcgcagtaaacgggcggctccccccgcccccaaacgggcaggcgccgagtgacactgctcgtcggcgggccgcggcgcgcgagcctccctgccatagcgcttgaggggcggcttgccatgcccgcgccgccgcccgcacctctgcttgtgtagtttcccgctgctgttctgcttccttccctctgacctctcgcacacataccgctgctccacgattcgctttggcggcgccgcgcccctgctcgccggcattcggcggcggggcgctgcactgcatgcgggcgtgccccctctgtaaggcaggcccatgcaaaaa

SEQ ID NO: 6190 - DNA, 274 bp, Chlorella sorokiniana
  Clone ID: LIB3602-088-Q6-K6-B1
ccctttcttcctgtatcttaatctaggggggggggggccccaacaccaccttcaccggcggggcacctcttggcgatacactatcccaaccccggctgatgatgattgattatgtgcgggtgcacggcctgccgtatgcgctcagcaaggcgcagcggtagaactggccctgcaacaacgggggcagggcgcatttccttgttggacagcacttgcattcatttatcatatttacagtcactgcaacatgtaaacagggtgcttgctgaataat

SEQ ID NO: 6191 - DNA, 534 bp, Chlorella sorokiniana
  Clone ID: LIB3602-088-Q6-K6-B10
ttgtagaaaaaaaaaaaaaaaaaaactggagggggggaggggggaaacataaaaaaaaaaaaaaaaaaaaaaaaaaaaaaaaaaaaaaaaaaaaaaataaaaaaaaaaaaaaaaaatgggggggccttttttagggttccagctttccttccccttctttgtccctctttaccttttttttggtttgtgttgggggagtcctccgcccgtcttttcccaccgtcttttctgggaaaacccctgcctttccccattttattcgctttgcgccccttccccttttccccggctggctttttagtgggggggcccgccccgatctcctttcccttcctttcccctccttgtttggggattggccccccccttttcccttcccttttggcccgggtgttgtggtgtttccccgcttggggcccttttcttttgccggttccttagcgccctttcttttggtttttttcctttcttttttcgtctgtttcgtcggttttccctttcttcctttaattcgggggcttctttttggggttc

SEQ ID NO: 6192 - DNA, 515 bp, Chlorella sorokiniana
  unsure (1)..(515): unsure at all n locations; Clone ID: LIB3602-088-Q6-K6-B11
ccgggtcgacccagcgttcggnaaggcgaggccagccacgccgccgccaccgagcacgacgtgacggtgaaggacattaccccctgggcggcttcccccactacggcgtggtcaaggaggactatgtgatgatcaagggcgcctgccccggcgtcaagcgccgcgtcatcaccctgcgcaagagcctgttcccccagaccagccgcaaggcgctggaagatatccgcctgaaattcatcgatacgtccagcaagttcggcaacggccgcttccagacctcggaggagaaggccaagatcctgggccgcctcaaggcctgagcccagaaggcgtgctgagcggggagcgcagcgcgcacagcacgccgcccgcccgccggcggcggcggcgctctgcgcccgcccagctagattgcggcgcaggcgtaggcggctgggccgctgcgccggccgcctgagtgccctgcagcagctgtgcatgcatgcctgggaggagcatgtaacaaacctgctgca

SEQ ID NO: 6193 - DNA, 581 bp, Chlorella sorokiniana
  Clone ID: LIB3602-088-Q6-K6-B12
caacaagcgcaccatcgactttggccggggcggcggcgccaaggccggcggcagcggcggcctggccgcttcctgctgcgcagccaccacgctcggctgctgcggcgggggcgccgcctgcacctgccagcccggcgcctgcgcctgcgccgggggggagtgcagcagtgcctcggggggggcaccggcgtcctgctgcgccaagcctgccacgacagagcctgccgctgcgcagccctccagccggctgtgaaggctgtgatgctgtggcagctgtaccaatccttgcagccgcccagcgcgggtggctgcccctggtgtgactgctccactggggtgccacatctgctgttaacccaccatgtggtggcatacataccaacctgtgcacctgtctgttgttcagtggcctctgagcccagcatgcgtgttgtgcaccacgcagtagtttttcctgcccccctcccctgatgcttgctgccttgcaaagcctgtgacatgcatgccgcctgtgctccccctttgctgtacattgcccgccgacgcagtggttgccttgcaaacgcttgctttcatttcac

SEQ ID NO: 6194 - DNA, 224 bp, Chlorella sorokiniana
  unsure (1)..(224): unsure at all n locations; Clone ID: LIB3602-088-Q6-K6-B2
taccannatcctgcnnttgcttgnnctcaacgctgcgctgcgctgtggtgggtgccagtggccccgtgtaccagtnggcggcctnngcccgctgnngccgagtggttgccttttcacnaaccaccnnnactccctgcctnngtcgctccatttccctttnnttccgtaatacccctcaaatgggcacaaagtgcttccttttttgttgaaaccctgnntgacct

SEQ ID NO: 6195 - DNA, 251 bp, Chlorella sorokiniana
  unsure (1)..(251): unsure at all n locations; Clone ID: LIB3602-088-Q6-K6-B3
ccggtttgacccagcgtttggcgggngcgggtggaggctgaggagggcgccgggcagnaagaggacgaggagctgcgcaaggcgcgcgagtgggacgagttcaaggacgacaacccgcgcggctggggcaactcaaagctgcggccctgcgcttgaaccgcgcgccaaccaggcgtgcccgctgcctctcgacccgggggggctgacagcaattgtgtatgcaacagtgtacagcttcgtgtgagcatggg

SEQ ID NO: 6196 - DNA, 325 bp, Chlorella sorokiniana
  Clone ID: LIB3602-088-Q6-K6-B6
tctacctcggcaagcgcctggcgtacgtgtacaaggcgaagaccgagaagaaggcagcaagtaccgcgtgatctggggcaaggtgacccgcgcccacggcagcgtcggcaccatccgggccaagttccagaagaacctgccccctgcggccatcggcagcaagatccgcgtgatgctgtacccctcccgcgtgtgagggtcggttgcttcccggagcagcagcggtgcggcacggcgcggcggtgacgagtcgtggcagtgcgaccccgctcggcacggccgcccgggtggcgccgccgtcgcctccatgtaacccttgattagc

SEQ ID NO: 6197 - DNA, 386 bp, Chlorella sorokiniana
  unsure (1)..(386): unsure at all n locations; Clone ID: LIB3602-088-Q6-K6-B7
gctgcgctggcgcggccacncggcggcggcgcggccggcggcctgagcgcgctgcagtgcgtgctggcggttgcgctggcggtggccgtctggggcctgctcctggtcaccaagctggtgctgggctacctgctgcgcctgatagccaccacctacgtgcagcactacgacgacaagcgagcagcagcaacgcgcaccgcgagccgtgcgctagaggcgcggcggcggaccatgggcggccccgctttgcaggcggctgcggcagcggctggcggcggcggcaagaaggaggagtgatggaagcggcgtgatgcctttaggctcagatttcatgtacatcagatttcatctgttagtgtccagcacgctttgtgaaattgctatcc

SEQ ID NO: 6198 - DNA, 143 bp, Chlorella sorokiniana
  Clone ID: LIB3602-088-Q6-K6-B8
gtccctctctccccctaacgccgccaccgcctgcccgggcgctttgctctctaggcaggggcgcaccgataccgtatgaacgcatctaagttagttgcattgtagccttgacatgtcatccgcggctgtaacacacagaccac

SEQ ID NO: 6199 - DNA, 422 bp, Chlorella sorokiniana
  unsure (1)..(422): unsure at all n locations; Clone ID: LIB3602-088-Q6-K6-B9
cccggnaagcatcctggtggcagtctttctctgtagttttgtaggtttggtggcctggccgaggggcgcgtcagcgccgtgtggccacgcctcatgttgtttacgttgcgggtgccgccgtggccggtccggccctgcgtgccccgcaaccctctgctttctctctgttgtgtgttcctgctctcaccgcatccgcgccagttccgctgtcctgccgcactgaaccaaaacgcattcgttcgcacccccacgaccaacgaatttatactgcacagccggcccagctgtgccgcctgaccctgcctgtaagcacacatgcagaaaaaaaaaaaaaaaaaaaaaaaaaaaaaaaaaaaaaaaaaaaaaaaaaaaaaaaaaaaaaaaaaaaaaaaaaaaaaaaaaaaggggcgggccgttttaaa

SEQ ID NO: 6200 - DNA, 493 bp, Chlorella sorokiniana
  Clone ID: LIB3602-088-Q6-K6-C1
tcgtagaaaaaaaaaaaaaaaaaaaaagggggggggggggggggaaagaaaaaaaaaaaaaaaaaaaaaaaaaaagaaaaaaaaaaaaaaggggggaccgatggttagggccgccttggtggcttccctcttgcgtgccccgtcttggctccttttttgtttttcttgggtgcacttttttggccttgggtggggggggggtccctcccggttcccccctggggttccccgggggaatcccctttttttccccctgcttttctccccttggggccctcccggtttggcctgttcgggtcccccttcgccggccttgcccagcgggtttgccccttggtgcgccctttgttccggccctttgccggccccttgggcggggggttcgggctgtttgcccgttctttttcccctcttcttgccgccccctttttccggtttttttccgtcctttcccttcgctttttccggtttttcccgggcggcttccctttgg

SEQ ID NO: 6201 - DNA, 562 bp, Chlorella sorokiniana
  unsure (1)..(562): unsure at all n locations; Clone ID: LIB3602-088-Q6-K6-C11
naaacacggcctgggcttccgcacccccaaggagccattgagggcaactacattgaccacaagtgccccttcaccggcaatgtcagcatccgcggccgcatcctgtcgggcaaggtgaagagcaccaagatgaaccgcacgattgtggtgcgccgcgactacctgcactacatcaagaagtaccagcggtacgagaagcgccacaccaacatctcggcgcacatctcgccctgcttccgctgccacgagggcgacaccgtggtcatcggccagtgccggcccctgtccaagacggtgcgcttcaacgtgctgcgcgtcatccccgcgggctctggcgccaagaagggcttcggctccttctaagcaggctggactaagggcctcttgccttgctggctgaagccctcgacagcagcagcagcagccccagcacggcatgcaagcgctgcagacgccctgctgccctgagtaagcgccgccatgtgccggcggtggcagcagcaccgcccgccttgcatacacctggcccctaggatgccggccacggggcgcccagtagtcg

SEQ ID NO: 6202 - DNA, 597 bp, Chlorella sorokiniana
  unsure (1)..(597): unsure at all n locations; Clone ID: LIB3602-088-Q6-K6-C12
cgttcgcccaggnagggcaccaccatcatctgtccccggcaccggcaccggcggctgggagtcggcgctcaccaacaccctgtcccccggcgacaaggtggtgaccttccgctacggcctgttcagccacctgtggatcgacatgatgcagcggctgggcctggatgtgactgtgattgagggccgggggggcgatggcgcatacgaggacaagctggctgaggtgctcaaggcggacaccgagaagaagatcaaggcggtgtgcgtggtgcacaacgagaccaccacgggtgtgaccagcgacatccctgaggtgcgccgcaccatggatgcccacaaccaccccgcgctgctgctggtggatggcgtcagttccatcggcgcgctggacttccagtttgacaagtggcgggtggacgtggcggtgacgggcagccagaaggcgctgtccatccccaccggcctcggcatggtctgcgcctcggacaaggcgctggcggccatgaagacggccaccagccggcgcgtgtactacgactntgccgacatgctgcgcaccaaccccaccggcaacgtgccgtacactcccatactgcc

SEQ ID NO: 6203 - DNA, 323 bp, Chlorella sorokiniana
  unsure (1)..(323): unsure at all n locations; Clone ID: LIB3602-088-Q6-K6-C2
cccggttcgacccagcgttcgcggncgcgtgggcgcagccctgcggggggtgaggaccgcgaggcgtttgccgccatttctgccagctgcagcacacgggccgaagctgaggacctgctggccgagattgtgaacgccaagtgattgacggcggcgctgctgtgcaggactgcctgctcccaactgaccagctgggggggggggcagcagctgtgcccttgtcactgcactccgatgctggctgcgctcttgtaatgttacatggctgaaaaaaaaaaaaaaaaaaaaaaaaaaaaaaaaaaaaaaaaaaaaaaaaaanaaaa

SEQ ID NO: 6204 - DNA, 592 bp, Chlorella sorokiniana
  unsure (1)..(592): unsure at all n locations; Clone ID: LIB3602-088-Q6-K6-C3
gtgaagtacgcgaagnagtggcggagccgaagccgccaaggcccgcgggtccgacctgcgcgtccacttcaagacacgcgtgaggccgccttcgctctgcgcaacatggacctgaccaaggccaaggcgtacatgcaggcggtgattgaccacaagcgctgcgtgcctttcctgcgctacaacggcggcgtgggccgcacctcccaggccaagaacgagggcaactcgattggccagggccggtggcccaagaagtcggccgagttcctgctgggcctgctgaccaacgcggagagcaacgccgagagcaagggcctggacgtggatgcgctgtacgtgagccacatccaggtcaacaaggcgcagaagggccgccgccggacttaccgcgcgcacggccgcatcaacgcctacatgtccagcccctgccacattgagctgatcctggcggagcgcgggcaggcggtgaaggccgaggcggaggacaagcgccgcaagctgagcaagaaggagctggccaagaagctgcgcagcggcaccaccagcaagagcagctaggcggccgcccacggagcggcagcctgcggcggcg

SEQ ID NO: 6205 - DNA, 543 bp, Chlorella sorokiniana
  Clone ID: LIB3602-088-Q6-K6-C5
gcgcgtgcatcgagcccagccatcatcttttttgacgagatcgacggcctcgccaagttgcgggaggccagcggcgaaggtggcgtgggcgtgggcgagcgcatgttagcacaaatgctgcaagagatggatgggttgcagtcacgcattggtgtggttgtcattggtgccaccaaccgggctgactgcctggatccagctctgctgcggccagggcgatttgacaggctggttgaagtgccgccccctgacaacgccgggcgggctgcaattttctgcgtccacacccggcacatgccgctgtctggagtggacgtgcaagacctggcccacaggacggaagggtttacaggcgcatccatagcagcatgttgcaaagaggcagcactttgtgctctgcaagaagacttgaatgcctcttccgtaatgactcgccattttgatacagctatcagcatgcttacctctcgcctacaactgttgtgatgtgaatgtggcacgctatgcgccacgtatccgtcagtgtttgttaatcaacgagct

SEQ ID NO: 6206 - DNA, 602 bp, Chlorella sorokiniana
  unsure (1)..(602): unsure at all n locations; Clone ID: LIB3602-088-Q6-K6-C6
cccacgccgtccggnaaaccaagccacacatcaacatgcaggccgctctgtcccagcgtctggctgccatcaagccctccggccgggccacccgccaggtgacccgcgcctccgtggagtggtatggccccaaccgcccccagttcctgggccccttctccaaccccccctcctacctgaagggtgagttccccggtgactacggctgggacaccgcgggtctgtccgccgaccccgagaccttcgcccgctaccgcgagctggaggtgatccacgcccgctgggccatgctcggcgccctgggctgcgtgacccccgagctgctgcagcgcaacggcgtcgccaacttcggcgaggctgtgtggttcaaggctggcgcccagatcttccaggagggcggccttgactacctgggcaacccctccctgatccacgctcagtccatcgtggccatcctgctgacccagctggtgctcatgggcctgattgagggctaccgcgtcaacggcggcccggccggcgagggcctggatgccctgtaccccggtgaggccttcgaccccctgggcctggctgacgaccccgacaccttcgctgagctg

SEQ ID NO: 6207 - DNA, 306 bp, Chlorella sorokiniana
  Clone ID: LIB3602-088-Q6-K6-C7
ctggcctgcaccgtgtgcaaggcccagcacatgcacgccatcaagcgctgcaagcacttcgagatcggcggcgacaagaaggtcaaggggctatactagtaaaaaaaagagagcggcaggcggagagcatgaccgagaaaggaggcagcggcgcccgctcaccctgggcggcctgctccccgcccggcgcctcgctttggccgcctctggccactcgtacgcctccttgtccatgcccttgtgcttcctgagctgcccaacctggcatgcaagcagcctggccgtctgtaatgccattggcgtgtg

SEQ ID NO: 6208 - DNA, 581 bp, Chlorella sorokiniana
  Clone ID: LIB3602-088-Q6-K6-C8
gcaaagcagcctagcggcaggcaccaccagcgggcgtgcatcccttgcacgactgcccagcggcaggggcatgtccgccgccaagccgcgtggcagcaggatggcttccctgcccggcgacggcgctggcaaggtggcgggcacaggcgggctgggcagcagcgccgccaagcatgcagatgaggaggatgaggcggtgcagcggtcggctgcgtcctggagccacccagccgcggccaccaatgcaggccgggcagccgctgtccgcaagtcgtccgccagcgctgcacgcctgtccatgtgcaagcagctggtggctgggcccagcggcggcagcgccaagcacggcatgcacaagccggccgctgctgcaggagggcactcaccgcccacggctggcagaacgaaacactagagtgcgcaagcttgccaatatgccctaacatatagtgaggggcgacctggtgagcccgcctaccagttagcttagatgattgcagtattgtgtcaattgctcacttgccaacttcttcccctgcctgccatgccttgctgaaatccgttggcctctccctgcctga

SEQ ID NO: 6209 - DNA, 589 bp, Chlorella sorokiniana
  unsure (1)..(589): unsure at all n locations; Clone ID: LIB3602-088-Q6-K6-C9
tgnagtgggagttgtccaccccgctgatgtatgtccggtggctgatgctcaaggccggcctgggcaaatccgctttgatgccgctggtcaatgtcgccttcatgctcgtcttcttcggttgccgtaacgtgtggggccccatcatgacgctgcgcttctggcgcgacggcggcctgcagctggcctcctccgcccctgcgctgccgcacaccgccatccacgtcattcgggtgatggccatcgcgctcaactgcctcaacacctactggttctctcagatggtccgcattgctgtgaagggcggcaagccgaagcaaaaggcagtgtgattcgttgactcaaaccactctaattgttccacatggccagccacagcttccccataaaccgtgccttcatgctttacttgtaattgccccattcgtgcctccccgaggctctgcgcaagcagacacgtgcgcattttgaccgtgctatgctgtactgcatctgctcttttgcagcactgtgctcccatcccgcctttgcactctctcgctcgctttacaccctcgctcttcgctcagcactgcgcactgtgatatgaaaa

SEQ ID NO: 6210 - DNA, 549 bp, Chlorella sorokiniana
  Clone ID: LIB3602-088-Q6-K6-D1
ttcgtagttctagaatcgcgacggccgcccttgtttttttttttttttttttttttttttttttttttttttttttttttttttttccactctgccttacatgggtccacacaagtggatgggggggtcgctcaaactcttgaagaccagggaaggatttggggcccaacgagcagggggggcagcccgaggggggcaggcacagccctggggcctgcctcaatctattgcagattgggttgcatcaaatgctagcgggggtaccacgagcccgcggatggaggggcggccccttgctgtgggggcacagcgctgccaagggggctgagcagggaagctgatacagtgagctggaggggggaggagtgtggtccccccccttgcaaaggggcgaggggaaaacgggatggaataaaggtagcgggcaaagcctaaacaatcagcaccaatgggtccaattcattctttgaaaaactgcccacagggacacgtgggcccggccggggggccggccaggctggcagcgcagccagccgacaggcagccagt

SEQ ID NO: 6211 - DNA, 553 bp, Chlorella sorokiniana
  Clone ID: LIB3602-088-Q6-K6-D10
ctttgacgacctggtggcctccgtcaacgacatgacccgcggcaacgactggttcctgctggccaacgactttgcgagctacatggacgcgcaggacgaggtggacaagctgtacaaggaccaggaggagtggacgcgccgctccatcctgtacaccgcgggcaacggcttcttctcctccgaccgcaccatcgaccagtacgccaaggagatctggaacgtgcaggcctgccgccaggcgtgagccaagcaccaagcggcttccatgccagcctgaggcgccgcgctgtgctgtcccacgccgccgccgcccgcccccagccctcacattgtggagcggtggcgtggcagcacatcccgatgtccccccaccagcactgcagctgcaaatgcgacccctgggccccattctctgcccctgatatgaaatgaatccctcctttgggcacacgattcgaatcgggatcgcccagggggcgaagctttagttgtattagaaatcattttgttgcgtcgtttcggcccttcctgactctacctgccttctgagtag

SEQ ID NO: 6212 - DNA, 273 bp, Chlorella sorokiniana
  unsure (1)..(273): unsure at all n locations; Clone ID: LIB3602-088-Q6-K6-D11
cgtctcgggcatgccaggtgcgtgcccgtccatgcccacctntaccagcccgcgtaaccgcccccatgggagggcagtgacccatgcccgccgtgaccgctgtccgccgcagcacccgtcaagcgacccgctgnacacatcacgctcccccgcacgaacgatgagcatcgggacgtccgtctcgctgctccatgtactgacacaggacctccctagcagcgcagcagatgaccgacccatgtcatgcagtgtggcactcacctagcagcagct

SEQ ID NO: 6213 - DNA, 580 bp, Chlorella sorokiniana
  Clone ID: LIB3602-088-Q6-K6-D12
gcggcgcgtgccctacggccggtttcgtgcatacgagcaatagcgaataccgctgcgccggcatgctgcctgccgttgccgcccatcacccaccggcccaccaccccaccctagcgccgccaccgcccaccacccaacctctctttggtggcacatgccaccctagctggccgccaccacacgcctgccgcactgtcaagttttgcaccgaagcgaagcagccacctgcaataatgcgccgggcacgcctgcccgcccccccgctccctctcttgaaggtggtggttcagcctggagccgcggcagtgacagctggcagctctccatggatgtgctgggcacgttcacagcagcacccagcccagcctgcctagcctgcgcggcggcagcccgcgccatccgccgctggcctttttgtgccatcaatcggacagtttcatctcagcactctagcgcgtgtgtttttccttcccaagaacccttgtctctcgtggtgggcgcctgcccctgccttcaaacgcacgcaaacgacgcaactctgacgcaacccgcccacccgcatttagtttctctcccgcac

SEQ ID NO: 6214 - DNA, 571 bp, Chlorella sorokiniana
  Clone ID: LIB3602-088-Q6-K6-D2
ggagcacacaccgctgattgagggaggaagacactagtaacccctgcactgggcagacgatctacccagcctggggttggtgggccaggaccttgacaggcaggggacccctggtgctgctgtctagatgcgtgcggttgctgtcgaaccataccaagccgctggatgtattgtgtcgggggggggctgacacctgagaagtgccttaggaaccctgacgcgcagggcgagctctggaactgtttgactgtgaacatgtaaatcacctgcttcatggaaagaagccaagcctggaggtgatccaagaagaaaaagagcgagaagcccgaggcgcgcaaggcctcccgcgaggcggaagctgaaagaagaaaaggagcgcgcctttaaggggaacgacgataaggcggtgcagaaggcgcaggccaaggtctttttcgccggcacggatgtcaagtaacattctattggtgcgaaaaagggcggagtggaaaaacaccgggcgttaaccaagttaaaatgctgcgggcatatcggccttttgggccgttgccgttgtaacaaaatgcctcac

SEQ ID NO: 6215 - DNA, 588 bp, Chlorella sorokiniana
  unsure (1)..(588): unsure at all n locations; Clone ID: LIB3602-088-Q6-K6-D3
cccgggttcgnacccacgccgtctcggttcaacgacctgnnagtggnagcctgtggggaccgctggnatcctggnnagggcgnnacctcacggtcaacccaggtgctggnnagtggttccgcgcccaaggggcctggnagnngcctactccatnnctcctgcggcccagtccctttgctgtacaacaaccatctnntccccaagcacaaggnnagcggctggnacaagggggagtggagcgagctgnngtgcggacccggtggccaagaatggnnagaatcccgcgcaggacagggaaagccacttnntgatgtgnngtggtggnncgtgcgaaggacgnnaggagggagaaaggacctggacnngtgccgctggtcagnncatcaagttccgcttgagnntgctaggagaagcacctcnntttgcaattctaccagagcnnacgcggcaaccggcaccggctggcagnctcgggccttgcagaagnncaatctagtctgggctttgccgctgcccnngccgccacatgtaaacacntgccttgcanttttctcttgnccannagtgcaagcagatgcccaacaccga

SEQ ID NO: 6216 - DNA, 543 bp, Chlorella sorokiniana
  unsure (1)..(543): unsure at all n locations; Clone ID: LIB3602-088-Q6-K6-D4
ncacgacattccaggcgcctgctggtcgctgttgagcagggcaggagtctatctgcgcagccaccgttcaccacccgccgccgccgtcgctgccgctgctgccatctattagcagcaagccctacaactggctgcatctcgcatcgggcgccatgattgtcgcagcagccgtcatcggaccaaacaactcgccgctgtacctctccacgtttggcggggacgacgagtcagcgcggctgtccaccatggtgcactgctcgctggacgcggttgaggagaaggtggcggcggggctgcggggtaccgcaccaggggacgtgcctgatgcctatctgggactgttgtcatcagaggatgagctcaaggtgttcggctacgtcaccaacacacgggtcaagctggttgctgtggtggacgacccgatcgtgaaggacgatgaaatgcgtgcgatcttccggcgcatgcacgcggcatttgttgacgcggcgtccaatccattctaccagcttggcgcgccgcttgagctcgccgggctttgacgcc

SEQ ID NO: 6217 - DNA, 196 bp, Chlorella sorokiniana
  unsure (1)..(196): unsure at all n locations; Clone ID: LIB3602-088-Q6-K6-D5
naaaaaaaaaaaaaaaaaaaaaaaaaaaaaaaaaaaaaaaaaaaaaaaaaaaaaaaaaaaaaaaaaaaaaaaaaaaaaaaaaaaaaaaaaagggggggccgttttgagaggacccaagctttgggtccgcctttcttgccaacgccatattctcttttttaggggtccccctaaaattcaatcctttggtccgggg

SEQ ID NO: 6218 - DNA, 576 bp, Chlorella sorokiniana
  unsure (1)..(576): unsure at all n locations; Clone ID: LIB3602-088-Q6-K6-D6
gtgcgagcggcttgngacacagggcaccatgaagttctccagcaccgtgaccagcagccgcaggaagtgcaggaaggcgcacttcacggcgccctccagcgcgcgccggaagctgatgagcgcgccgctgtccactgagctgcgcaacaaatacggagtgcgctcggtgcccatccgcaaggacgacgaggtgtctgtcgtgcgcggcacctacaagggccgcgagggcaaggtggtccaggtgtaccgcaagaagtgggtgatccacatcgagcgcatcacccgcgagaaggtcaacggcgccaccgtgaacgtgggcgtggacccctccaaggtggtggtcaccaagctgaagctggacaaggaccggcgccagctgctggagcgcaagcgcgcgggcaagggcctggccgacaagggcaagttcacggaggcggaggtggcggccatggagaacgtggactaagcgccacgcccaccccgcagcagccagcagcagcagcagtgttgaggccgcgggcgggccaccgacgccagtgcggctcgggtggcggcggcccgacggccccggtgggg

SEQ ID NO: 6219 - DNA, 411 bp, Chlorella sorokiniana
  Clone ID: LIB3602-088-Q6-K6-D7
cggccgcccccgctgccggcggcgccgcgcctgccgccgctgcggccgccgcccccgagcctgaggaggaggaggacgaggacatgggcttctccctgttcgactgagcgggccacagcctgcctggttgagctggagcacaggccagccctgcaagcagccgcaccaaggatgccgaggtgtggctgctgggctggcaagcccaggggtgcagctgcccgccctgggctggcaagcccaggggtgcagctgcccgccctgctggccggcacgggcgccgcggctgcggcgtgtcgctccgggcgcgggcggcagctgctgcaccatgtgccgctggcagcgcggttgttgcgcccggcgtggccatgtgttgatggcacgctggacacatccatgtaacgctgctgcgca

SEQ ID NO: 6220 - DNA, 576 bp, Chlorella sorokiniana
  unsure (1)..(576): unsure at all n locations; Clone ID: LIB3602-088-Q6-K6-D8
tgctgacttgttggcgcctanagaagggccacagcctgcgccgagagcgaatcctccaanagaaccacaatgaagtttgagctggacgacgacacggtgctgcgcctgtcgggcgtggccaccgccgcttacagcgccacgctgctggtggtgccccgcacctcccacgacatcttctacgtagcgcagaatggatccacggccagcgacgagcacatcgcaaccgcccgctggtttggtgcagcgctggcgtgtgacgccgccaccaccctgtctgtggggctgtctgagggcagccaggatgccaagcgcaacgcactgcgcgcaaacggcctgtgctgggtggcctgcggcggcatgcacctctacaacgccggcgctggtgtgcagaagaaggaggttgcctactcgtccgctgcgctggcaggcgtgctgggggcgctgtgcctgtggcgcggcttccgcaacaacgatgacgatgccaaggagctgtgagcttcaacacaatttctgacaccttttgtgtttgatgcgttgcacaactgatgggaacaatgagcaggacgcccaggcatg

SEQ ID NO: 6221 - DNA, 552 bp, Chlorella sorokiniana
  Clone ID: LIB3602-088-Q6-K6-D9
cggaacgcgtggagcaaccatcggcattgacttcaaaacaaaaaggtgctgattgacggcaagtgggtgaagctgccgcatctgggacacggagggccaggagcggttccgtaccatgaccagcagcgtactaccgcggggccatgggcattctgctggtgtatgacgtgacggacaaggccagcttcaacaacatccgtcactggctgaagaacatcgagcaccacgccagcgataatgtgatcaaggtgctggtggacaacatgagcgacatggatgaaagaaggcagcggctccgtacagcagggtttagccactggcggacgagttcaacatgcagttgtttgagacaagtgccaaggccaacaagaatgtggatgaaacgtttcattccgtggcacggcacatcatgttgcgggtcaaggactccgcgccagtatgccagcagcagcgttggtagctggcccagactgcgggtggggcccggccagcgcaaggcggcagccagcattaaggagcggctgctgttgacctgaggaaactctgcgcctt

SEQ ID NO: 6222 - DNA, 535 bp, Chlorella sorokiniana
  Clone ID: LIB3602-088-Q6-K6-E1
ggacgggcccaggagccctggtgtcgctcaagctgcagaagagctggcggcctctgtgctgggctgcggcctgcgcaggtctggctggaccccaatgaggtcaacgatatctcctggcgaactcccgccagacgtgcgcaagctggtgaaggacggcttcatcatccgcaagcccgagaagatccactcgcgccaccgcgcccgcaccgcagcagaggccaaggccaagggccggcacaccggctacggtaagcgccgcggtacgcgcgaggcgcgcctgcccaccaagatcctgtggatccgccgcatgcgcgtgctgcgccgcctgctcaagaagtaccgggacagcaagaagattgaccgccacctgtaccacgagctctacctcaaggtgaagggtaacgtgtacaagaacaagcgcgtgctcatggaggccattcacaagcagaaggcggagaagatccgcgagaagaacattgcggaccagctggaggcgcggcgcgccaagaacaagcggcgcgcgagcccaaagcgg

SEQ ID NO: 6223 - DNA, 208 bp, Chlorella sorokiniana
  Clone ID: LIB3602-088-Q6-K6-E10
aaaaaaaaaaaaaaaaaaaaaaaaaaaaaaaaaaaaaaaaaaaaaaaaaaaaaaaaaaaaaaaaaaaaaaaaaaaaaaaaaaaaaaaaaggggcgggcggttctaagggatccaagctttacttacggcgggcttgctttcaaaattacctcttttttggggccccctaactccaattcattggcccgtggtttgccacctccaaatc

SEQ ID NO: 6224 - DNA, 589 bp, Chlorella sorokiniana
  Clone ID: LIB3602-088-Q6-K6-E12
tcgggtggtgttccgccagctgggcaggcagcaggtgcgccgcatcgctgaccttgagctggccaagacggctgcgcgcatggctgaccgcggcatcggcctcgaggtctccaactcgctcatggagcgcatcaccgctgagggctacaacgagtcgctgggtgcccgcgagctgcgccgggccgtgacccgcctggtggatgatgccctgtccgatgcgctgctgcgcggagaggtgcgtgccggcgaggttgctgtgctggactgcgacgccgagggccgcaccgtggtgctcaaccgctcgcacgccaacaacattgtggcggctgacattgtctactcatcggtggcggcgtaagccaggctggctggccccaagcctgccagctgccttgccagccaccccgtgcacccgcctgccctcggtacacgtggcaggcgcagaggcgcgatgagatgcgaatgccgcaagacatacacaaccctaaatctcccaaacgaatgcgccgtgcactcccgtgcccccgcactgctgattgtcgcttgactgccgtgtctcccccgctcttgtgcctagcttgcggggcac

SEQ ID NO: 6225 - DNA, 477 bp, Chlorella sorokiniana
  unsure (1)..(477): unsure at all n locations; Clone ID: LIB3602-088-Q6-K6-E2
cccggttcgacccagcgttcggcagcccgngccgctgcgctgggaggggtttgagccggtgctgctgctgggcaagcagcgcttctccacgtggacatccgcatccgcgtcaagggcggcggccaggtgtcccagatctacgccatccgccaggccatctccaaggcattgtggccttctaccagaagtacgggggtgggcggagcaagaacgagatcaaggacatcctgctgacctacgaccgcacgctgctggtggccgaccctcgccgctgcgagcccaagaagttcggtggccacggtgcccgcgcgcggtttcagaaatcttacaggtgaaggctgccccgtgggacggttgggcgcctctggaggcttcttctgcgccgctggcgtggcggcagcggcgtctgcggcctaggcagctgccctggagcagcatgccctcagcgaaagcaccatgagtacaccttgcgtgtgt

SEQ ID NO: 6226 - DNA, 230 bp, Chlorella sorokiniana
  unsure (1)..(230): unsure at all n locations; Clone ID: LIB3602-088-Q6-K6-E4
tcgtacatttgcccgctntcgaagctgccgcactccatgccatgatactcatgcacgcttgctaccatccatttcttgctggccttaaccataagtgttgnctcgccgtccgcctgagccaacactcgtgcagcagcataattcttcccctgtacactctagctgctgctctggcccctggtgggatacgttgcactgtnnaaaaaaaaaaaaaaaaaaagggggggggg

SEQ ID NO: 6227 - DNA, 512 bp, Chlorella sorokiniana
  unsure (1)..(512): unsure at all n locations; Clone ID: LIB3602-088-Q6-K6-E5
ctgccctctgcgtttngaactgcaaattgaacccaccgatgcgccgcatgtgtgtactgctttcttcaacgccaccatcacccaccccctcattcgcaccatccctgcactacccacctcctcgccggctgcatgcgctgcactcagcaccatttcatcaaccaatcgcctccctttcatgcgagacttgctctccctgcactctccctttgccctgcccccccaagccaaactcaagcacctgctcaagccaacccacatccgccctttaccaagcaaacccaaacttctcatgcaacagttttctcccccttttcattccagtaccagtgtttgactaccaatcgtcctcccaagcggggctgccaagcctttttgtccagctgccggctgtcatgagctgttgccgctgctttcccccatccggcttgcgctgcaccgccgatcctctctactcccttctctgtacagctggctcagcagatgtaacatgcgagcttgcgaaananaaa

SEQ ID NO: 6228 - DNA, 140 bp, Chlorella sorokiniana
  Clone ID: LIB3602-088-Q6-K6-E6
tcgaaaaaaaaaaaaaaaaaaaaaaaaaaaaaaaaaaaaaaaaaaaaaaaaaaaaaaaaaaaaaaaaaaaaaaaaaaaaaaaaaaaaaaaaaaaaaaaaaaaaaaaaaaaaaaaaaggggcgggcgtttttaaggggaac

SEQ ID NO: 6229 - DNA, 358 bp, Chlorella sorokiniana
  unsure (1)..(358): unsure at all n locations; Clone ID: LIB3602-088-Q6-K6-E7
gttgcctgagccanagtgctgtgctcctgccgcttcatcaacaatcccatgcctcctcaaantacatgcccgggctggcaaagcctgctaccacatcccgttgattactgttgagtgccaatagacgtttctgcaagctgctcctcacccctgcaccccttccgctctttagcacctcttctgtgctcccagcacctctcccgctctctactgcccctcctgctgccttctcgcttcctcggcttgcactgggtgcatcagcggctgacgccgctgcgctgccctgctgtgaatgctctagcctccctggctgccacaaaagccctgcatncgcaccacccctcggtgctcttttgct

SEQ ID NO: 6230 - DNA, 588 bp, Chlorella sorokiniana
  Clone ID: LIB3602-088-Q6-K6-E8
ccgggtcgaccaccgtcgacctctcagccttgccgcacgaaccgtctccaacacctgccggcacccgaccaggcatccctcgtgcttcacacgcgtccagacaccaaagatggggtttgagatcgacgacagcaagttgctgctgctgtccggcctggcaacgacaacttatgccatgcacgccagctttgcgcccaagagcctcaatgaaacctacatgaacccggctctgccagtcaatgtgccgatgacccgctggtttggcctggccctgggcacctgcggctccgtcaacctggtgctatccacacgggaccatgacaaaaaggcggtgaaagacgcgctcaaggtggcgggtgctggctgggcggcatcctccgctgtcatggcctacaacgccaacgaggggcaccagaagaaggagctcgcctggccctcggccgccgccatggctggcatggccgccctctgcctgtggcgcggcttcaaggaagacgagtgaggcgtgaaatgtgcagacagttggagatcaccggcacaatgagcagggctggtcaacatggcgcctaactaccgcacaactgcaag

SEQ ID NO: 6231 - DNA, 234 bp, Chlorella sorokiniana
  Clone ID: LIB3602-088-Q6-K6-E9
tacttggggcgggcctgcttaagaggatacctttttttttaggccccacgctagattcatttacactgtgccttttttttacaccgttagtgacttgggaaacccctgggtttccccaatttattcgggttgaaaccctatccccttttcgcctgttggggttttagcgaaaagcccctttccgatggtctttccaaacagttgggccccctgcatggcgattggcacacccct

SEQ ID NO: 6232 - DNA, 593 bp, Chlorella sorokiniana
  unsure (1)..(593): unsure at all n locations; Clone ID: LIB3602-088-Q6-K6-F1
gtcgacccagcgttcgggnacggttgggcagccatggcggcgcgtcgngactgcgcgcccaccccttctttgcggggctggactggcgcacgctgtttgagcagcggccgccgtaccggccggcggtggagcacgagctggacacgcagaattttgagcagtacgaggacgacggggccacggggctgacgcccggcggctcgcgctcacgccccatcgccgaccccaacttcatcggcgcgggcttgtgaaccatggttcgcaaactccacgagttgaagcatcgccggcctgctctgacacgcgctcagctgtgtgtgcggttgcgtttcacgtgtcaccccctttgctgcccagccacccacctgcaggttacacgtacaaggggtgggatgcggtgcacaacacacaggccaagcagcgcatcaacccgcagcggccagcaccggcgcgtcccggcatcaatcagctggccgaggcgtttgcgcagcaggccaacatccaataacaaggccgcctcagactggccaggatggcggagatggcggctgtctttggccagccagcgattcgtccgctaatgcttttgtcgc

SEQ ID NO: 6233 - DNA, 341 bp, Chlorella sorokiniana
  Clone ID: LIB3602-088-Q6-K6-F10
acccgggcctttgcgccccacaactcactacccacgtcctgacccctgttcatttccccacctgtttcctctgctgtttcatccctcgctctgctgcccccctcgcccggaattgacttccgaatcacaccccacgcacatacacgccgtgcacttgcactgttgcgccagcggtttttacgcacaccatacccaattttggctcgttgaagcacggtgtaagcaagagcagtaaaaaaaaaaaaaaaaaaaaaaaaaaaaaaaaaaaaaaaaaaaaaaaaaaaaaaaaaaaaaaaaaaaaaaaaaaaaaaaaaaaaaaaaaaaggggcggcgggttttaa

SEQ ID NO: 6234 - DNA, 578 bp, Chlorella sorokiniana
  Clone ID: LIB3602-088-Q6-K6-F11
gcgggtggtggaggcggccagcagcccgggcagcgagtaccggcggtttgcggtgaatgacaagctgttcgaccacgacgacatcgagtgaggggcctcttgtggaccttgcaaccaggctggttgctgcagggcacacaggactggcatgcaagtttgcgagcagagtgcttgtcgtgctggaggccagcagcagctcggcatgtgcccacctggctgccctccactgctgggctgccctcctgcttcccggtcgcagggtgctgattgcgctgcagcaggctccctacgagacagagccgccgctggtcaccttccgcagcatggccgcccaggtcaagtacgtctggcccatccagcaggcagtgaccgactttggctcgcagcggcagcggctcaaggaggtgcggcggtggctgggctggcgcctgctgggctgcgacctcctggagtgctatgaggagtagccggtgtgggtgtgaaacacctgcattgactgcctagcagtcatgcacccgcgtgagagtaatttctgtgcctgagagaacgaacccttgtgctgctgattctgtgtacca

SEQ ID NO: 6235 - DNA, 545 bp, Chlorella sorokiniana
  unsure (1)..(545): unsure at all n locations; Clone ID: LIB3602-088-Q6-K6-F12
ccctgtttgctttgaccccgctcgctgccgcactgcggcgcaccatgctccttccccacaccgaccctgcaccttggccctcatattgctgccgtccgtcgcctgccgtgccccgccagcccgcctcatggggcgctccatgcagctcacatccccctggcaggctggctgagcacttaggctagacagcagctgcccgttggcctccctgcacccggttttgctcccttcttgcttccacaacccgcttgcagcaacgttgctcgtgcactgctcccagcagttggtggtgctcaacgatggggtcacccggacacccgacctccgctgttgttgtttcattccagcattgcatgcccacgttgtgttgtttccagagccagtcagcctgtggaccaggcccagcctctgtaacccaagcaagcaaaanaaaaaaaaaaaaaaaaaaaaaaaaaaaaaaaaaaaaaaaaaaaaaaaaaaaaaaaaaaaaaaaaaaaaaaaaaaaaaaaaaaaaaaaaaaaaaaaaaaaagggggcgggccgttt

SEQ ID NO: 6236 - DNA, 522 bp, Chlorella sorokiniana
  unsure (1)..(522): unsure at all n locations; Clone ID: LIB3602-088-Q6-K6-F2
ccgggtcgacccagcgttcggcccgggctacatcgttgntaactgggggcgcggcaatatctttgcggtggagcccaagcagctgtacacgtcgagccccaccagtgaccgggccgcgcgccagggcctgggcggcgtgcagggcctggctgtgctggcggcggcaggcgcaattgtggcggctgtgacactgggcggtgccaagaaccccgccgatacgctgcagggcctggcggctagcggcgcagccgacagcctgactgcgattgctgaccgcatctcgtcctctctctgatgacggaaagcgcacaatgatgcagcttgacagtcgaggctggccagagattggtcgccagctgtccatgttgcctgcagcccaccaaaagcctgcccatttttccgaaaagaacgccggagccacgctccctgtgcactgagttttgttgctgctgtttcacgcctgctgcggctccgcatttttttttgccatgcgctgactttatgcactgtaagtgacacacc

SEQ ID NO: 6237 - DNA, 486 bp, Chlorella sorokiniana
  unsure (1)..(486): unsure at all n locations; Clone ID: LIB3602-088-Q6-K6-F3
ccaccttcctggnccccaaggtcgtggcgctgcgactggctatgacactgctgtggccctgcccgccgctggcgacgatgaggagtacctgaaggagaacatcaagtcggccggcgcaatgaagggccaggcagtgttctccattgccaaggtggatgctgccaccggcgagattgggggcgtgtttgagtctgtgcagccttccgacactgacctgggagccaaggcccccaaggacgtcaagatcactggcctctggtatgctcagctttcgtaagcgctgccagcgcccgtcgtttggagaagagaattacagctttgtcgctcgacctgtttgtcagacgtagaactgctcatgtaacataagcgcgcaaaanaaaaaaaaaaaaaaaaaaaaaaaaaaaaaaaaaaaaaaaaaaaaaaaaaaaaaaaaaaaaaaaaaaaaaaaaaaaaaaaaaaaaaaaaaaaagggggggcgcgttttaa

SEQ ID NO: 6238 - DNA, 91 bp, Chlorella sorokiniana
  unsure (1)..(91): unsure at all n locations; Clone ID: LIB3602-088-Q6-K6-F4
gtcgacccagcgttcgctgncctctccttgatacttcacactggtgtaactgccgtctgagtggttgttgcaaggcccactgtttacatgc

SEQ ID NO: 6239 - DNA, 369 bp, Chlorella sorokiniana
  Clone ID: LIB3602-088-Q6-K6-F5
ttcgcggctcaacgccctccatgcaccagggggggggaggcgccaaatctgccaccccaaacgcacgtccgccgctgcaccacctgccgccccctcacccgcacccatcttccacccgccacctttcctgccgctcaccgccgcacatcctaccttccacacctcactccatgtccaccgtggggcggggcttcacacagcggctgctgccatgcaaagctgctgcgggagccatccatcatgctcgcacacccactcacccacacgtccaacgtatccagacccattttcaaggcccgactgtacagtgcctttttgcgtccttatgccgatctggtaccaggacttattgtgtaacaaatggtatgt

SEQ ID NO: 6240 - DNA, 554 bp, Chlorella sorokiniana
  unsure (1)..(554): unsure at all n locations; Clone ID: LIB3602-088-Q6-K6-F6
naaaaaaaaaaaaaaaaaaaaaaaaaggaaaaaaaaaaataaaaaaaaaaaaaataacaaatcaaaaagaataacaaaaataataaaaaaaaaaatagggccggactaattttaaaggtacctggccttccgttctccaatcttcctgaactgttggtctcttttttggtggcccgttaaattcctttggctggccgtggtttttccccttgctgcctggatagcccttggggtccccccgcttgtcctgctggccccccgtgcccttttgtccaaatgggggtctcgccctgaggccgtgccttagccgccttgccactggtggttccccccgatgggccctttggactcgccctgggcggccgtttcactcgtgggggttttttgtgtttcctcgctgcgtcccctttcctttttcctcgtccctctctccgtttctttcccctttgtgccttttctttttactgctctttggtttcttttcccctttttttttgattttgggggctctttttggggttcggctttagtgttttcggcccctttttaccccc

SEQ ID NO: 6241 - DNA, 538 bp, Chlorella sorokiniana
  Clone ID: LIB3602-088-Q6-K6-F7
tttttttttttttttttttttttttttttttttttttttttttttttttttttttttttgtgtttttactggtgccttgcctgcttgcccgcttttgttcttggttggggttggccggggggggtttttattaaggccgggggggggggggggggtcccggggggggggggggggggggggggggggcggcgggggggggttcccccccggggggggcccgggggggcggttggggttgtttctttttttgggcgggggtgggggcccctcggggggtcccccggggggggggggggcgtggggggggggggggggggcgggggcggcggggccgggttctggggggcgggggggcggggcccgggggggcggggccggggggggtcgggggcccgccgggggggggggggcgtggcgggcccgcggccgctgccgttgccgtgccggttggttgggggggggggcgggcgccccggggtccccggccgcgtgccgggggtgtcccggggggcgccggggcggcggcccgtgcgcatt

SEQ ID NO: 6242 - DNA, 528 bp, Chlorella sorokiniana
  unsure (1)..(528): unsure at all n locations; Clone ID: LIB3602-088-Q6-K6-F8
gaccggcaggcgtcgctctacgcgcagggcaagcggcgttacgaccgcaagcagtccggctatggtggccagaccaagcccgtgttccacaagaaggccaagaccaccaagaagattgtgctgcgtctggcctgcaccgtgtgcaaggcccagcacatgcacgccatcaagcgctgcaagcacttcgagatcggcggcgacaagaaggtcaaggggctatactagtanaaaaaaaggagagcggcaggcggagagcatgaccgagaaatggaggcagcggcgcccgctcaccctgggcggcctgctccccgcccggcgcctcgctttggccgcctctggccactcgtacgcctccttgtccatgcccttgtgcttcctgagctgcccaacctggcatgcaagcagcctggccgtctgtaatgccattggcgtgtgaaaaaaaaaaaaaaaaaaagaaaaacaatataaaaagatacaaaattaacatacacatacatacaaaaaaaataaactatttattaaagaaaa

SEQ ID NO: 6243 - DNA, 497 bp, Chlorella sorokiniana
  Clone ID: LIB3602-088-Q6-K6-F9
cgcagtaacgcgccgccaatgcgcggcggcttggccgagcagccgccctgacggccaggctgcatgccctccgggctggcaatctactccggcgctaacagaacacgtgttgtggctcaatggccaaatatggggagcggcctggcatgctgccggccctcccgcatgcatccttgatatgttcaacgaccataaatccaaaatcccaggcctcttgatacttgaacccgccccaactgggctgcaatagttgcgcgcagtgggcgctgcgctctgcattagccctctcagcccctgcctcttcttttcaccatgctgccaactcttccatcaccatatgcaagcgcgctccctctttgtgccccccctttgcctgcatgctagtccgcggtcagtccagccggctaatacaccagtactcttttgctcctcgtacagatcaagccatttcattttcgagtgcttgtgcgcactttgtctgcaaaacaattgcgcgc

SEQ ID NO: 6244 - DNA, 573 bp, Chlorella sorokiniana
  unsure (1)..(573): unsure at all n locations; Clone ID: LIB3602-088-Q6-K6-G1
gcgttcggcttagnaagtccgcccgctccgcattcagcccacacatggctaccgtgatcgccgcctcctccttcgcgggccaggccgtgcgggctgcgccccgccccgccgccgcgcgctccgctcgccgctccgtggcgccccgcgccatgctggagacccagcgcatggccaccagcttggaggggttcaagtttgagcccatccgcgagtcgcagatctcgcgcgccatgacggctcgctacatgaaggacatgcacgagcatgccgaggtggacatcgtgattgtgggtgctggctctgccggtctggctgccgcctacgagctcagcaagcaccccgatgtcaaggttgccatcattgagcagggcgtggcgcctggtggcggctcctggctgggcggccagctcttcagtgccatgtgcatccgcaagcccgcggacaagttcctggacgagctgcaggtgccctacgaggacgagggctcctttgtggtggtgcgccatgccgccctcatgacctccaccctgctgtccaaggtgctggccgtccccaacatcaagctgttcaacg

SEQ ID NO: 6245 - DNA, 571 bp, Chlorella sorokiniana
  Clone ID: LIB3602-088-Q6-K6-G10
cgttcttcctgcgctgctggtcccgctgctggccatccggctaaacttggctgatgtctttggccacctgcagcggcacggcggcagcccgctgcgcctgctgggcctgctgctgctcagccacccgggcacgtgggtgctcatctccgcgctctgcggcggcgcggccatcgcagcaaacgtgctggtcctgcccatgcttgcggcccctacggtgtgggccagccgcggcatgtgccaacaagtgctgcacgtgccgggggtggaggagcctctagcccggctgcatggcgcgctagataccctgcacggcaactcgctgctgtcgcagccgcatgcagcggtgctgggagagccgagcagcatgcagtgctgcctggcggtcaacatttggcttgcagcggcagttggcgtggtgctcccactgttcgtgctcgggcgctgggaggcggcggggcggtgcagcctgtatgcacggcgctggcggcaggcacagcaggcacagcaggcgggggacataagctcacctgccgcggcagatttggagcgtctgtgtaaaagggacgcaatg

SEQ ID NO: 6246 - DNA, 575 bp, Chlorella sorokiniana
  unsure (1)..(575): unsure at all n locations; Clone ID: LIB3602-088-Q6-K6-G12
gcgccgcanatgtgctgggcgtcaaggccgccgcattcgcgagttgaccagtgtggtgcagaagcgcttcaagttcccggagggctctgtggagctgtacgccgagaaggttgccaaccgtggcttgtgcgccgtggcacaggcggagtccatgcgctacaagctgctgggcggcttggctgtgcgccgtgcctgctatggcgtgctgcgcttcgtgatggagagcggcgccaagggctgcgaggtgattgtgtctggcaagctgcgtgcgcagcgcgccaagagcatgaagttcaaggatgggtacatggtgtcgagcggcaacccggtgcgggagtacatcgactcagccactcgccatgtgctgctgcgtcagggtgtgcttggcatcaaggttcgcatcatgaaggagtgggatccgactggcaaggttggcccccgcacccctctgccggatgtcgtcaccgtgctggcacccaaggaggaggagtatgtcagcgactccaaggaaaagcttgccaaggcttgagagctggtcgcacattagatgtactgctgcatgttaaacacccaaa

SEQ ID NO: 6247 - DNA, 283 bp, Chlorella sorokiniana
  unsure (1)..(283): unsure at all n locations; Clone ID: LIB3602-088-Q6-K6-G2
tcggnctagttctagaacgcgagcgggcgggcgccttgctgcnattgaaaagccatcagccattttcgcaccaagcccgccgagttgcctggcacttgcatttcattaccgcctgcccgacattacgcttgcccgagttgattgtacctgcatttcaatccagagacacaccgcgcctggcggggctcgcactgccggtttagtaccctgcaagttctgcatgctcttgcctgcaatgccggaccttggcgtgaagcagcaccagttgtaagtgagtgttgtg

SEQ ID NO: 6248 - DNA, 577 bp, Chlorella sorokiniana
  Clone ID: LIB3602-088-Q6-K6-G3
tcgcacggcctgctctgcggcccttcatacctttgtacctttctgtatcatcttgcagcaatggcagccggctgcatctttctaacatcgtcaccggcccactcgtttgtgccatgcccacctgcctccaacgtcacccttcatcaaccctcacccaacccatccacctgccacccatgcactcaccttccctccgccacaacctctgccacccactcaccacccatcacccgctcaacgccctccatgcaccatcctccccatccaccaaatctgccaccccaaacgcacgtccgccgctgcaccacctgccgccccctcacccgcacccatcttccacccgccacctttcctgccgctcaccgccgcacatcctacctcccacacctcactccatgtccacccttcacccgcgcttcacacagcggctgctgccatgcaaagctgctgccaaacccatccatcatgctcgcacacccactcacccacacgtccaacgtatccagacccattttcaaggcccgactgtacagtgcctttttgcgtccttatgccgatctggtaccaggacttaatg

SEQ ID NO: 6249 - DNA, 570 bp, Chlorella sorokiniana
  unsure (1)..(570): unsure at all n locations; Clone ID: LIB3602-088-Q6-K6-G4
tcggnaaaatgtgggcaagggcggccagcggtggtacaagaacatcggcctgggcttccgcacccccaagaggccattgagggcaactacattgaccacaagtgccccttcaccggcaatgtcagcatccgcggccgcatcctgtcgggcaaggtgaagagcaccaagatgaaccggacgattggggtgcgccgcgactacctgcactacatcaagaagtaccagcggtacgagaagcgccacaccaacatctcggcgcacatctcgccctgcttccgctgccacgagggcgacaccgtggtcatcggccagtgccggcccctgtccaagacggtgcgcttcaacgtgctgcgcgtcatccccgcgggctctggcgccaagaagggcttcggctccttctaagcaggctggactaagggcctcttgccttgctggctgaagccctcgacagcagcagcagcagccccagcacggcatgcaagcgctgcagacgccctgctgccctgagtaagcgccgccatgtgccggcggtggcagcagcaccgcccgccttgcatacacctggcccct

SEQ ID NO: 6250 - DNA, 541 bp, Chlorella sorokiniana
  Clone ID: LIB3602-088-Q6-K6-G5
cgccgtctcccatgcctgtgaggcgagcaagcaccggtgtgccacaccagcagaaccagccatgtccctgcctggctacgagcggctggagctgtcgggggtgctagacgccaccacagcccagctggtgcagctggtcattgatgcggtgaagagcggcaagaagaaggtcaagattgaggtggaggttgagggcaagctgtccgaggatggcaagtctgttgagctggagatcgagatcgaggccaaggagggcgaccgcaaggagagccgcgagctggagtactcggtgcccctgtgataaaccactgaaccagcctcaaatctgtacagctgctgcataacacctgctggccatttgtagttgggcgtttgccactccacttgctgcaactggatcaggctgcactgcctgctgttgtgcgtgctgctcaaatgttgcctctcttccatgtgctggcatgccatgtctcgtgttgctttgctgctgtgttggtttaggtgcatacgttatggcagagacatgtaaacactgtcaaag

SEQ ID NO: 6251 - DNA, 575 bp, Chlorella sorokiniana
  unsure (1)..(575): unsure at all n locations; Clone ID: LIB3602-088-Q6-K6-G6
ccganaagaactgccgtccatcctggtggacgagnagcacggtgcagaagatcagcttgctcacgcccaacatcggtatgacgtacagcggcatgggccccgactcgcgcgtcctggtgcgcaaggcgcgcaagagcgggcaggtgtactatcggcagtaccacgagcagataccggtggcgcagctgtgcagagagacggcggcggtgatgcaggagttcacacaaagcggcggcgtgcggccttttggcgtgagcctgctgatggctgggtatgacgaccacggcccgcagctgtaccagatcgacccctccggctcctattttgcctggaaggccagcgccatcggcaagaacatggtgaacgccaagacgttcctggagaagcggtacgccgaggacatggagctggaggacgcgatccacaccgcgctgctcacgctcaaggagggcttcgagggcgagctgtcgggggacaacatcgaggtggctgtggtgggtgaggaccgcaagttccgggtgctcacccccgctgaggtggccgactacctggccgaggtggagtgagggaggcgc

SEQ ID NO: 6252 - DNA, 581 bp, Chlorella sorokiniana
  Clone ID: LIB3602-088-Q6-K6-G8
cgcagctgcacagcctgcaactcagcagctggcagccgccacaccgctggcagcagccgcagagccggccgcagctgagcctgtggcggacgctgagcaggaggcggtgcatgtggtaggatccctgctgcctgcaccggcgcccgcggctgtgccttcggcacctgcccttgccagcggcagcagcgattcgcctcgcaagcccggcgccgctggcagtgccgctctgccgtctggcaaggcggccgccggcagcagcaaggagctggaggcgcagctgccggagctgtcagagcacgacagcctgcggcgggtgatgcaccccgctgtgctgtgtgccgcctcagcagttgttgctggctgcgtgctcggtgtgggctgggccgtgggcgccggccacctctgaatgcgcttgtgcgctgccagctgcttggcatgccaactgccttccccgtttttgtttggcagcaacccctgcctggcaaaaggcggtcggtgcgggccgccccgtacttcacttttccttttgtatgcctgccgcttcattcgcagccttttcggcatctttgcagtacacgatc

SEQ ID NO: 6253 - DNA, 435 bp, Chlorella sorokiniana
  unsure (1)..(435): unsure at all n locations; Clone ID: LIB3602-088-Q6-K6-H1
cggcatcccggttcgacccagcgtttggtcccgcagcttggctgatggctggtagcggtcagggggctgcgccttgcgcttggggcgcccggncgcgggctccatgatcgagagtgcgagagcgctcaccggagcgcgggccgcctaccaccaatacccgcaggccgccgacatgtccaagatgaagaacaacgcgatcgtgggggggggggggcacttcgacaacgaaatcgacatggccggcctcatggggtggcctggcatcaagcggccgaacatcaagccccaggtggaccgcttcatcttccccgacggccacggcgtgattgtgctggctgagggccgcctgctcaacctgggctgcgccaccggccacccctcgttcgtggtgtcctgctccttcnccagccaggtgattgcgcagctggggctgtg

SEQ ID NO: 6254 - DNA, 551 bp, Chlorella sorokiniana
  Clone ID: LIB3602-088-Q6-K6-H10
cgggcgcgtgggtacgaggcggcctggccgcacagcggggcgctgctgctggccgggccggcgctgcacgcggggcttgcgcagctaactgcagcgggaggccaggctaggcaggagcggcggtagcgagcagcctgtggtgcagctgtttgccaaggatggcggccggtggcaccaaggtggcggcgggcggcagcggcggcttccgctgccccaccagcggcgtggtgtcccgctttgcacaactgctgggcgaggggcgccaccagcagctgcatgatttcaaggagcatcttgacgacatcgctctggactggctcaaccccactctgctggcggggccggcatgatgcctgctgctagcagacgcgccgcgatggtgctggcctgtagcgccgagctcagcgctcgagacagcgggcatttgtctgcagcgcactgctgctaagcagctggtcaaccgctcctgcctgttgagccaaagcgctgtgggtcgttatttgctgacgcacagcgcaatgcgattttgccggattttgtgctctcccttc

SEQ ID NO: 6255 - DNA, 191 bp, Chlorella sorokiniana
  unsure (1)..(191): unsure at all n locations; Clone ID: LIB3602-088-Q6-K6-H11
gcgcttcgnaccgtctgtcctttgttccgtgtgagtgttccttttttccccgctcctcctaccatgtgtattcttgggtcatatgttgtaacatagagttttaaaaaaaaaaaaaaaaaaaaaaaaaaaaaaaaaaaaaaaaaagacagtaaaaaaaaaaaaaaaaaaaaaaaacgcgagacgagggaggg

SEQ ID NO: 6256 - DNA, 597 bp, Chlorella sorokiniana
  unsure (1)..(597): unsure at all n locations; Clone ID: LIB3602-088-Q6-K6-H12
ngtagnttgtngaaaaaaaaaaaaaaaaaaaaaaaaaaaaaaaaaaaaaaaaaaaaaaaaaaggaggaacaaataaaaaagaacaaaataaaaaaaacgaaaaaaatacaaaaaaaaaagatattttaaaagaaacacaaaaaacaaaaaacaatacaacgaaaggggcggcgcgttttagtggggacaaacctgtggggtcccccatttgaacctccttgtttttttttcgggtgtcccaagttgagtgaacgggcccggtggcctcaccccgtgcgctctggaaaacacttggggattccgaatttgaatgggtgcggcgcttttacccttttttattgagggggttatgtgcagggggcccgcaccgtttgccctttacataggggggcccccttgggcgggcttttggccctctcttttctgggtttctaaacacggcggggggtgttttcgtttccccccttaattccgggtctcctttaagggctcttaaggcacgcttttttcggtttttttccctttttttttctggcacgaggggagggggttcccccccgtgggctttaaaccggggagcccctttttgggccccct

SEQ ID NO: 6257 - DNA, 581 bp, Chlorella sorokiniana
  Clone ID: LIB3602-088-Q6-K6-H2
gcgttcggcggcattgacagcctgcttgccgtggggcccccgctgccgcggacgggggagggcgggctgcgcggcaacgacggacagcgcactggcccatgctgttccggtgcccatgcgttgctccagtgcgccacagcccagccgccctgccaagcccttcccatttgctttgtgaccgggagggggggcacgattcctgcttttgaacccgcttgcatcgactgctgtgcgctgcccctttgaccctcaccctcgttttccaacccaaatatgctaccggccactgccgcagcgctcgccattccttgcataatccctggtatgccacccaccaagccacttgcctgctaggcagcgtcgcgccgcctgtgacccaagcacactcatttgaccatccctttctgaatggaccatgagcaccccgctctgcacagcccctccccccaccctttgcacagacttttccgttgcacagccgtgcgctctatggtgggccttgcacccctcccaggaacacaatcgagcgccacattgctcggggccgcaaggccagctgcgcaggccgggtgacaccacct

SEQ ID NO: 6258 - DNA, 582 bp, Chlorella sorokiniana
  unsure (1)..(582): unsure at all n locations; Clone ID: LIB3602-088-Q6-K6-H3
gcgttcggctccatgcagctcacatccccctggggagggcaccggnacagtatcaaatgctagtgcgtatgttgctactgtacacgcgtcatacaaaagggagcgctgaagcatgggcgggtgcgacctgtcaccccatctgcactacatgccgccggcgcgagctgttcaaggacgaggtgcgggcgctgggccggctgctgggcgtgccggagcagttcattgcgcggcaccccttccccggccccggcctggcggtgcgcatcatcggagacgtcacggagggcgatcgcctggacgtgctgcgcgaggtggacgaggtgttcatcaacgccatcaaggagtgggggctgtatgacaagatctggcaggcctttgccgtcttcctgcccgtacgctccgtgggcgtgcagggcgaccagcggacgcactcgcacgtggtcgcgctgcgtgcggtgaccagcagcgatggcatgacggcagactggtaccccttccagcccgacttcctgcgctacgtgtccaccaagatctgcaacacagtgcgcagcgtgaaccgggtggtgtatgacgtgacctcca

SEQ ID NO: 6259 - DNA, 341 bp, Chlorella sorokiniana
  unsure (1)..(341): unsure at all n locations; Clone ID: LIB3602-088-Q6-K6-H4
gcgttcgggngttcatgcgcacccaccacaagcgccccgtcagccgggacacctggaaccagctgctggagtttgtgctgaccacggcacccgacttctccaactacgacgacagcggggcctggccctacctgattgacgagtttgtggaggagatgcgcaagcagcaggacggccagcagggggggtgggcggaaacacgaagccgcaggcagcgcttgtgactctgccgcagccagccccctcccactcatggcccaccataggcaacccgccagatgcaccgaccaaccaatccttggaacacaaccagcctgctgtgatgtaatgctcaaatggcc

SEQ ID NO: 6260 - DNA, 587 bp, Chlorella sorokiniana
  unsure (1)..(587): unsure at all n locations; Clone ID: LIB3602-088-Q6-K6-H5
gcgttcgggctgggccacctctggcctgtccgccgaccccganaccttcaaaaagtaccgcaccatcgaggtcatccacgcccgctgggccatgcttggcgccctgggctgcatcttccccgagtgctggagaagtacagcggcgtgcagttcggcgaggccgtgtggttcaaggctggcgcccagatcttcgctgacggcggcctgaactacctgggcaactccggcctggtgcacgcccagtccatcgtggccaccctggtggtccaggtgctgctgatgggcgccgtggagatctaccgcgccaacggcgagggccccaacggcttcggcgagggccaggacaccctgtaccccggcggcgccttcgaccccctgggcctggctgacgaccccgacaccctggctgagctgaaggtcaaggagatcaagaacggccgcctggccatgctctccatgctgggcttcttcgtgcaggccatcgtgaccggcaagggccccctggacaaccttctgcagcatttggaggagcccggggagttcaacttctacgccctgtacgccaactccctggcgtaagcagcttg

SEQ ID NO: 6261 - DNA, 551 bp, Chlorella sorokiniana
  unsure (1)..(551): unsure at all n locations; Clone ID: LIB3602-088-Q6-K6-H6
cctgcaccccggcccgcggcgagcgcgggcgtgtgttaaacgnncgaagccgaaaaaaaaaaaaaaaaaaaaaaaaaaaaaaaaaaaaaaaaaaaaaaaaaaaaaaaaaaaaaaaaaaaaaaaaaaaaaaaaaaaaaaaataaaaaaaaattaaaatttaataaacgtatattttataaaattgtaaggtgttttttaattttaaaataatttaaaaaatttataactttggaaatacaaaattttaatctggttaaaacccttttttttactcctttttatttgggtttaaaggtttataatcccttattgttttttggctttttttgctattatactttttggtcgattggcctttttgacttatttggaacattctattttgcttttttgtaaagtgttttgtactgtgtttttaaatacattaggcagttgttttatatacaaaaagcgacagttaaatttgtttatttctttaaacgccttcttttttttttttttttccccttttttttcttgtttttttgcttttttttttccgtttttttttt

SEQ ID NO: 6262 - DNA, 510 bp, Chlorella sorokiniana
  unsure (1)..(510): unsure at all n locations; Clone ID: LIB3602-088-Q6-K6-H7
gcacggcacttctttgaactgcctaagcttggcatggcgccaagcactcaagctcccgcagccagacctgcctaccccagcgcctgagtaagccaccaagctgccgccacacatcgcctttaaacctgggcccccagtcagccacagcccctccctctgtgcgcacttcctgattcatcggcagcccaaccagccccacggttgcggcctgccaccccccaaaccaaatgcactcccctcctgatgctccgcatgctgcctcttgtttgttcgtatatttgattcgttgccacctgccatacctggacactttttcagactcagcccttacgccgtaaccctgtcaacacctcaacacanannanaaaaaaaaaaaaaaaaannnnaannnnnaaaannnaaaaaanaaaaaaaaaaaaaaaaaaaaaaaaaaaagggggggcccnttttaagggaaccaaggttacctacccctgcattgcgaagttaaaaactttttttttgggggcc

SEQ ID NO: 6263 - DNA, 435 bp, Chlorella sorokiniana
  Clone ID: LIB3602-088-Q6-K6-H8
ggctagatctagcacgcgagcggtcgccctttgtttaatagcttttttacatctttaccgtgtttcgtcttgcacggtgacttgccgcacgaggagcgctgaggcgatcatggacgagtgccgcaagggcgccacccgcgtgctgatgcaccaccgacaaatgggcgcacaacctgtgacgtgcagaagtgaaactgttataagtacgagctgaccaacacccgaggagatgctcattcaccgaatgggtcgctccacactctgctgccggaacggtgttggcatcaactttgttgaataacgacgacttgaacatcctgcgctacatcgatcagtactactcttcacagatcctgagatgcccatgaacgtgcggccacctgatctgaggcggttggtccactcctcttggtggccagccggcttgagatgcag

SEQ ID NO: 6264 - DNA, 479 bp, Chlorella sorokiniana
  unsure (1)..(479): unsure at all n locations; Clone ID: LIB3602-088-Q6-K6-H9
gcanacctgactaaccccgctcacacaggggcctgttgcaatccctgttttttccattggatctggtcccgcagacctgctggtggagcacaaccccgccatgctggacgtgccgggcctgaaggcagccatcgaggaggcccggcgcatcatgcccagcctggacgtgcagaagcagatggcgtccgacccgcagctcatctttggattccagcgcggcagccagctcatcccatatgatccgccccggccagaggaggcggaggaggcagatgatgacgagtatgcagcctattacgggagcggcgtttgatcagtcgtggctgctagggaaggcttgccagcggcacagcggcctcacacaaaaaatgctgaactgaggttgagatttcatactgcgatcatgttcttcgacttggaatccatcaaatgttctgcacgccaacaaaccggcaaacatatgttcacacgccactgcc

SEQ ID NO: 6265 - DNA, 556 bp, Chlorella sorokiniana
  unsure (1)..(556): unsure at all n locations; Clone ID: LIB3602-089-Q6-K6-A1
gctgccgccgccgggctgctgggcaagcccctgaccgccaagacgtggaggagatgctgggcaacctgggcctgcccgccgagtttgccacccactcccanatccgcggcctgtcgggcggccagaagtgaagctggtgctgggtgccgccatgtggcagcagcgcgacatcctggtgctggatgagcccaccaactacctggaccgcgagtccctgggcgccatggcctccgccatcaaggagtacggcggcggtgtggtgattgtgtcgcatcaccacgagtttgtgaaccaggtgtgccaggagaagtggaccgtgggcggcggcaagctggaggtgaccggccagtccgcggccgctctggaggccgccaagctggagtggaagcgccaggaggagaccaccgacgccttcggcaacaccatcaagatcaaggcccccaagaaggagctgtcgcgcaaggagaagaaggccaaggccaaggccaacgccgnccgccgcgcgcgcggcgaagaggtgtctgacgacgaggatgactactgaggcggcgctttg

SEQ ID NO: 6266 - DNA, 391 bp, Chlorella sorokiniana
  unsure (1)..(391): unsure at all n locations; Clone ID: LIB3602-089-Q6-K6-A10
gcgttcgggtggnaccccatctaccccggtgaggcctttgaccccctgggcctggctgacgaccccgacaccctggctgagctcaaggtgaaggagatcaagaacggccgcctcgccatggtgtccatgtttggcttcttcatccaggccattgtgaccggcaagggccccgtgcagaacctgtccgaccacctggcctccccctccaccgacaacttctactccctgtacgccaagaccctggcgtaagcggcctgcacttgctcctgcttgagcctcgactggcggcgggcgtgaccctgtggcagtgcgctcccgcttgcgcccgctgcctgacttgacttcagctccactgttgcaccgaggggatggtgtaacatgtatgctgggg

SEQ ID NO: 6267 - DNA, 428 bp, Chlorella sorokiniana
  unsure (1)..(428): unsure at all n locations; Clone ID: LIB3602-089-Q6-K6-A11
gcgtttgcctgcatccagnacatcaacaccgccacgctcacggcgtcccagtgcaagcgcgcggccacgcagcagctgcacgacagcaagatcagcttcccgctggcgcgcaaggtgctgcgcccctcgtcccgcaagttccgcaccaccttcaaggcggtgcgccccaacgtggccatctactgggggcgtcgccccaaggcggctcgcggccacactggcggcagcagcggcggcggcggcgacccagcttgtgctctggagcggcgccgctgaggaggagaaggctgcccggccggcgggcggccgccgcaggagtgcgcggcggcgccgcaggcggcagccggggggcggcggcagtgcgccccgcccccgccctgtagcccggttgggtgcaaggctgcaggcgcgtgtaaacacccgctagc

SEQ ID NO: 6268 - DNA, 450 bp, Chlorella sorokiniana
  Clone ID: LIB3602-089-Q6-K6-A12
ctcgcggtctcggcgctgggcctcaccaacccactcaaggtcaccccggggtttgtgatccagattggctacaagctcgtcttcctgttcactgtcgttgcgcctctcgtacctgaagggtcgctgggccgccctcccggctgtgcagaccatcattttccaagccttcctggtcccgctgtttgcgctcactccctggacctacctgctgggctcgagcgccactgctggtgccaacagagacaagtggagcgcaaacaaagccgagtgacgcagcaaggtgcacacaagactaagacattatgcaaagttcacagaccaagcccttattgcagctgccatatcccaccgaatacattggcacagcaagccgcatctgcatgtcgactgtcacgattcttgaacagcaactacttacaggaataatagcggaagatagtacaaattgca

SEQ ID NO: 6269 - DNA, 420 bp, Chlorella sorokiniana
  unsure (1)..(420): unsure at all n locations; Clone ID: LIB3602-089-Q6-K6-A2
cccgggtcgaccccgcgttcgcgtcccctcacattcgttcgcccggggggggctgcattcatttggttctgtccccccccctcctccccccacacaccccgttgtctgtactgctgctgccccctgcctaaccaacgaacgcccgacggcgtgcggtggcggcgtgggcgcggcatcccgccgctccnctcctgggggagaggggggtcccccaccccaccccncacttggtagcacttttgggggggcagcggcgggcgtgccctgcctgctcggtttcccagcccgctcccactgcccaaattttttgcaccgcttgtagcatcgcccggccgcgctccacaccactcagctcggcaggcgcggcanggcgcgtggcggcgtgtgcgactgttcctcagatctgtgaatccctcatcg

SEQ ID NO: 6270 - DNA, 511 bp, Chlorella sorokiniana
  unsure (1)..(511): unsure at all n locations; Clone ID: LIB3602-089-Q6-K6-A3
gcgttcggcagnaagccgcccccaaggcgaccgggggggccctgccccgtgtggccaaggccctgggtgccggtgtggcctccctggccctggcgctgagcgccaacgccgccactgtgaagctgggcgctgacaacggcgcgctggtgttcgacccctccaacatcaccatctccaagggggggggggtgacctttgtgaacaacgccggcttcccccacaacatcgtgttcgatgaggacgatgtgccctctggcgtgaacgccgaggcgatcagccgcgaggactacctgaacgcccccggcgaggagttcaccgtcaagctggacaccgctggcgagtacggcttctactgcgagccccaccagggcgccggcatggtcggccgcatcaccgtgaactgagcgcagcatgctcagcgccgcggcgtgcactgacccatttttgaagcacttgctgtctctcttcggttgactggcctctattcagggtgtaacgctacacacgcaaa

SEQ ID NO: 6271 - DNA, 568 bp, Chlorella sorokiniana
  unsure (1)..(568): unsure at all n locations; Clone ID: LIB3602-089-Q6-K6-A4
gcgttcggnacgctggtgctgcgcccgctggggcccgcgcccatgcaggccctggcgcgcgacttcatggtcaagacgcggcggcgcaagggcatgacggacgacgtgtccatcaacaagcactttgacgaccccatgctgctggagctggcgcggcaggacgcagacctgcagcaaatcctgtgagccagaccttgttgagctgctctcattgctgaggcggacctgtctgagctgctctctctctggccagctggcgaggcccccagggcctgcatagctgcctgcgcagcgcgcggctggcagccgcagcagctgcacaggcggccgcaggccagcgcgcagggttgctgcgaggttttgcggctgtgccggccatgcggtggcgccaccgctgcttcggcgggcacttggtcccaagccagccgctggcaggagccaaatgggccgtcttgccctctagattctgttttcatctcctctgctccatctgtccttgcttccatgcgtcttgcttcccctctcggttgccgcctggttagtcaaccctggcgccagcggccgctct

SEQ ID NO: 6272 - DNA, 246 bp, Chlorella sorokiniana
  unsure (1)..(246): unsure at all n locations; Clone ID: LIB3602-089-Q6-K6-A5
aactgnnccgcaagaaagaaagnntgcggccanncacctcnngcagctgcgccccccaagaaagaaannactcaagtaaactannctcgcttcggcaccgagccggaagcggcatgaagcggcagcaanccgctgccccccccccgccccgccagccgggatgccatgacagcaccggctgctcagctgctgatgtgctgcatgtcaattgctgctgcggaaatgtaacggtggtagcgatcanna

SEQ ID NO: 6273 - DNA, 610 bp, Chlorella sorokiniana
  Clone ID: LIB3602-089-Q6-K6-A6
ccacgccgtccgcgctataaaaataaaaacaaaataaagaaagcaataaaagaactgaaacgaaaaacacaaaaaaaaataaaaaacacactgaaaaaaaaaagaataaataggaaaaaacaattacattgaacacacgaataataacagaaacataagacacgcggggctgccctgttctggtgtttgcatgtttcccctctattggtggaccgatgcctgcttttttaaggggtccgacctgtacaataaaggggccgggttttaaaaccgtgggaaggggaaaaccctggggttccccaatttaaatcccttggaaaaaaacccctttttcccaaggggggttttttctaaagggcccaacctttattcccctttcccaaaaattggcctaacctttttttgggggggggccccccccttttccgggccctttattccccagggttggggggttaaaccccaggggccccctaacttttcccgctcccttaaccccccctttttgccttttttcccttttttttttggcccttttccgggtttttccccaaaaattttaaaaggggggtttccttttggggccccctttaagggtttacagaaccct

SEQ ID NO: 6274 - DNA, 239 bp, Chlorella sorokiniana
  unsure (1)..(239): unsure at all n locations; Clone ID: LIB3602-089-Q6-K6-A7
gnaatgagagcaccaatatcgcgcacccagcaatgagcagggctggtcaacatgccaataagaacacacaaaactttgccatccggcctccccaaacgtggagttttggtccgtctttcagtttcggttttcttgcaaaaggcagtagcagtgcttttgctacaggtggatattttgggcaatgtgccggctcaagctgagcacggggcaaagcatcaaactgtgacacgcaacacgtc

SEQ ID NO: 6275 - DNA, 313 bp, Chlorella sorokiniana
  Clone ID: LIB3602-089-Q6-K6-A8
ctttgccagcctcgacgagtactgcagcatcatgagggcatgttgggctcaggatcctggcgagcggcccacattctcagatgtggcgccccgcctgcgtgccctgcttgatgcgctgccggagtgaccgccgctggccgcatgactgacatgaacatccggcgagcagcagatgccgttttatatgctgtatcaagcagatctgcaagagaaagtcgcaaaaaaaaaaaaaaaaaaaaaaaaaaaaaaaaaaaaaaaaaaaaaaaaaaaaaaaaaaaaaaaaaaaaaaaaaaaaggggcggccggttttaaa

SEQ ID NO: 6276 - DNA, 563 bp, Chlorella sorokiniana
  Clone ID: LIB3602-089-Q6-K6-A9
ggcaagaacatcaccctcgagtggagtcaagcgataccattgagaacgtgaaggccaagatccaggacaaggagggcatcccccctgaccagcagcgcctgatcttcgcgggcaagcagctggaggacggccgcacgctcgccgactacaacatccagaaggagtccacgctgcacctggtgctgcgcctgcgcggcggcatgcagatctttgtcaagacgctgacgggcaagaccatcacgctggaggtggagtcgagcgacacgatcgagaacgtgaaggccaagatccaggacaaggagggcatcccccctgaccagcagcgcctcatctttgccggcaagcagctggaggatggccgcaccctggccgactacaacatccagaaggagtccacgctgcacctggtgctgcgcctgcgcggcggcaactaggcggctggggcacccacccacctgccttcacacccatcgtgtgcggtaggagcggcgcgcgcgtgcacatgtagcatcctgccctgtaccctcaccctctgtaccccacccctgtaaccgccgcgctct

SEQ ID NO: 6277 - DNA, 519 bp, Chlorella sorokiniana
  unsure (1)..(519): unsure at all n locations; Clone ID: LIB3602-089-Q6-K6-B11
cccgggtcgnacccacgccgttccgctccctgtnaccccgngcggctctcttcgacccccctgggtctnnggctgacgaccccgacacnncctggctgagctgaaggggtgaaggaaatcaagnnaacggccgcnnctcgccatnngttctccatnngttcggcttnncttcgtgcagnnggcctggtgnnnaccggcannagtcccccctggnaaaacnnctggctgaccacgcttgcgtgagnnccgtctgtgaaacaaacggctnntcgcgtcccgccaaaccaagtgtcctgccnncctggcctnngaacgccnngtcgtcaaacctggnagnncgacctggnngcatcccaatatnntaacggcnnggccagccccggttttggaccaagcacnnacacaacatatgagaaattcccaacctccnnctgcgcactgcttgtaacaantcctggcttcccttcttgtacccttgacccgcactcggngcgtggatatnngtaacgttccgcggng

SEQ ID NO: 6278 - DNA, 567 bp, Chlorella sorokiniana
  Clone ID: LIB3602-089-Q6-K6-B12
gccagcgggggtgtgagcagagcggtggcccagcaggcagcaaccaggacagcacctcagcagcagcagcgccgcatgcggcggggccatcaccagcggccgctgccccgcggctgcacggcgccaaggggcggttgtgttccagcgctactaccacctgtttgagcggggggagctggaggggctggtggcgcgcctgcccggcgctgcgctggttgactcgttttacgacaaggataactggtgtgccgtgtttgagcgggttgtgtaacgcgacgcttgaaaaaaaaaaaaaaaaaaaaaaaaaaaaaaaaaaaaaaaaaaaaaaaaaaaaaaaaaaaaaaaaaaaaaaaaaaaaaaaaaaaaaaaaaaaaaaaaaaaaaaaaaaaaaaaaggggggggccctttttaagaggacccaattttacaaccccgggcttgccaaaactaaagtcttttttttggggccccctaaatttaaattcattgggccggggtttaaaaacgtcgggacgggaaaaaaccctgggtttccccaattaaatgcctttgaaaaaaatccccttt

SEQ ID NO: 6279 - DNA, 533 bp, Chlorella sorokiniana
  unsure (1)..(533): unsure at all n locations; Clone ID: LIB3602-089-Q6-K6-B2
accgccaccctgcccaanaacggatgggtggtgctgcgctttgtggcagacaatccggggctctggatttatcactgccaccttctctggcatgaatatatgggcatgctgttcgtgctggcagaggctgtggacgagctgggggcgcgccccaagggcctgccggcctgccccaagacttgcatgcagaatgccgccccctggagcaagccgtttgtccaggagaagttcggcaagagcgggttcgagctgccctgagcggctagcttgtgcggtggtatgctgctgccaaagcaaggtgcacacaacctgccgcagagacgagtcgagcctcatgtccgccacactgtattgcgcaagatgtcaacatgtccttgtgcacctgctcaaaaaccttcttttacctgtcgccatgactttcattagtcgtgccacctgcctgctgcaaactgttttttccccggcagatcagaccatgccacttttcctgcgatgcaagctccccctatcctgtcgcattactgctgtctgca

SEQ ID NO: 6280 - DNA, 579 bp, Chlorella sorokiniana
  Clone ID: LIB3602-089-Q6-K6-B4
gcgttcggtcagcagcctccagcctgcagcgctgggccggcgcccctttccccgtagagcaacccgggctgcacctgccggtccgagggcgtgagcttggggccacacagccacctgctagctgattattacctgctttgagtcggtctaccgctccacacccaccaagctgaagctgctggaggcgggggaggtctgctcgctgttcagggactcctgctgctggtgtacgcacaagctggtgggcacctttcccttgactcctttcttgccggcttcttctgctgcgtccgctcgtttgtgctcaccgccaggctgcgtatgaaggtcagccagggcggtagcgcctgcgggccgcgtgaatttggcggcttctcactcgcgatgctgacactctgcatcgtggcttgcaactacggggggtgagcataatcgaattgctttcggctcagcgggccgccaggcacctatggtgggaccctggtgctgctttcttttttgtgcgcgttcgcttgttgcttccctctgctgccgctcaatgctccctgctgaccgtgtccccaccttttccgaactgcc

SEQ ID NO: 6281 - DNA, 564 bp, Chlorella sorokiniana
  unsure (1)..(564): unsure at all n locations; Clone ID: LIB3602-089-Q6-K6-B5
cgacctcaagccggtggccgcaacaagcgggtgcaccgcaccgctcccaanagcgagaacccctatgtcaagctgctggtgaagctgtaccgcttcctggtgcgccgcaccgagagcgacttcaacaaggtggtgctcaagcggctgttcatgtccaagaccaaccgcccgcccctctcgctgtccaagctcgccaagttcatggccggcaaggacggcaagattgcggtgctggtcggcaccatcaccgacgacgtgcggctgtttgaggtgcccaagctgcgcgtgtgcgcgctgcgcgtcaccgagaccgctcgcgcccgcatcctcaaggctggcggcgagatcatgaccttcgatcagctggcgctggtggcgcccaccggcagcaactgcgtgctgctgcgcggccccaagaacagccgcgaggccgtcaagcacttcggccccgcacccggtgtgcccggctcccacgccaagccgtacgtgcgcagcaagggccgcaagtttgagcgcgcccgcggccgccggaagagcaagggctacaaggcgtaagcgccccca

SEQ ID NO: 6282 - DNA, 581 bp, Chlorella sorokiniana
  unsure (1)..(581): unsure at all n locations; Clone ID: LIB3602-089-Q6-K6-B6
gcggtgagggctgacagnacgccaccatgcggcagctcatttcttctcggaccctcgtcatccccgatgaggtgtctatcgaggtcaaggcgcggcgggttcgcgtgaagggccctcgcggcacgctgcagcgcgacttcaagcacctggctgtggacatgttcctgactgaggaggagggcaagaaggtgctcaaggtggactgccactttggcaagcgcaagagcctggcgtccatccgcacctgcacctcgcacgtgcagaacatgatcaccggcgtgaccaagggctacgagtacaagatgcgcctggtgtacgcccatttccccatcaacatcaacatcgagaacaagggcggcaaggtggagatccgcaacttcctgggcgagaagattgtgcgcgtggtggacatgctgccgggcgtgacctgcgagcgcagcgccgccgtcaaggacgagctgatcctgaccggcaacgacatcgagctggtgtcccgcagcagcgcgctgatccaccagaagtgcctggtgaagaagaaggacatccgcaagttcctggacggcatctacctcagcgagcgc

SEQ ID NO: 6283 - DNA, 491 bp, Chlorella sorokiniana
  unsure (1)..(491): unsure at all n locations; Clone ID: LIB3602-089-Q6-K6-B7
cggccgcgtgggcgggcggccctccctcccagcagatgggtgcgggcgcgtctggcatggcagcgcaggccggcccccccgccatctccaccgaagcgcccaagctctcccgcatctctaccgagtatggcgaggtggaggggcagcccttcatctcagggctgggcatgaagcgcggcccgctgtcgccccgcgctcaggccgtcaaggaccgcctggctcgggagctggaggagtccacccgcgtcattggctagccgctcacaagtatgtacaataagcggcaagcagctgcaatatgaaccagctatgagccagtgcgcctgcgcggcaagcccagcagcaccactgcaactgcgccgacggcatgcgacgataaacaagcgacaccaagccccccacggttgatgtatgccctgtatgaacccgtgaacacgtaatgtacccctcagttgccctgatgaactcaacatgtaacaacgcatgccana

SEQ ID NO: 6284 - DNA, 499 bp, Chlorella sorokiniana
  unsure (1)..(499): unsure at all n locations; Clone ID: LIB3602-089-Q6-K6-B9
ggcgggcgcggtgcagcaggagtgcgggctgcccatcacccccgaaggtttgtgaccagcaccctcagtttgggctgaccgaggtggtgtaccagtgggcgcgcggcacgcccttcaaggacatttgcgggctgacagacgtgatggagggcagcattgtgcgggccatggtgcgcctggacgagacgtgcagggagttccgggatgctgcgcgcgtcatgggcaacactgccctgttccagcagatggagaaggcgtcttccgccatcaagcgggacgtcatcttcgccgcctccctctacgtggcgtgagtgtggcagaaagtgcagcggcagctttgagcattagcagaggtatcctgttcatgtctgctgcggaacattgtaaaacaacttangaaaaaaaaaaaaaaaaaaaaaaaaaaaaaaaaaaaaaaaaaaaaaaaaaaaaaaaaaaaaaaaaaaaaaaaaaaaaaaaaanaggggcgggccgttttaaa

SEQ ID NO: 6285 - DNA, 574 bp, Chlorella sorokiniana
  unsure (1)..(574): unsure at all n locations; Clone ID: LIB3602-089-Q6-K6-C10
gcgttcggccgtgnagcagccggggtgtgccccctcaggccgccgccgcgagtggccactcgtctgccgtgctggcgctggtggcggcgggggccacgctgtcgctgctgccgccacagctgctgcagcgcgccatgcagctgctgggccacgggtgcaaggccctcaacagctgggccacggggccctttgcccagcaggcggcgtgctgactgcagcgcggcaggcccaagcctcgtgcaacgtttcatttgtacagcaaagtcccaccttaagcagcttccctggacacatgctgcccaacgaccgaacccttccctactgcatgcataatgatggattttctttctttcatgagcgcgcatggttgtccatgcaagctgccctgcgccttttccacaccgcccctgcctcccaagtatgtttcgcttgccacctacactcacacctggcctttttactgccttgccgtgacagcagtgcattctgcttgcactcttgtcggcaatcgcacggccgcctctgcccacccttgccctgtacatagtgcaccatttccacctcttctccacaa

SEQ ID NO: 6286 - DNA, 607 bp, Chlorella sorokiniana
  unsure (1)..(607): unsure at all n locations; Clone ID: LIB3602-089-Q6-K6-C11
ccgggtcgnacccacgccgttctgcgcagnaaaatcgagtgggaaggaggtgnccttgcccagnagggnaagggcagaccgcaaggatgcgtgggctacgctcagtaagctgcagggnngctgccgctcccctggnccccctnnttcctctgcattagcttagcaaggcacagccccaagctgtcgcccgcaataaagcgcccgtccgtgccgcgatctgtgcgcgcccccagtcagcgccaacccctttcagttcctttttcctttcatttgcccccgccccaatgcatgcctgtctcctcctcgctacccgcccacccgcccacagagtgctgctctgactagtttgctgctgctacggggtaggccccgcgcagccctctgctagctttgctcgtatccgccccgccatcactgattccctgcctgcactgctatcaagcaacgcgcccctgctgccactgctgtatagcgtcgcacctctgccatcccctgatccctgcccatgcctccactccccatccgatactgccatacgtgacgtgttactgccacagcaccatgcatactgcccatcccctacctctattctgttcatcctgcaccc

SEQ ID NO: 6287 - DNA, 519 bp, Chlorella sorokiniana
  Clone ID: LIB3602-089-Q6-K6-C12
gcgttcgctagcctgtgacccctgctggcaggagaggacatcaacgctgcaggcaccatacacgaccctgtaaggctttgatagcgtgagcggtcagactggcaagcccgaagtggacgacctgactgtccgctccaacgaggagcacattatccacctgtgctggtccccgtgaacacagaggacgagactgtcaacctgttcggcaagcccaccgaccatgtacacctacgcctggaagcacactgaagtctcttggaaattgccataggtgagggcaccatcctggaagcgctccgcaacctcaaccacggtttcaataacctctacctcatccacacctgcaccgagattaagcagtatgacaacttagctaaccaggtcacgtgagcttgacccgcgcaccacagtgtgtgatcagtgtgtggtactcaataagatcgtgatgatgctccaacctctcagcatggccgcaccattatgcggactgtgcggctgcaccgcaaacacatggaatgc

SEQ ID NO: 6288 - DNA, 395 bp, Chlorella sorokiniana
  Clone ID: LIB3602-089-Q6-K6-C2
gcgttcggccctgctggcccgcctgtgcgccctgggggccggcatgccggcggtgcaggcgcagctgcgcgccacgcacccagacctggccaaccgaaacttagactgaccgagtgttgctgcttggtggtgtcctacactgctgtgttggccgcagttctgttgcgttatatatacatgagggggggcgggtcgttactacccatgactggcctgcttctgcccatctccaccccactctgcttgccatcgtgcctgcttcacccactgcctgccagcgccatgcgacttgccaccactgccagcttgctgccaccccgccttgacacttgtcatttgaacgcctctgttgcgatgagggatttacagatctgaggaacagtcgcacacgcccc

SEQ ID NO: 6289 - DNA, 565 bp, Chlorella sorokiniana
  Clone ID: LIB3602-089-Q6-K6-C4
cccgggtcgagttcaccttccccaagcgcagttcgaggtcgatgttgcctccgggtcggatgccctcatcgccaccaccgccgggcggggcgggcgggggcgcgggcgcgggcgtggcaggggcgggcggggcgggcggggccgcggcggccgcggcacgcctgccgtgtctgcgggtgcgggcgacgcggcggctgccctggggctgggagtcggcaagaagaagcggaggggcaagaagggcaaggcggttgggctggtggagaagagtgcgctcgctaaggagttcgaaaagtctgactccgagaagcactatggcagcgacctggagggcgatgaggaggaggagggagacgagtttgcctcctccctgccccctgccaccaccgccggcagcatggatgccactggagatgcggcggtctctggccccgcctccacagctggcgatgatgatgagccgctgtcaggcgacgaggcgatcagcagcgaagaggagtaagccactgctgagcagctggcaatctcacgcaccctgcatgtgctagcggcagctggcgctgcg

SEQ ID NO: 6290 - DNA, 571 bp, Chlorella sorokiniana
  Clone ID: LIB3602-089-Q6-K6-C6
ataggtccaagctcggcgtgggggcaccagcagcgcgccacctgggtcgcatgcacagcaatggcaagggcaagagccgctcggctctgccctacaagcgcagccccccctcctggctgaagatcacccccggcgaggtgtctgacaccatcgccaagatggccaagaagggcatgaccccctcccagatcggcgtgatcctgcgcgacagccacggcatcgcccaggtcaagtccgtgaccggctccaagatcctgcgcatcctcaagggccagggcctggcccccgagctgcccgaggatctgtaccacctcatcaagaaggcggtggccatgcgcaagcacctggaggccaaccgcaaggacaaggacggcaagttccacctgattctggtggagtcccgcatccaccgcctggctcggtactacaagcgtaccaaaaagctgccgcccaactggaagtacgagtccgccaccgcctccgcgctggtgcagggctgagcgctcgcctcgcgcgtgagctgacggctgcagccacggctatctccaactggtgtgccagcaggcatcac

SEQ ID NO: 6291 - DNA, 332 bp, Chlorella sorokiniana
  unsure (1)..(332): unsure at all n locations; Clone ID: LIB3602-089-Q6-K6-C7
cggncgcgtggngaaaaaaaaaaaaaaaaagaaaaaaaaaaaaaaaaaaaaaaaaaaaaaaaaaaaaaaaaaaaaaaaaaaaaaaaaaaaaaaaaaaaaaatattaaaaaaaaaaaaaattaaaaaagggctgacctttttgggggttccctttttttgtgttccctcctttccgccgttttgtttttttgttggggggcttttaatttgggttccccttaccttcttttttttcgccgtttgtttttctttctacccttttggttttcccccttggtttggcctttttttatttgcccttttgccctatcctctttttcctccgggtgggg

SEQ ID NO: 6292 - DNA, 138 bp, Chlorella sorokiniana
  Clone ID: LIB3602-089-Q6-K6-C8
gccagcactgcacctgcctggcggcggcttgggagggcgtgcagcgcatgcagcgtgcaccgccgcggccctcccgatagtttaggaccccacaaccagctccctctgctcccactactgatgtaacacgcaactgcc

SEQ ID NO: 6293 - DNA, 593 bp, Chlorella sorokiniana
  unsure (1)..(593): unsure at all n locations; Clone ID: LIB3602-089-Q6-K6-C9
cgnaaagcccttgctccggcgcggcccagcggcgcttgctttcatgcagcggttctgccgcagcgcgtcacacggcgggcgctggcgcgcagtttgcacccttcttagtttgtgcccagctgcccctggcgctgcgcggccgctgtaagtaggacccctngaaaaaaaaaaaaaaaaaaaaaaaaaaaaaaaaaaaaaaaaaaaaaaaaaaaaaaaaaaaaaaaaaaaaaaaaaaaaaaaaaaaaagaaaaaaaaataaaaaaaaaaaaaaaattaaataaaacatacataaaaaaaaaaaaaatttttaaatagggaaaacaaaaattaaatccactgtccttgaatttaacaaaattttaaactgggaaaaaccctggcttaaacccaatttatatcggttgaaaaaaatttcccctttagccagttggtttaaaaggaaaaaggcaaaaacactcggcctttccaaaaaattgcgaatcttgaatagcaaatgttacccgccttgtataaactaataaaagccgtagaatttggtctttacacaaagttggccccttttatttgcaaaggccctaccccccgctcttttc

SEQ ID NO: 6294 - DNA, 456 bp, Chlorella sorokiniana
  unsure (1)..(456): unsure at all n locations; Clone ID: LIB3602-089-Q6-K6-D1
gcgttcgccgncctgttngaactttcagtctcggaggaccccgcttcagccccatttcgcatagctgtgccctccagcctgcatgcccttcttttgtgcaccaagacccttccgaaactcaagcaacaccactgaaacgctccctcgagtgtgctatcacctaccatctgccacatcctgcattacaggcctgcttaccaatcctgcttgcttgctcaacgctgcctgccttctggtgccagtggccgtgtacagtgcggcctgcccgctggccgagtgttgcctttcacaccaccaactccctgcctgtcgctccatccctttttccgtaatacctcaaatggcacaagtcttccttttgttgaaacctgtgacctcnnnnnaaaaaannaaaaannnaaannnnaaannnnnnaaaaaaaaaaaaaaaaaaaaaaaaagggcggccggttttag

SEQ ID NO: 6295 - DNA, 484 bp, Chlorella sorokiniana
  Clone ID: LIB3602-089-Q6-K6-D10
taaaaaaaaaaaaaagaacaaaacaaatatagaagaaaccaaaaaaaaaaaacaaaaaacaaaaaaaaaaaaaaaaaaaaaaaataaaaaaaaaaaaaaaaaaaaaaaaaaaaaaaaaaaaaaggcggcgccttttttgggaacccccttttgttacccctcttattcgccttgctgctctttttttgggggcccgctgttttattcccggggcggccttttccaatcgccctttcgggcaaacccctcggccttcccggcttatgggacttgccctgtatcccccctttaaccgcgggggttatggcggataggccccgcccgaccgctcctctcccccgttccctagccctcgttgctttgggtccctccccttgctttgtccctttatgccccgggtttgcggggtttccccccatcgggccctttccttttgggctcccccttagggcccgttcctttcctttttttcctttcttttttc

SEQ ID NO: 6296 - DNA, 99 bp, Chlorella sorokiniana
  Clone ID: LIB3602-089-Q6-K6-D2
aaaaaaaaaaaaaaaaaaaagggggggggggggggggggagaaaaaaaaaaaaaaagagagacggaacgatataaaggaacacaaagctaacgtacgca

SEQ ID NO: 6297 - DNA, 574 bp, Chlorella sorokiniana
  unsure (1)..(574): unsure at all n locations; Clone ID: LIB3602-089-Q6-K6-D3
cttctacgtacgcagnatggttccgacgggcagcgacgagcacatcgcaaccgcccgctggtttggtgcagcgctggcgtgtgacgccgccaccaccctgtctgtggggctgtctgagggcagccaggatgccaagcgcaacgcactgcgcgcaaacggcctgtgctgggtggcctgggggggcatgcacctctacaacgccggcgctggtgtgcagaagaaggaggttgcctactcgtccgctgcgctggcaggcgtgctgggggcgctgtgcctgtggcgcggcttccgcaacaacgatgacgatgccaaggagctgtgagcttcaacacaatttctgacaccttttgtgtttgatgcgttgcacaactgatgggaacaatgagcaggacgcccaggcatgtggagacgggggctaaagggcagttgggggatgccgagctgcagcaggaggcagctggcggacagcaaacagcctgactctgaatgatttttgtgcacagcagggacgaggcgcttgtgcatcgccctgccctggcacacgctcctgacgtccttttggctttgatccgtt

SEQ ID NO: 6298 - DNA, 460 bp, Chlorella sorokiniana
  unsure (1)..(460): unsure at all n locations; Clone ID: LIB3602-089-Q6-K6-D4
aaaaaaaaaaggggagagaaaaaaaaaaaaaaaaaaaaaaaaaaaaaaaaaaaaaaaaaaaaaaaaaaaaaaaaaaaaaaaatatataaaaaaaaaaatatatatataaaaaatatttaaatataaaataattaaatattttttttttttttttttaaattctttttaatttctttttgttgggggggtgggtcttgctgtttaaccccttgtttttttattttttttggtgggggtttgttccttatgttcctttttctcccgttggtggtcttggcttgtttggtcttgactggttttttcttcccatcggtttggctcttggtgtttgtgcttttggggttcttttttttttcctgtttttttgggtggttctgttgtntttggttctttttcattttgccttttttttttttgtccgtctttttttttgttttcttcttttttcgttttttttctc

SEQ ID NO: 6299 - DNA, 268 bp, Chlorella sorokiniana
  Clone ID: LIB3602-089-Q6-K6-D5
gggggggcccgccttgcacccgtcccccctttgggccagccgggggttatcccccggtgggcccgccctcgtgcgccctttcccttcagttgcgccggcctgtatggcgttgtgggcccgccccctgtcgccgttgccttacagcgcggtgggttgtggtggttacttggcggggggccccgtttcacttcgcttgcgccctcgtggcccgttgccttttcgctcttcttcccttccctttttttgcccccgttccgccgtgttttcc

SEQ ID NO: 6300 - DNA, 222 bp, Chlorella sorokiniana
  Clone ID: LIB3602-089-Q6-K6-D6
aaccccccttttacgggccctttaaccgcggggggtggggggtttccccccagggtacccgttacttttgccagccccttagcccccgttcttttggtttttttcctttcttttttccccactttcgccggttttccccgtaaagttttaaatggggggctccttttagggtcccatttaagggttttagggaccttgaccccaaaaaatttgtttgggggg

SEQ ID NO: 6301 - DNA, 566 bp, Chlorella sorokiniana
  Clone ID: LIB3602-089-Q6-K6-D7
gtgatgaagacatgcccgtgcagaagcagacccgtgccggtcagcgcacccgcttcaaggcgtttgtggtggtgggcgactacaacggccactgcggcctgggcgtgaagtgcgccaaggaggtggccaccgccatccgcggcgccatcatcctggccaagatggccactgtgccggtgcgccgcggctactggggtaacaagatcggcaaggtgcacaccgtgcccaccaaggtcaccggcgagtgcggcagcgtgaccgtgcggctgatccccgccccccgcggtgccggcattgtggcggcccgcacccccaagaaggtgctgcagatggctggcattgaggactgctacacctgctcccgcggctccacccgcaccctgggcaactttgtgaaggccaccttctacgccctggccaacacctacggcttcctcacccccgacctctggcgcgagaccgtgttcaccaagagcccgctgcaggagtactccgacttcctggccaagccggtggttggcaaggcctactgagcggccttcccatgcccgccgccccgcgcgccg

SEQ ID NO: 6302 - DNA, 507 bp, Chlorella sorokiniana
  unsure (1)..(507): unsure at all n locations; Clone ID: LIB3602-089-Q6-K6-D8
gcacggcacttctttgaagctgcctaagcttggcatggcgccaagcactcaagctcccgcagccagacctgcctaccccagcgcctgagtaagccaccaagctgccgccacacatcgcctttaaacctgggcccccagtcagccacagcccctccctctgtgcgcacttcctgattcatcggcagcccaaccagccccacggttgcggcctgccaccccccaaaccaaatgcactcccctcctgatgctccgcatgctgcctcttgtttgttcgtatatttgattcgttgccacctgccatacctggacactttttcagactcagcccttacgccgtaaccctgtcaacacctcancacanaaaaaaaaaaaaaaaaaaaaaaaaaaaaaaaaaaaaaaaaaaaaaaaaaaaaaaaaaaaaaaaaaaaaaaaaaaagggcgggccccttttaaagaaaccaaacttacctaccccggcatggcgaaggaaaaattttttttttgggg

SEQ ID NO: 6303 - DNA, 577 bp, Chlorella sorokiniana
  Clone ID: LIB3602-089-Q6-K6-D9
tggatctcgcaccggttcgaccggagacccctgctggcggacaagagccacctgtgggacgcgccggagccgccccagcccgccgacgtcagcggagagatggacctgatggcggatgccgaggacgtgcctgcccagaagcaccagaagatgggagcttgagcagcagcgcacggcggcggcgagcagcagcctccgccaagcagtggagcaactgctagcgcagcatgctgctgcacagccggtagcacggcccaggctgcgttgaccagctaccaagcactgccgctgatgcggcagccccctatgaacacagcagttgatggcgcagcatgagccctgcagttgcgattttccctccgcttcttgccactgcttgcatgaatgaacgaacgtgtttttgaatgtttgatgaacagcgctggacgcacagccccgcccatgaactcttttcagatgcctgccccggcccaatgcacccagcacacatgatacaaatatgccagccctacgcttttcctgccatactttcttccttgtagcgctgcctcttctccgctcgccctggtttcatggg

SEQ ID NO: 6304 - DNA, 361 bp, Chlorella sorokiniana
  Clone ID: LIB3602-089-Q6-K6-E1
ttcgacggctgacgtatgcgctgggcggcacccgcaagtacgagctgcccaccagcgaggtcacgctgccagtggtgtttgatgccatggcggccgccaagcagcagctgacggtgctggactgggccgtcgcaaacgccacgctcgaagaggtgtttattcagttggcgcgctccatggacgctggatgccaacctacactgactgaactagcagcacgggccgaggcttccatcggcaccagcacgaggcatcccagccgtgcgaccgcgccacaccgccttgcggcgggcgcaccctgcccctgtattttgtctgacaccctcctgactctcatttcatctgtgactgttttctgctc

SEQ ID NO: 6305 - DNA, 423 bp, Chlorella sorokiniana
  Clone ID: LIB3602-089-Q6-K6-E10
gcgttcggcaccggccagccttctctctcctcgaacctttgttccactgacaccgcacagcagcagccctttgatccaccttcccttttagttgctagattgtagcaggacgttcgctccctgaatcctgcctgcaccacccttctctgggcctccgcattggtgagcgccccggcttgctgggggttttgttgcagcacccggcagcgatgccccccgtgctttcaactggtctcaactggaacacactgtgcgcaaatgcatgccgcaccaagctctgtcatttttcctgatcgctgtccaccccaaatgcacccctgttacgtcggcagatgccccttgttaagtccccccctgttcataatattagagcgacgtccctgttggttttgttggtccggtgtaacgcactgctccccaaaa

SEQ ID NO: 6306 - DNA, 583 bp, Chlorella sorokiniana
  Clone ID: LIB3602-089-Q6-K6-E11
ccgggtcgacccagcgttcgttctttgtgctttttgtgtgctcctccctgtagccccctctcgctctgcagcttcccacccgtcacagcattctagtctttcattttgctcgccgcagcgttgcgcattgtgatgctgcgccaaaaaaaaaaaaaaaaaaaaaaaaaaaaaaaaaaaaaaaaaaaaaaaaaaaaaaagaagggggggaaaaaaaaaaaaaaaaaaaaaaaaaaaaaaaaaaaaaaaaaaaaaaaaaaaaaaaaaaaaaaaaaaaaaaaaaaaaaaaaaaagggggggccctttttaaaagaaccaaattttaccaccccgggctgccaaacgaaaaagcttttttttaggggcccccaaaaataaaataacggggccgggttttaaaaccgtggggaggggaaaaccctggggttccccaaattaaatcctttggaaaaaaatccccttttgccacgtggggtaaaaaccaaaaaggccccccccgaccccctttccaaaattttcccccccctaagtggaaaagggacccccccttttgggggcccttaaaccgcgggggggggggggtttc

SEQ ID NO: 6307 - DNA, 491 bp, Chlorella sorokiniana
  Clone ID: LIB3602-089-Q6-K6-E12
gcgttcgcgctggcccagctgctgagtgccgagggacggccatatcggaggcagccgtccttcccgccaggaccgcgctgagcatgctgcgcacgctgcgcgtgtgtggcaagcgtggcgcacagcgcggcgccaacgaacgatatacgttgcgttttacgctttgagagccaatgagagcgagagtgactgcctgtgatgagccatcagtgggactgccttgtggtcccgtgcgcttgcttattcccagcactgtgccctacccacattgactacccgcttgccctctgcatgcacccgtttgccaacgcacgacccccagtcggccgctgggcggtgcatgttgcgccccaagcttccgacgcgtacagcctgtattccacccaatacacaagcccttgacctatgccagtctttgtcttttgtgctgcccgccagggctcattaccactgcccctgactcccttttccactgtaacgccatccttttg

SEQ ID NO: 6308 - DNA, 575 bp, Chlorella sorokiniana
  Clone ID: LIB3602-089-Q6-K6-E2
gcgttcgcatgcgccctgtttgccatgcagagggctgcgttgctgctcgactgcagctggccccgccgctggccgccgccctgcgcccgctggcggttggttcctgtgtcccgccgtcgggcgccccagcaccatttccagccgcgcggcccagccccagcccaagcgcgcccaggcgctgggtggggacgcggccaccagcaccacagagacggcggaagcgggatgcgggcgcaagaagctgtttgatgacctgggcggcgcagaaggcatgaagctggcggttgacaccttctacgataaggtgctggctgacccggagctgctgcccttcttcgagtccctggacatgcaagagcagaagatgaagcaggtcaagttcatgagcttcgtgtttggcggagcagaccaatacaagggccgaagcatgtacgacgcacacgcccatctggtcaagggccacggcctggaccaccgccactttgacaagatcaagcagtaccttggagagacgctgcaggagatgggcgtcaagcaggatgtgatccagcacgccgccggagtggtggagtcca

SEQ ID NO: 6309 - DNA, 559 bp, Chlorella sorokiniana
  Clone ID: LIB3602-089-Q6-K6-E3
tttttttttttttttttttttggggggggggggggggtttttaaaaaatttttttttttttttttttttttttcctttgttgctttctttttttttctattttttatctccccaaccggcccccctaaaggcccaaaactaacccccccttcacaacaacccaaaacctttgggggggggggggccaaacaaaaaaccctggccccccctccaaaaggggggggggggaaaaaccccccctccccccaaacaaaaccccctacaaaccacccccccaccccccctggcgcttgggccaaaaaccccccccccgaaccccccccccaacttgcgccccccccgccccggttgtgggaccccccccccaccgccccaccacccccctcggcggcgttcttccccccctttgtccccccttccccccccattccccggcccccccccccttgccgcccccccccctggtttcggggcacgtctcgacggttcccccgccccgccttaaagcgggccccccccctaggacccccccttccggcgtcccgccacccggcccccc

SEQ ID NO: 6310 - DNA, 428 bp, Chlorella sorokiniana
  unsure (1)..(428): unsure at all n locations; Clone ID: LIB3602-089-Q6-K6-E4
gcgttcgcagggcgtgcgctctgcgcgctttggtgttgtgttcctggacgaaagcatgcgcatcacgcgcggagaccgggacgagctgcgtgtgtttctgaaggcgctgtgtgagaactcttctccatggagccctcccgcaagctggcaaccccagccactgatgccgccctttgcctgcgggcaggtcaggagcagtcgcattgggacagctgccgtagctgcccaggcgtgttgtaacacagctcgtgagcacctttgaacaaacccctgtgtgatcaaccgtgcacgatgtacctttgaatgaacaggcatgtaatgtagattggcaggtnaaaaaaaaaaaaaaaaaaaaaaaaaaaaaaaaaaaaaaaaaaaaaaaaaaaaaaaaaaaaaaaaaggggcggnccgttttagaggtatccaag

SEQ ID NO: 6311 - DNA, 549 bp, Chlorella sorokiniana
  Clone ID: LIB3602-089-Q6-K6-E5
ggccccactgccgaccactcctgcggcacagcctgcaaattggcgcgcgaggccgctgcggcagaccctgaggttcctgctgtggcggagccagcgaccgcagcggccgccgagccagcgccagtggagccgagtccaacgaacgaaccagctgccgctttgcgcagcactgagcgtgtcccgcacaccgccgcaccatcggctgctgcccccgctgccgtaaaggacagcagtggcggcggcagccacctccaggcttcagcaggccatggagcaccctcttccaccccattcgccctgtttgctgctggcctcgtgctggctgctgtgctcctgcagctcgccacgcactgagccgcacctctctgtccgtgctactgacccttctatctgcgaaccctctgtgcgccccctttggcattgcagcctgactgccgaatctctgccctgttgcatccgttgtctgcacccttgattcgtccgcagttgcgaccgccgcgttcatattgcagggcgataccgccccccaggcctgtagaactacctaac

SEQ ID NO: 6312 - DNA, 569 bp, Chlorella sorokiniana
  Clone ID: LIB3602-089-Q6-K6-E6
tgcacaccaacgcaggtggactggctgacggagaagagcggcagaacaacttcaccgtgtccgccatgcacggtgacatgccgcagaaggagcgcgaggcgatcatggacgagttccgcaagggcgccacccgcgtgctgatcaccaccgacgtgtgggcgcgcggcctggacgtgcagcaggtgtcgctggtcatcaactacgacctgcccaacagccgtgagctgtacatccaccgcatcggccgctccggacgcttcggccgcaagggtgtggccatcaactttgtgaagaacgacgacatcaagatcctgcgcgacatcgagcagtactactccacacagatcgatgagatgcccatgaacgtggccgacctgatctgaggcggctgggccgctcctcttggcggcgtgccggcttgggatgcagggctggttcaggcctgccatctggccggtggctcagctgacggcatgcctcagcgtttcaacggcagcatgcagctgttagccatccctcccctgcccatctgcacctctccttactgcttgctctgttgctgctcacct

SEQ ID NO: 6313 - DNA, 562 bp, Chlorella sorokiniana
  unsure (1)..(562): unsure at all n locations; Clone ID: LIB3602-089-Q6-K6-E7
tgctgcgcctgcgccanacaactgggcgtcttcctcaaggtgaacaaggcgaccatgaacatgctgcagcgggtggagccctacgtggcgtacggctaccccaacctgaagaccgtcaaggagctgatctacaagcgcggctttggcaaggtcaacaagcagcgcatcccgctcaccgacaactcggtgatcgagcaggtgctgggcgacaaggacatcatctgcgtggaggacctggtgcacgagatcttcaccgtgggccccaacttcaagcaggccaacaacttcctgtggcccttcaagctgtcctcccccaagggcggcatcgacaagaagcgcctgcactacatcgagggcggccaggccggcaaccgccaggagtacatcaacaacctggtgcgcgccatgaactgagcgctgagccggcgagcacagcgcagcgcgcgcagcacgcacagcgcggcgcgtgcagcagcctggacggagcggccccctgatgcctgctagccacggcactgttggccgggccagtcgtgaggccccgagcgcacccgaatgtcca

SEQ ID NO: 6314 - DNA, 392 bp, Chlorella sorokiniana
  Clone ID: LIB3602-089-Q6-K6-E8
gcattacactcacagcggtacgaggcggtggagagcgttttgcatgcgctcgtggagcaggatgtcctggagtcgctgttgacagcagcccccgcagagcttgtgatggcgctgcttcagctggcacgaagtgcgttcaacaacccaaaccatgtggaatctgctgtcgcggtgatgcaccgcttgctgacatgccgcccaggctttgccaagggcagtgatggtgtggaatgcctgcagcagacgcagtccatcctggcagaagaactgcagacgcaagagcagctgctaagcgtgctcggggtggtgcggggcctagctttggccagttaagcactcgtgcgtgtttgcctctcttatgttgcaactattgaaatgtagcatcatcaact

SEQ ID NO: 6315 - DNA, 569 bp, Chlorella sorokiniana
  unsure (1)..(569): unsure at all n locations; Clone ID: LIB3602-089-Q6-K6-E9
ggnagcatttggggnaatcgagttcggctcgacccgaacgcgaacagccaaccagccaccatgctgatctccaagaagaaccggcgcgaggtgtacaagtacctcttcaaggagggcgtgctgtacgcggagaaggacttcaacctgcccaagcaccccgagattgatgtgcccaacctggaggtcatcaagctcatgcagtccttcaagtccaaggagtatgtgaccgagcgctacgcctggcgccacttctactggttcctgaccgactctggcattgagtacctgcgcgagttcctgaacctgccctccgagatcgtgcccgccaccctcaagaagagcacgcgccccctggagcgcgagggcgcgcgcccgccccgccgcgacggccccccccgccgcttcggcgaccgcgagggctaccgctccgagaaggcgggcgcccccggcgagtaccgccccgagttccgcggcggcttcggccgtggcgccgccccccagtaagcgtccgcttcctggagcagcgccccctgggctcggcaggcggcggcgggtgcggcggccgctct

SEQ ID NO: 6316 - DNA, 575 bp, Chlorella sorokiniana
  Clone ID: LIB3602-089-Q6-K6-F1
gcgttcgcgcgctcaattcgtcgatcagcctgcaggggggcaccgcccgcctgtttcagaccggatggctcccggcctgcctattgccgcggcctggcgcctctttgcggccctcgacaataatgattagaccgatcagggattcaagctcttcttcaaggacaacagcgcaagcgtgtacgccggtggcgtgcaccgcaccgcgggcaaggattgggcccggcgggtggacgagacagtggcggaccggtgggaggcgctgacggacgaggagcgccagacgtggacggcaaggggcagccttactgatcgggagaagaaggcggctgaggtggaggcgcagccacgctggggccggtggctaaacgagcgcgggctgctggatggcgtgaccgactaccgagaggtggcccgcctctcggagctcatcatctcgcaagtgttggcggacccgctggagcgggaggcagcgtttgcagagatgaagggctatgcggctgaggaagcggctgccatccgccggggcgacatcccggtgcagcagcttagctgaatgcccaagcctgcggcgcggc

SEQ ID NO: 6317 - DNA, 574 bp, Chlorella sorokiniana
  unsure (1)..(574): unsure at all n locations; Clone ID: LIB3602-089-Q6-K6-F10
gctggcaggacttcaagnagcccggcagccagnagcagcagtacttcctgggcctcgaggccgtgttcggcggctccggcaaccctgcctaccccggcggccagtggttcaacatgctgaacctgggcaagacccccgaggagatgaagaagctgcagacaaacgagatccgcaacgggcggctggccatgattgcgtgcctgggctgcgcggcgcagggcgtcatgacgcagaagggccccttcgccaacctgctggagcacctggccgaccccgtgtccaacaacctgctgggcaacctggccaccatcctgaagcagtaagcgtgctgccccaagccccggcctgggtgtgagggctgccagggcggcggccagccacatctagagcctttgcattccttggctcggggcggcgactggtggcgggccctccggccgtgcctgcctgccgccccgcagcgcaccctcactcaccccacttcacccctgagaagaaatcaactgcccaactcttgttttgttgccgctcctacgcttccgtgtgcctcttgtatgggataattgctgctaca

SEQ ID NO: 6318 - DNA, 552 bp, Chlorella sorokiniana
  Clone ID: LIB3602-089-Q6-K6-F11
cacggtggcatgctgctgctgcggccctgcaaagcatcatgcggcacatgctggcagtactggaggcccagcccaagctgcgattctcgcatggagcggcagagcaggactttttccactggtatttcaagtacacgggcatgcggctgccacttgagtacaacacgatggcatcagacagcctggcgggcaaccgcacgctgggcgggcgggaccctgttgtggtgcacttcacgcgcaacaagcccttccacggcccgcagcctggccggccagggcaccaattcctgtgcagactcgaagaaatggactgagggtgttgcgccagcagcggcagctgtggtggtggcgcctccagagaaccccaatttttgccctcagtaattgtactgataccacaaatgttgcccgggctcaatgacttgcaccctgtaccttagcactgcttctttcctcctctggctctgtattctgggctccctactcattacttttgtgtttcagcatggcagcatctgtggccgctgcaaatctgtgtaacattcaagaagt

SEQ ID NO: 6319 - DNA, 58 bp, Chlorella sorokiniana
  Clone ID: LIB3602-089-Q6-K6-F12
ttcgtaaaaaaaaaaaaaaaaaaaaaaaaaggggagggggcggggcgctacaaaaaga

SEQ ID NO: 6320 - DNA, 597 bp, Chlorella sorokiniana
  unsure (1)..(597): unsure at all n locations; Clone ID: LIB3602-089-Q6-K6-F2
gcgttcgcggncgcgtgggagcgggccgagggttatgtgaaggagtaccgcgcgcaggagctggaccgcatccggttgaagcgcgaggccaaggccaagagcggcttctatgtcgagcccgaggccaagctggtgttcgtgatccgcatccgcggtgtgaacgacatcgaccccaagaccaagaggatcctgcaggtgctgcgcctgcgccagatcaacatgggcgtcttcctcaaggtgaacaaggcgaccatgaacatgctgcagcgggtggagccctacgtggcgtacggctaccccaacctgaagaccgtcaaggagctgatctacaagcgcggctttggcaaggtcaacaagcagcgcatcccgcagaccgacaactcggtgatcgagcaggtgctgggcgacaaggacatcatctgcgtggaggacctggtgcacgagatcttcaccgtgggccccaacttcaagcaggccaacaacttcctgtggcccttcaagctgtcctcccccaagggcggcatcgacaagaagcgcctgcactacatcgagggcggccaggccggcaaccgccaggagtacatcaacaacctggtg

SEQ ID NO: 6321 - DNA, 591 bp, Chlorella sorokiniana
  Clone ID: LIB3602-089-Q6-K6-F3
gtcgacccagcgtttcgtgcaccgcccgcacaccccctgggcatgaggtgcgctgcggtggccaaggaggagattcacgacgtggtggagcacccgccgccggtcaagctgatgagcggccgcgccactggtgtggaggcgtgggacaaggtcaactcgccaaaggccaggcacgactgagcggccagagtgggggagtggcggagaggctccagcagtgaacgcactgccgccggctggtgtccacagatcaactcaatctgttgagaccagctgctgcctccatccaagcttgcaatgctcactgccaacgcaacccacacagacgcgcctcccagcccaccagcagcctcgccggtgcacgctgcgctacgtgagttttccctcctgttcctccagtattgcactgccccccaggtggctcgcgcttagcagcggcccgcctttttcactgcattgtagattaaacgcgcatgctgcagtgagcagcctgtgtttatgcttgagggccatgttgttgtagtcctggcctctgcctgcaagcctgccgtacgcagacttatctcgcctcaccacacccgcatgccttct

SEQ ID NO: 6322 - DNA, 560 bp, Chlorella sorokiniana
  Clone ID: LIB3602-089-Q6-K6-F4
ggccggcttgcagctgtgggcggggcgcagcgcatgtgcagggttgctgcaagcggatatccctcctgcccgctgcgcccaccagcacctgcctcctccacctgcctcctccctcactctgctcaccctgctgccccgctcccttgctgctttcagctactactggattctgggccggggggacgatgtgatcaacgtgagcggccaccgcatcggcaccgccgaggtggagagcgcgctggtgggccaccacctgtgcgccgaggcggccgtggtgcccgtggaccagtgagtctttctttcgggttgttggtcgacttgacaagagggcgctggctgttggggcaagctgttgtggcctggggtttgcccgccggcctggcggcgtgcggtgctggcaagctgccctgcgctgcatgccctgctgctgaacatgcgcacgtggtttgtgcttctctaaacctgccccaccccgcccctttgtttcctctgcagccccatcaagggccaggccatctacgcctttgtgacgctcatgaacggcattgagtacccgcccg

SEQ ID NO: 6323 - DNA, 428 bp, Chlorella sorokiniana
  Clone ID: LIB3602-089-Q6-K6-F5
cccggtcgacccagcgtccgccgggacacgccctgagccggttgtggtgcggtgcagaccgacttgtttacccttcccgaacgacagactgcccaactgcgccactctctcgccgccctggggcctgctgcccgccgtacctctgcctgctctgctgccgagtggtcaatcccaatgcatgactcgcttgccgcgcgcgacgcccgaagagcgcaccctgcacccacaaacggaccagcgaccccccgccgccacgcacttctgaccgccccgctctgcctatgacagccgttctagtgcgcgcagccgttttgccgccactcacctcccctgctgccctgtccctgacgcacctatctccgtctgacgcatctgtattgctttctctggggttggggccatgtgcccggtgtgtaaactatgagatc

SEQ ID NO: 6324 - DNA, 240 bp, Chlorella sorokiniana
  Clone ID: LIB3602-089-Q6-K6-F6
cccccccctttttttttttttttttgttgatgtttttttttttgttttttttttgtttcttttctatttcttttctggggggggtcaaaacaggggacaggacacagggggaggaatacagaggtggggggagaaaaggggtgcaccggcagcagggggtgtactcagggatagggcgagacactgggtaaccagagacggaggggttgcggtgattgtagatgcaggcacattcggtca

SEQ ID NO: 6325 - DNA, 593 bp, Chlorella sorokiniana
  unsure (1)..(593): unsure at all n locations; Clone ID: LIB3602-089-Q6-K6-F7
naaaaaaaaaaaaaaaaaaaaaaaaaaaaaaaaaaaaaaaaagaaaaaaaaaaaaaaaaaaaaaaaaaaaaaaaaaaaaaaaaaaaaaaaaaaaaaagggctggccgaatttaggggggcccaggctttctttagcgcgtccatgcttacgtcatcgttttttctttggggaccccttattttattgggctggccggcgttttacaccggccggctttggaaaacccctggggttgccaaaattgatgggcttgcccacctttcccttttgggccagcatggcctttttgcgaaatgggccctccctgtcgcctttcctaaacgttgcccctttctgagggtcattggaccccgccctgtaggggggccttcaccctggcggctgtttttggtcccccgctgggtgtcttttctcccttgggaggcccctattgcccgttcctttctatttcttccttttttttttggccctcctttcttgttttttcccggtcaggctgtatttcgggggcttgcttttgggtgttgggtttctttgttggcccgcccctctgtccccacaaatcttgtttctgggaaaggtttacttaggg

SEQ ID NO: 6326 - DNA, 264 bp, Chlorella sorokiniana
  unsure (1)..(264): unsure at all n locations; Clone ID: LIB3602-089-Q6-K6-F8
ccctgctcacctcccctcttgagactgctcctccgtgcttgcggcgaatgggctcctgtagattagacagcccccatgcgtacccaccactgtgccctcttttcctgtactctcgccggccgcggcgcgcacacacatngctcgctcngaaaacccaacgaagccgcccgcccgccatacacacgcactgctgtatcactgatgcacccaccgtgtgagccctttttcccatgcctgtgctcaccccatgtaatccagatagag

SEQ ID NO: 6327 - DNA, 282 bp, Chlorella sorokiniana
  unsure (1)..(282): unsure at all n locations; Clone ID: LIB3602-089-Q6-K6-G1
gcgttcggtgctggnatgcaactgtgcggggggcggcgcagcgaggccgagttccttgcggagctggaggccgccgactgagcggcagtgttgcggcatcctcgctcggccagcatgtgccaggcggcggctgtgtgttgcacgttgcagggtgcctgcaaggcagcggggccgccgctggtgcggctgggctgcgagcggtggagcacagcactgcagcactgaccagtcttcagttttaattgtgattgtttccatatttgacgtgtaactaccaggggc

SEQ ID NO: 6328 - DNA, 437 bp, Chlorella sorokiniana
  unsure (1)..(437): unsure at all n locations; Clone ID: LIB3602-089-Q6-K6-G10
cacgctgcacctggtgctgcgcctgcgcggcggcatgcagnactttgtcaagatgctgacgggcaagtacatcacgctggaggtggagtcgagcgacacgatcgagacgtgaaggccaagatccaggacaaggagggcatcccccctgaccagcagcgcctcatctttgccggcaagcagctggaggatggccgcaccctggccgactacaacatccagaaggagtccacgctgcacctggtgctgcgcctgcgcggcggcaactaggcggctggggcacccacccacctgccttcacacccatcgtgtgcggtaggagcggcgcgcgcgtgcacatgtagcatcctgccctgtaccctcaccctctgtaccccacccctgtaaccgccgcgctctataaaaaaacaaccaaccctataaatataattataaaatag

SEQ ID NO: 6329 - DNA, 584 bp, Chlorella sorokiniana
  Clone ID: LIB3602-089-Q6-K6-G11
actgttcttcctggtccgcaacatctccccttacttctggtccgcgctcggcattagcctgtgcgtggggctgtcaatcatcggcgccgcctggggcatcttcatcaccggctccagcctggtgggtgccgccatccgggagccgcgcattacatctaagaacctcatcagcatcatcttctgtgaggcggtggccatctacggagtgatcgtggccatcatcctgcagaccaaggtggaggcagtgaagcacaaccccgacggctcctacggcctggcagcagccaatgcaggctacgccatcctgggtgcaggctcggtcacaggctgggccaacctggcatgcggcctgtctgttggcattgtgggctcctcagcggcgctgtcggatgcagccaactccacgctctttgtcaagatcctggtggtggagatcttcgcatcggcgctgggcctgtttggtgtgatcatcggcatcatcatggcaggcaatgccaacttcactgcgcaaggctgaccttgcagcaagcagcgcggctgtgctgccacgacagcggcagccatgcggttagcaagcttggaac

SEQ ID NO: 6330 - DNA, 570 bp, Chlorella sorokiniana
  unsure (1)..(570): unsure at all n locations; Clone ID: LIB3602-089-Q6-K6-G12
ccccatcgtggnaaagcttgaccaacagcctgatgatgcacggccgcaacaacggcaagaagctgatggcggccagcattgtcaagcacgcgtttgacattgtcaacctgctgaccgaccagaacccggtccaggtgctcgtggacgccatcatcaacggcggcccgcgtgaggatgccacccgcattggcagcgccggtgtggtgcgccgccaggctgtggatgtgtcgccgctgcgccgcgtgaaccaggccatctggctgatcaccaccggcgcgcgcgagagcgcgttccgcaacatcaagaccattgcggagtgcctggcggacgagctgatcaacgcggccaagggcagctccaacagctacgccatcaagaagaaggacgagatcgagcgcgtggccaaggccaaccggtaaacggctgttgcgcacccaccaaaacagcagcccgccacagccggcacccctgggcaggatgccagaccgccagtgcagcagcacggtgtggttcagctgctgttatcgtggcaggctttccaattaggcgcgggtgttaggattgtgtaac

SEQ ID NO: 6331 - DNA, 666 bp, Chlorella sorokiniana
  unsure (1)..(666): unsure at all n locations; Clone ID: LIB3602-089-Q6-K6-G2
gaccgcagggatgattgagctggnacggcacacgacaacaagnagcannagctgggcgnnccaatggcnnatcctggcncnngtctcccttggctttgtggnncgcggnngcgggcngnnccgccgnagaaagggggcgtgcncnntctgtaccaagcacatncnngccgacctgnngcgggcaacaaagcaagcgtgatgccgtgcgcgggtgccctcnncttcaacatcanntcaacggcggcgtgccacgcgcggcgaatnngccctggcncnnttccaggaagttcaatgaatcaattgcccnnaccggcgnncctccnntccttcgnnccgaggccatgncnnggatgggnncagcgaaggtgtacccacncnnacctcaagtncnncatcgtgaagaaagaaagnntacggcgtggaacttctgtgnannacgtgggcgaatgaagggcgnngcttcgcccccggcattccaagtccaaacgaggaagggcctggtgcnntggtcaagcgaaacgccatcaaggnnccgcgggcttacgaagggcaaggggtcaagaatcgccatggnactggcgcnncgccaccgnagttcttacggcgaggaacgnngcaagtaccgaaacctgaacnnttcaagggcaagggacccaacgacggcag

SEQ ID NO: 6332 - DNA, 434 bp, Chlorella sorokiniana
  Clone ID: LIB3602-089-Q6-K6-G3
ggcgtcgcagcgcgcagcgttcttgcggggctgcaagcggccgctgagcaacctgggccgcttctggtcgggtgtgcactcggtggtgcggcggttcagccgggaacctgcagaggaggcggaggaggcgcatgtggactgaaaaccttcctaaatcataattgctgctctgctcgtctgctgctatgtctcctgcttgcaccgcttcgtctcggctcgccgcctctgccgcccctcggctgccgctctcaacttgccgctgttgcttgctccctgctgctgtggtctacatgctcccgcagctcagctatacacctggctgcctctgcctgcacatcacctctacgctcctctttcttcctttttcttccggcacataatgtgtatcgttcataactctcagttctgcggaatcactgcaaccgcgcacacag

SEQ ID NO: 6333 - DNA, 553 bp, Chlorella sorokiniana
  Clone ID: LIB3602-089-Q6-K6-G4
tcgggtcgaccccgtggtcttcaactggacgcagggggaccccgacaaggtgactactctaggcattggcgggcctgtacggaaacagaattcgcgtagctgctcgaggcggttgcagctgccgctcatcaacccggcactgtttgcgcggttggtgcatcaagccgcccacaggcctgctggggtgggggggcggcgggcacatgcaacacgctgctggccaaggcgattgcctccaacatcgactccaacttcctcaaggtggtggccagcggcctggcggacaagtacatcggcgagtcagcgcgcgtcatccgcgaaatgttcaactacgcgcgcgagcaccagccctgcatcatcttcatggacgagattgatgccatcgtcggcatgcggctcatctagggcaccagcgcggaccgcgaggtgcaacgatcgctgttcgacctgctcaaccagctgggtggctttgagaagctgggcatggtcaatctggttgcggccaccaatcggccggttgttgccgtaccccgcgctcatgcggtcggggcgg

SEQ ID NO: 6334 - DNA, 567 bp, Chlorella sorokiniana
  unsure (1)..(567): unsure at all n locations; Clone ID: LIB3602-089-Q6-K6-G5
caccccggcccgcgnngcagtccgggcgtgtgttaaacgnncgaagccgaaaaaaaaaaaaaaaaaaaaaaaaaaaaaaaaaaaaaaaaaaaaaaaaaaaaaaaaaaaaaaaaaaaaaaaaaaaaaaaaaaaaaaaattaaaaaaaaaaaaaaatatataaaaataaaaaattaaaaaaatattaaatttttttttattttaaaaaaaattaaatttttttaaactgtggttttaaaaatttttaattttttttaaagccttttgttatttatattttattggttttgattaaaaaccctttttttttttttgactttttgtttaaaaaattttatgtgttgtcttttttaacttttttacaattttttttttttattagaaagcgcgttttctcttttttttaaaactggtttggttgttttttttgcaataggtacccttttttttttgattttttttatggcttgtttttttggttttttcccttttttttttctttattttcagggtttttccctttaattttttaattttttgcctcttttttttctccagatttttttttt

SEQ ID NO: 6335 - DNA, 524 bp, Chlorella sorokiniana
  Clone ID: LIB3602-089-Q6-K6-G6
gccaggctcgtttcgcatcccttgcacccccgcctgcctcggtacgcaccctcccttcctgggcctcggccctgtctcgcaccctcctacctgggccctcggccctgtctgctacgaccccacccgctgccgcactgcggcgcaccctgctccttccccgcaccgacttgcactttggccctcttgctttggccgcccattgcctgccgtgccccgcccgcccgcctcatggggcgctccatgcagctcacatccccctggcaggctggctgagcgcttaggctggtcggctgctgcccgttggcctctttgctctcggttttgctccctttgcttccacaacccgcttgcagcaacgttgctcgtgcactgctcccagcagttggtggtgctcaacgatggggtcacccggacacccgacctccgctgttgttgtttcattccagcattgcatgcccacgttgtgttgtttccagagccagtcagcctgtggaccaggcccagcctctgtaacccaagcaagc

SEQ ID NO: 6336 - DNA, 244 bp, Chlorella sorokiniana
  Clone ID: LIB3602-089-Q6-K6-G7
actgtgtatgatagccccaatttcggccgcttcaggtcgattttgtttccacactgtgcccctttcttgtcccccctctcacctgatccgaatctctttctcagcctgaccccgccccacccagcaccggcgggctgcacctcgagcattgccttccaccctgcaactgagcgcctgagcgtgggacttgcactccattggcctcggggcagggccacttgcaacgatgtaaataatgaggaac

SEQ ID NO: 6337 - DNA, 423 bp, Chlorella sorokiniana
  Clone ID: LIB3602-089-Q6-K6-G8
cccacgcgtgcggcccgccctgctggcggtgcacccggctctggagctggtggacgaccgggttgcgggcgagggcaccggcatgatcctgggcatcaacgaccgctccctgatctgggccatcaccattgtgtgcaccatggtgtggggcgtgacctacgtagtacacccgtgagattgacgctgagtacgaccatgagaacgaccatgactttggactgaccctctaagcggacgcccaccatgaggcggaccgcgcggggtatgcccacggacctgtcgggcaaatgttggagcttgtgctgcatgttgaccgtcatgtgaacgctaaatccaaaattaaacctgagaatagaactcgctatgtagaacacttgcgttaacaccgtccctctggggctcccgacaaaagacagacgatct

SEQ ID NO: 6338 - DNA, 573 bp, Chlorella sorokiniana
  Clone ID: LIB3602-089-Q6-K6-G9
cacatctgcgcacacataacggccatggcgagcgagagccggccgccgctgcctcccttcacgctggagacggcgcggcacaaggtgcaagccgctcaggacgcctggaacacgagagacccagaccgagtggcgctggcatacacagaggacacagagtggcgcaaccgagccgagttcgtcaaggggcgggaggcggtgcggcagttcctgcgccgcaagtgggagcgggagcagggctacgtgctgcgcaagtacctgtttgccttccaggacaaccgcatctcggtgtgcttcgaatacgagtaccacgatgccagcgggcagtggtaccgcgcctacggcaacgagaactgggagttcagcgagcagggcctgatgcgcaagcgcatcgcaagcatcaacgaggcgcccatccggcccgaggagcgccgcattgctgtgccagaggggcagcaagttgtgtacaactcctggctggcggagcagggcattggcggcgaggagttcccgctgtgcggcggcaaccagccagcctattaaaggcagctggcgcgctgcaacaagtggcgg

SEQ ID NO: 6339 - DNA, 464 bp, Chlorella sorokiniana
  unsure (1)..(464): unsure at all n locations; Clone ID: LIB3602-089-Q6-K6-H1
gcgttcgagcacccattgccccgttccttgccatgcgctgctttgttcttcttggactggctgctcctggcattgtaacatgggcaagcnaaaaaaaaaaaaaaaaaaaaaaaaaaaaaaaaaaaaaaaaaaaaaaaaaaaaaaaaaaaaaaaaaaaaaaaaaaaaaaaaaaaaaaaaaaaaaaagagagaggggggaaaaaaaaaaaaaaaaccaaagttttctaaaaccccgcgtgggaaaaaaaaacctttttcttttggtgtccccttctttttatttcacctggccgtgggttttaaacgcgccgtgcttgggaaaacccctggcggggcccaaccctgagccgcttcccggtaaatcccctttggcggccgttgcctctttttccctgttgggcccgccccttgtggcccttcccaactgttgcccctttcccgattgtgccctgggccccccccccc

SEQ ID NO: 6340 - DNA, 110 bp, Chlorella sorokiniana
  unsure (1)..(110): unsure at all n locations; Clone ID: LIB3602-089-Q6-K6-H10
cggacgcaatgacttgtaaatgaaatcctacaggcannaaaaaaaaaaaaaaaaaaaaaaaaaaaaaaaaaaaaaaaaaaaagggcaggacgaataaaaaaagataccgg

SEQ ID NO: 6341 - DNA, 570 bp, Chlorella sorokiniana
  unsure (1)..(570): unsure at all n locations; Clone ID: LIB3602-089-Q6-K6-H11
ggcagcagcagaagcggcagcaaagccaagncgatgcctactgggacgggcatgccaaccccaagcaaagcgcgaccaaaacgggaggagcaggagcggcagcgggaggaagcggccaagaagaaggcggaggcaaagcggctggcagcagaggaggaggctgcgctggcggctgctggcaagaagaaggcatccaagcctgcgccacccaaggtcaccgcagcgcagctggccagcatgcgggagcgggagcagcgggagatggcgcagcaggcggcagagcagcaggatgcgcagcgccgcatggtgtcagaggaccagtacgcagcagctgtggaagtggacaaccgcaaccgggaggagggcgtggtggaggcgcgcagcatggatgcggcgctgcaggcgctgtcactgggcaagcaggaagtggaccggcaccccgagaagcgggccaaggcggcgtgggaggcctattacgaggagcagctgcaagtcctcaagcaggagaagcccggcctgcggctcatgcagtacaaaagcatgatcttcgagcggtggcagcgcgaccca

SEQ ID NO: 6342 - DNA, 464 bp, Chlorella sorokiniana
  Clone ID: LIB3602-089-Q6-K6-H12
cactgtgtgtgttacatgcaagggcagcaacgggcaggtggccgtgttacagccaggcaaaccacgtagggcacatgcgacacagattggcaggcgctactgcttctgccacaagagcccgggtgccctgctgcggatggccgttgcgtgcaggtgccatggtgcccacacggttcaggcaggttgcggtgttccaggccacgcacgtctccagctgggaggtcttcaggctggcgttcagtgccgcgatgcagcgcgctccactgcgccgagctgcccaggacagaatgtcatccctgaagaacagggcaacgatagatgaagtgatggcaggctctgcctgcagcgcctgcgctgctgcagtgatggcgcaaaccaccatgccttccatgccctgtgggccaatgaaggactgcatgttgcgggtgaggcggaatggcaccgtctcactagttctagatcgc

SEQ ID NO: 6343 - DNA, 439 bp, Chlorella sorokiniana
  Clone ID: LIB3602-089-Q6-K6-H2
ctagggggcggttgcgcctggtgcggggggttcgtttccggtgggatgggcaggctcggtgggtgctgctttgggcatccaggcgctgttcacagagtgggggggggggacgctcagggatggccttagcttggctacgcagccgaggggggagtttcctctgcatatggtgcgaccactgtgctagggggcgacaacatccttttcggctctgatcagcggagactcctcttgcctggagtgccggtgggtcttcgctttgttgaggcttcaactggagccgtgcatctggataccgtgccctatagcttggtggtgctcggtcgctcgtacctcctgctgccgccgggctctgtgtagcatttgctttccgcttgggttacggtcgtctgtctgctggcccacgctgtttgccgatggtcggtgcctcgcgtaaggg

SEQ ID NO: 6344 - DNA, 567 bp, Chlorella sorokiniana
  unsure (1)..(567): unsure at all n locations; Clone ID: LIB3602-089-Q6-K6-H3
gcgttcggnagnacgtgcagcgccgcttccgcacggcttccgcgagggctctgctgccaanaagatcgctgcctaaacagctggtgtctgcagctacgcggcagcacgttgagccagctgtgtagcaggatgtaacaccgcgacacanaaaaaaaaaaaaaaaaaaaaaaaaaaaaaaaaaaaagaagggggggaaaaaaaaaaaaaaaaaaaaaaaaaaaaaaaaaaaaaaaaaaaaaaaaaaaaaaaaaaaaaaaaaaaaaaaaaaaaggggcgggccgttttaagagaacccaagtttacttccccgggcttgcaacgtaaaactttttttttggggcccccaaaattaaattaatgggccggggtttaaaaacgtgggaatgggaaaaacctgggggttcccaaattaaatggctttgaaaaaaatccccttttccccagtgggggaaataccaaaaagccccgacccgatcgcctttccaaaaatttgcccaccctgatggggaaagggaaccccccctttagcggcccttaaaccccggggggtgggggggttccccccag

SEQ ID NO: 6345 - DNA, 271 bp, Chlorella sorokiniana
  unsure (1)..(271): unsure at all n locations; Clone ID: LIB3602-089-Q6-K6-H4
tcgcggncgcgtggggccagtaagctgactgcggctgccgcagcagcggcaggcatgtgcttgaacgcacggagcgcaagcgcgtcccgcgcacagccgccaccgaagcggcctgccagcgtcgacggcagcgaggcagcaaggcgcggcctggcatgctagcagcgcgtactgcgcgccacggcgctagcagccgcaccctggaacagcatcagcagtaattcagcagcccacctgcatgccgaacgctccgctgtaacaggttctcagg

SEQ ID NO: 6346 - DNA, 395 bp, Chlorella sorokiniana
  unsure (1)..(395): unsure at all n locations; Clone ID: LIB3602-089-Q6-K6-H5
gctggnagnatgcaacctgtgcgccatccacgccaagcgcgtcaccatcatgcccaaggacatgcagttggcgcgccgcattcgcggccccgtctacggcgtgtgcagctattgagggccttgtgccatgcagcagcatcgcgctcacatttggcctatcagtggctcaatttgggcagggctgctgccagccaggccccagccattgtgcctagcccaatggcctttcgtttgtactctaggtagccagcagcagcaggagcagcaggagcaacacacactgaccgcaccacacgcaatacttgctttgcctggaggactttaacattgcctcctcaccaccaaccaaaccgcacgttcagcagccactccctctgtgtaaagcacgacgcact

SEQ ID NO: 6347 - DNA, 476 bp, Chlorella sorokiniana
  Clone ID: LIB3602-089-Q6-K6-H6
tgctcacatgcctaaattacgacccccctctttcatcgccctacctgcgtcgatctccattctttttgccccgcttgcacctcggatgtctgcaacaggccacgattctcccacccctctttgtttgattgaaccataccgcggtttgtaacagttagcgacaaaaaaaaaaaaaaaaaaaaaaaaaaaaaaaaaaaaaaaaaaaaaaaaaaaaaaaaaaaaaaaaaaaaaaaaaaaaaaaaaaaaaaaaaaaaaaaaaaaaaaaaaataaaaaaaaaaaaacaaaaaaaaaaaaaaaaaaaaaaaaaaaaaaaaacaataaaagggggggacctgttcaaaaatttacaaaacttcccaactgtggaaaactggggaaaatacccttttaattggggattcgaaaaaaattaccccattggcccagctagactaaaatgggaaaaaaggaaaaaaccgtggggcccttaccaaaa

SEQ ID NO: 6348 - DNA, 121 bp, Chlorella sorokiniana
  Clone ID: LIB3602-089-Q6-K6-H7
ccatcggtgcgcctcgaaatgcacgcagccgcgtggaactggaagcggcccggctggtggtgctgcagcggcgcagcgctcgactgcaggcaacaaggcacgcgcggccagatgcggcggc

SEQ ID NO: 6349 - DNA, 602 bp, Chlorella sorokiniana
  unsure (1)..(602): unsure at all n locations; Clone ID: LIB3602-089-Q6-K6-H8
naaaaaaaaaaaaaaaaaaaaaaaaaaaaaaaaaaaaaaaaaaaaaaaaaaaaaaaaaaaaaaaaaaaaaaaaaaaaaaaaaaataaaaaaaaaaaaaaaaaaaaaaaaaaggtcaatcccctcttaaggggcgccgtctttttttagcgcttccatttttcctactggctttttttttagcggttcctttttttttttggacccctctcaattttttttcctttggcccgcatttgttaaaacccttggggtttggcaaactttttgggctttcccaattttacccctttttggccccttgtccctttttttccagttgctcttattcgaaatgctttccccccctgttccccctttttaaacgttgattgaacctcactttgtatggggccttcccttttgggggccttttaacttcccccctttttgtcctttcctcttgcgtgcctttttcctctcgttctttctttttccccccttttttttttttcctcccttccttttttgcccccttttgccttttttcccggggctttttttaagggggggttttttttgttttccgtttttaggccttaacagctcctttccccaaattttt

SEQ ID NO: 6350 - DNA, 374 bp, Chlorella sorokiniana
  unsure (1)..(374): unsure at all n locations; Clone ID: LIB3602-089-Q6-K6-H9
tnngnnnggnnntnntggnnnggtnnntgnggngttgttgtttttgttttngtgggttgtgttttttttttttntttngnnntttttttttttttggggggggggggtgtttttttttttttttttttntttttttttttttgggtgtttgtggttttttggggttttgtttttgtttgggttggttgtttttgttgtttttttttttttggtgtttttttttttttgtgttttttgtttttttttgttgttttttgtttttttttttttgggtggttgttttttgttgtttgttttttttttttttttttttgttgggggttgtttttttttttttgttttttgtttgttttttgtgtttttttttttttttt

SEQ ID NO: 6351 - DNA, 472 bp, Chlorella sorokiniana
  unsure (1)..(472): unsure at all n locations; Clone ID: LIB3602-090-Q6-K6-A1
ttcacgacctgnatggagccggtggggaccggtggatcctggaggcgacctcacggtcaaccaggtgctggagtgggtgcgcgccagggcctggaggcctactccatctcctgcggccagtccctgctgtacaacaacttttttcccaagcacaaggagcggctggacaggagggggggcgagctggtgcggacggtggccaagatggagatccccgcagacaggagccactttgatgtggtggtggcgtgcgaggacgaggagggagaggacctggacgtgccgctggtcagcatcaagttccgctgaaggctaggagagcacctctttgcaattctacagagcacgcggcaaccggcacggctggcagctcgggctgcagaagcaatctagtctgggctgccgctgcccgccgccacatgtaaacactgccttgcattttctcttgccaagtgcaagccgatgcatcacc

SEQ ID NO: 6352 - DNA, 427 bp, Chlorella sorokiniana
  unsure (1)..(427): unsure at all n locations; Clone ID: LIB3602-090-Q6-K6-A10
tcgcccaccccaattcattccctgccccaccctagcgacccccattttggccccctgcaaacggggccccctgtccctccccaacctatcatcatctgatgtccgctctctctcccctgcccgcctctgctgctgagcggctgcacccacccccaagtgcagcccgtcctgctgccgtgtttagttcctgctcaggttgctttgatacgtttgttcttgatgagtggaacttccgccgctgcagaaattgaggacaacacacgattcctgtcccccgccttttgcccccctcccgcatgcgctccctccctctcatgcacgcacacacttttcccgcagctccgcctttttctcaaatatatcaagctttccccgcaccatgcctccgctttgctgctatggccatgtaaggagggcacacgcanaa

SEQ ID NO: 6353 - DNA, 232 bp, Chlorella sorokiniana
  Clone ID: LIB3602-090-Q6-K6-A11
agcgttctggccactaagtgcaaacagtgggtgcatggcgtgtcccagctgcacagaacagagcagcacgcctggacgcatcgaaacgctgcatgcaccgctcctgagctcgcgccctgcgcagttgtgtccacctcactgcaaacatccagccgactcaagaaccgcgcgcacacacatatgcgtaggcatctgcagtttacagatgcttggtgtaaggtacatctgctgc

SEQ ID NO: 6354 - DNA, 567 bp, Chlorella sorokiniana
  Clone ID: LIB3602-090-Q6-K6-A12
gcgtttcggcttaaactccctggcttcaccccatatgcaccgatgccaaccgtcaccgcccgcaccggcgtggccgcctctggcgccacccgccgcgtgacctccatgcgccgtaccgtgaaggccaagcacgacaagtccgacagcgtgtggtacggtccggaccgccccaagttcctgggcctgttgtccgatggcctgacgcccgcctacctgaccggtgacgtttcccggatgactacggctgagacacctctgacctgttcgccgacccccaaaccttcaagaagtaccgtaccatcgcacgtcatccacaaccctatgtgccatgcttggcgccctgggctgcatcttcctcgaggtgctgaaaaagtacaatggcgtgcagctcggcgaggccgtgtggtttaaggatggcgcccagatctttgctgacagacatctgaactacctgggcaactccggcctggtgcacgctcagtccattgcgaccacactggaggtacaagtgctgttgattggcgccgcagagatctaccgtgccaacggcaagagccccaacggctt

SEQ ID NO: 6355 - DNA, 571 bp, Chlorella sorokiniana
  unsure (1)..(571): unsure at all n locations; Clone ID: LIB3602-090-Q6-K6-A2
gcgttcggcgtgtgctgctgctgcnaagcccaggctggtccgcggtgctgcgttgcttcgagacctgctaaactgctgccgtgaacagcctgctgcctgcacaagggctgtggcgccgcttctgagctaagcctgctgtgctgctgcgctggagtaccacactgccctgctttgcctgcctgcggacaggttgcacgctcgggtgttggtacggtactgtccagcgctgccctgcctgctgctccatgattcgtgcaggccggcgggcgcacccgccggagccttcccacacactccttggtggcactgcgtgttccacgaccgctatgagcgcataaacttttggagccacgctgtgcccggcgcggcgctgctgctgctgggagcgctggcggctgcaggcctagcaccgggcggcccctcgctggcgctcttctgctgctgtgccgccgccacgcacctgttctctgcgctgactcacgtgtaccccgatagtcactcactggagaaggcggatcacatcgngcttgtggcaaccattgtaggaacgcccatcacagcgctgatggcc

SEQ ID NO: 6356 - DNA, 563 bp, Chlorella sorokiniana
  Clone ID: LIB3602-090-Q6-K6-A3
gcgtttgccttcctgtgcaatcgcacagtcgggggcgagtgggttgccagcgggcagcagcaatgagcgcctccagcgtgcaaggaagagttgcggcaccagtagcgggcgctcccggctgtcgaaggcagcgcaacaggcatgcagccgccagtagacgctcgcagctggcagtcgtgggggggggggggggagggcacaaggagggcacccgcgcgccgcccgggcccgggggccggactgagaagcagcgcatgcttgcaggggagtcctacagcccatttgatcccgagctagtcgatgcccgcatcaacgccagaaggttgctgcgcatgctcaactacgagctcgactatgcagatgtcaagggccgggaggaggtgctgaagcagctgctgggcggcgccaactggcgctgccctccctggtttgactcgcccttccattgtaactacgggttcaacatccacgtgggtaagcacacctatctcaacatgaactgctcattactggacgactgcacggtgacgattggggaccgagtgctcatggggccaaacgtc

SEQ ID NO: 6357 - DNA, 562 bp, Chlorella sorokiniana
  Clone ID: LIB3602-090-Q6-K6-A4
tccggcatgtctgacctttgctgtccatcatagtgcatcactgtttgccctccagctggcctaaggacagctctgggctgcatcgcaacttcacctgccgactcgttgtgcctgcacctgcttgctctgccgccccgcatcctcacgttccctcatggcctcgcccaccccctttgcctacgattgcaggtgctccacttgctccggctactactaggcaactagctgagcaaggcagggcagcctgaaacaggctcccatgtgccgacgctgctggcggcatgaggcacagcaccaagaaaggcagctttcaagggcggcgttgtgctggagcaggcatggccgccagtctggagcgccagctacagcacgttgccgcgctcgatggccctgccaaccagcctcgacgcacagctgaagcgctgcaacacacccgtgacaaaccgtgcaacagcagccacacactgcgttgcttgaaccccctttccgtgacccaagacccgatccattccgtgatctctcccatctgcaacccagcacactcccccattccctggacccc

SEQ ID NO: 6358 - DNA, 525 bp, Chlorella sorokiniana
  unsure (1)..(525): unsure at all n locations; Clone ID: LIB3602-090-Q6-K6-A6
tcccgttacctgcctccctgcctggtcgccagcgcctctgtatcaatctctccctgacctgcttctttgtttcatgcagttccatgtattgtatcagctgcagctgntaaatgccagcctgaaaaaaaaaaaaaaaaaaaaaaaaaaaaaaaaaaaaaaaaaaaaaaaaaaaaaaaaaaaaaaaaaaaaaaaaaaaaaaaaaaaaaaaaaaaaaaaaaaaaaaaaaaaaaaaaaaaaaaaaaaaaaaaaaaaaaaaaaaaaaaaaaaaaaaaaaaaaaaaaaaaaaaaaaaaaaaaggggggggngttttttaaaaaaaaaaaatttaaataaagaggggggggggaaaaaaaaaattttttttttggggggaaacaaaatttaatttgggggggggggttttaaaaaaaggggggtggggaaaaaaaccggggggtacccaaaaaaaaacgcccggaaaaaaaacccccctttttaaaagggggggaaaaaaaaaaaaagggggcgccccccttttcccctttc

SEQ ID NO: 6359 - DNA, 246 bp, Chlorella sorokiniana
  unsure (1)..(246): unsure at all n locations; Clone ID: LIB3602-090-Q6-K6-A7
acanaacagcgaantgcgcgctaagtggaggaagaagcggatgcggcgcctgaagcgcaagcggcggcggcagcgggccaagtaagcggcctgccccgcagcccagcagcgctgcggcgcctgggcgcagccgcccgctcgcacgcgtgcaacggcgctgcagcggccagccggcgtcacggagtccgggcgcccggcagccgccgatgaaatgtgacggccgagtgtgtaatgctcacgaccgtg

SEQ ID NO: 6360 - DNA, 521 bp, Chlorella sorokiniana
  unsure (1)..(521): unsure at all n locations; Clone ID: LIB3602-090-Q6-K6-A8
cggctcgtgccaagcgcatnaagcagcagccaggcgagaagatcccaccacgacctgcgtggcagggccggcagggcagcggcagcgcggtagcagcaacgggggtgcggcgctccgaccgcgatggcaagggcaagatgtcggaagattacttcaaaattcatggtcgctatggtgctccgtgacgcggttctgcgctgctactcctagtccgtctctggcctcctttgattcaacccgcacaggcaccactcgtgctagcacgctcaatccacacacgaatccgaagcttgcgctgctgactgtaaacttgggtctctgcaaaaaaaactttacaaaaaaaaaaaaaaaaaaaaaaaaaaaaaaaaaaaaaaaaaaaaaaaaaaaaaaaaaaaaaaaaaaaaaaaaaaaaaaaaaaaaaaaannaacanaaaaaaaaaataattttatatataataaatttaaaaaaataattaaataaaaaaaaaaatgggcaacctctttttaaaggttaaaaattt

SEQ ID NO: 6361 - DNA, 564 bp, Chlorella sorokiniana
  unsure (1)..(564): unsure at all n locations; Clone ID: LIB3602-090-Q6-K6-A9
cccgaaaacaanaagccttctgcagggcaaggagtgccgcaagcacaccatgcacaaggtcactcagtacaagaccggcaaggcgtcgctctacgcgcagggcaagcggcgttacgaccgcaagcagtccggctatggtggccagaccaagcccgtgttccacaagaaggccaagaccaccaagaagattgtgctgcgtctggcctgcaccgtgtgcaaggcccagcacatgcacgccatcaagcgctgcaagcacttcgagatcggcggcgacaagaaggtcaaggggctatactagtaaaaaaaaggagagcggcaggcggagagcatgaccgagaaatggaggcagcggcgcccgctcaccctgggcggcctgctccccgcccggcgcctcgctttggccgcctctggccactcgtacgcctccttgtccatgcccttgtgcttcctgagctgcccaacctggcatgcaagcagcctggccgtctgtaatgccattggcgtgtgaaaaaaaaaaaaaaaaaaaaaaaaaaaaaaaaaaaaaaaaaaaaggggcggccgctt

SEQ ID NO: 6362 - DNA, 597 bp, Chlorella sorokiniana
  unsure (1)..(597): unsure at all n locations; Clone ID: LIB3602-090-Q6-K6-B1
cccggttcgacccagcgttcgncacnacattccaggcgcctgctgatcgctgttgagcagggcaggagtctatctgcgcagccaccgttcaccacccgccgccgccgtcgctgccgctgctgccatctattagcagcaagccctacaactggctgcatctcgcatcgggcgccatgattgtcgcagcagccgtcatcgcaccaaacaactcgccgctgtacctctccacgtttggcggggacgacgagtcagcgcggctgtccaccatggtgcactgctcgctggacgcggttgaggagaaggtggcggcggggctgcggggtaccgcaccaggggacgtgcctgatgcctatctgggactgttgtcatcagaggatgagctcaaggtgttcggctacgtcaccaacacacgggtcaagctggttgctgtggtggacgacccgatcgtgaaggacgatgaaatgcgtgcgatcttccggcgcatgcacgcggcatttgttgacgcggcgtccaatccattctaccagcaaggcgcgccgcttgcctcgccgcgctttgacgccagcatacgcaccatcgccacctcactgggggcta

SEQ ID NO: 6363 - DNA, 581 bp, Chlorella sorokiniana
  unsure (1)..(581): unsure at all n locations; Clone ID: LIB3602-090-Q6-K6-B10
gcgttcggcggtgcagcacgcggcagnagcggcggcggcggtgggcatggtgcctcccgaagagcaggagctgctgacgcgtgtcatgcagccctcgggcagccgcatcgagcgggtgcgcaccatcaccggagtgctggagcggctgagggagatggaggcgaggcctgagccgcacagccgcacgttgggcctgatcagcgccctggtggtgcacgagttgaacatgctggtggacgccatggactatgaggagctgtacgccgcatttgggggcccccacccccacaaggggctgagcgcggagcgcattgccgcgctaccggccgtgaaattgagcgaggcggggcttgcggcgctgcactcgcacacctgcgctgtgtgcctggaggcgtttcaagcgggggaggtggccaggccgctgccgggctgcggccacacattccatgccgcctgcgtggatgcctggctggaaagcaagccgctgtgccccgtgtgccgcgccaatgtggcgccgccggaaggggaggtcacagcagcggcgggtgcggcaggggcagaggaagcagcggcgggtgcag

SEQ ID NO: 6364 - DNA, 427 bp, Chlorella sorokiniana
  unsure (1)..(427): unsure at all n locations; Clone ID: LIB3602-090-Q6-K6-B11
ccggtgnaatactttgnttggaggccgccccgcgcggccacccagcattgcgcgcgacaaggccgcgcagcagcggctgtggcggctgctggaagagcagacgggggcgcactggagcgtgtgatgctgcctggctggttagctgacgtggccagtgtgtggcggctggctggttgatgcggtagtgtgaggctggttagctgatgcgggcagtgtgccgcgcttgcagcagactaggccgagttccttcgaatgttgctgcgcgttgatgcgacgcgaggagcggcgagatttgcaacaccctcaatgccaaaatagcaagtgcagcatgtgcttctgccgatgcatggcgcacttgcacacggagtatgctcctcaccctgtgcttgagcgactgttgaggcggtaacagtttcangacccanna

SEQ ID NO: 6365 - DNA, 575 bp, Chlorella sorokiniana
  unsure (1)..(575): unsure at all n locations; Clone ID: LIB3602-090-Q6-K6-B12
gnaacattgtaacgcgatccaattgcccgccgcccgtctggcgcctctcacctggaaccctgcccgcggcctctcgctaggaactcgctgaaggggccaggctgagcagccatggcggtgccgccgttccacctagcgtttcctgtgcacagcattgaggcggcacgggacttttacatgggcaagctaggctgcagcgaggggcgcagcgcggagcgctgggtggacttcaacatgtttggccaccagatcgtggcgcacctagtcgacggctactcggcagcagccagccacaacaaggtggatggagaccccgtgcctgtgccccactatggcgtggccctcggggtgcagcagttccagcagctggccgagcgctgccggcagcagggcgtggcgtttgtgatagagccgcacctgcggttccagggccagccgggggagcagtggaccatgttctttctcgatccttccggcaatgcgctggagttcaaggcgatgaccaacccggacaacctgttcgccaagtaccgggtcgactgaggaggcagtacgaacacacgcactgcagttgc

SEQ ID NO: 6366 - DNA, 573 bp, Chlorella sorokiniana
  unsure (1)..(573): unsure at all n locations; Clone ID: LIB3602-090-Q6-K6-B2
ccgggtttacccagcgtttgttggcctgcaccgtgtgcaagggggggggagggacgccatcaagcgctgcaagcacttcgagatcggcggcgacaagaaggtcaaggggctatactagtaaaaaaaagagagcggcaggcggagagcatgaccgagaaatggaggcagcggcgcccgctcaccctgggcgggcgggtccgcngggggcgcctcgctttggccgcctctggccactcgtacgcgggcgtgtccatgcccttgtgcttcctgagctgcccaacctggcatgcaagcagcctggccgtctgtaatgccattggcgtgtganananannnnntanntnntnntgttttatgtggttttttttgttgggttttttttatggtgggaaaaaaaaaaaggggcggccgttttgggggttccaggtttacgtccccgtgcttgccacgtctttgcttttttttggggtcccctattttcatttcactggccggcgttttccaccgtgggggttggggaaaacccgggggttccccatcttatttgcctgggggcccttcccctttttgccc

SEQ ID NO: 6367 - DNA, 466 bp, Chlorella sorokiniana
  Clone ID: LIB3602-090-Q6-K6-B3
gcgttcgcgccagtcggcggtggcatgagtcggggggcgcttgctttgctgctctagcgcaatttgccggcctggtgctgtgcgctccggacttgatggagagtgctgcggagttgtggacaatagtcacaaaaaaaaaaaaaaaaaaaaaaaaaaaaaaaaaaaaaaaaaaaaaaaaaaaaaaagagggggggagaggaaaaaaaaaaaaaaaaagggcgaacgttttaaaaggagggaggggttaagaacacgtccatgcaaaagtaatacctttttttatagggccacctaaaattcatttaactggccgtacgttttaaaaccttttggattggcaaaaaccttggtgttccccaacttaatccgctttgcacaacatccccttttcgccagttggcctaatagaaaagaggcccccaccgatggcctttcccaaacgttgctcggcctgaatggtaaatgg

SEQ ID NO: 6368 - DNA, 584 bp, Chlorella sorokiniana
  unsure (1)..(584): unsure at all n locations; Clone ID: LIB3602-090-Q6-K6-B4
gcgttcgcgnacttcaagaggacggcctgggctacctgggcaacccctccctgatccacgcccagtccatcgtggctgtgctgctgacccagctggtgatcatgggcgccgccgaggcgtaccgctacagcggcgagggccccgtggagaccagcggcgactccctgtaccccggcggcttcttcgaccccctgggtctggctgacgaccccgacaccctggctgagctgaaggtgaaggagatcaagaacggccgcctcgccatgttctccatgttcggcttcttcgtgcagggcctggtgaccggcaagtcccccctggaaaacctggctgaccaccttgctgagccgtctgtgaacaacggcttcgcgtccgccaccaagttcctgcccctggcctgaacgccgtcgtcaacctggagcgacctgggcatcccatattaacggcggccagccggttttggacaagcacacacaatatatgagattcccaacctccctgcgcactgcttgtaacaatcctggctccctcttgtacccttgacccgcactcgggcgtggatatgtaacgttccgcgggaaaaa

SEQ ID NO: 6369 - DNA, 574 bp, Chlorella sorokiniana
  Clone ID: LIB3602-090-Q6-K6-B6
gcctcgccgtccagcgtgcgcagcccctggtggcccgcgtcgtggacattgatgtggaggcgcaccaggcggacctgctgaaagcagaccagctgcagcacgcggatgcgcagcagccgctagcagcggagccagcgtcgtaggcagcagcaagggcgtcgcactgcacaggccggccatgcaggtgcagacacccgtgcagccaataccctgacgatacataagtaggtgcagaaagctggcgccagaaagcagaaccgtggcgccctacgcttgagagcatcagagccgcgtggcagcgggtgagaagacccagccccgacccgctgccgcgctttcctccttccttttccctcttgaggcggtcggtttacaccgccccctccatgtaccacccaccggatgctgcagcagccgtgccgtgcaccctttgcgtgtgctggcatcgcgctagtcagtgattgtatttgctcatcatggcccgaagctggggtttgctgcctggctcgcgccgccgccttcatccccaaaacccctgtacgatctttaactcccacgctgctgtaccctcaat

SEQ ID NO: 6370 - DNA, 563 bp, Chlorella sorokiniana
  Clone ID: LIB3602-090-Q6-K6-B8
gcaacccgtgtcgaaacgacccttcccaacgcatgtccagtgtgcctcgctatcagaggcttttgcaagcgacccctcttgattgtctgcattgggttgtgtggccagccacgcgcattagcgcaccgttttcccctctcttcatcgcagccggcggcttgatgctgccgaagcttctgcccttctgatcgcatgtgcgccaattgattgcgccagttgatccattttcactctgttttcctgagttttgcagcacaccgtggtcagtgatcctttttccccagctgaccgctctatcacaccctccggctgtccctcaacaacccaaagccgcgtgcctcacctgtgttttctgaaaagctgtgccactgcctccaaccggatgtgaaatgatgtcacaatgtaaactactcgcttcggcacgaagcggaagcggcatgaagcggcagcaaaccgctgccccccccccgaacccgcgggcgggcgattctataagatccaagttttgctcagctggcatggcaactgcatggctattgtttatgggcacctaaatccaattc

SEQ ID NO: 6371 - DNA, 271 bp, Chlorella sorokiniana
  Clone ID: LIB3602-090-Q6-K6-B9
cgcagcagccgccagtcagctgcaagtgtacttcagcctttgttgaactcgctgccgcctctgattgcgccagtcagcagctactttgcccaacacacgccggggggttccctgggcgggcttccatcccgagcaataatgccatgcagcgctgaacgccacacgacacacccctttcagagaactgcctttcatctcgccctcagctgccatcccctgcctagcgcgatagcgtgcatgcaggcatggcacatgtaaatacactgctgag

SEQ ID NO: 6372 - DNA, 583 bp, Chlorella sorokiniana
  unsure (1)..(583): unsure at all n locations; Clone ID: LIB3602-090-Q6-K6-C1
cccggttcgacccagcgttcgntcacctggctcccaagctaaggcgtcccccagcagaagcggccaaggccgagaagcccgccaanaaggagaagaaggagaaggaccccaacgcgcccaagcgccccctgtccgcctacatgttcttcgcctccgacaagcggaaggagctcaaggagtcgcagccgggtctgagcctgggcgaggtgggcaaggccacgggcgaggcgtggaaggagctgtcggacaaggagaaagccccctacgtcaagaaggccgaggccgacaagaagcggtacgaggcagagaaggccaagtacgagtccagcaagtgagcgcggcaaccgacatgcagccgactcacccaccgattcccacacccgccctcggcggcacctcttaccgcggctcggcagcgcgccgtgccgcctgacctcttgaccctcatctctgtacgccaccactaagcccgcagctgcaaaacctgccctcgcctcggatttttgcacacccacggacgccctcctctccccaacacatatacttggaccacactgcctctggccatgttaaatcgctgtgc

SEQ ID NO: 6373 - DNA, 474 bp, Chlorella sorokiniana
  unsure (1)..(474): unsure at all n locations; Clone ID: LIB3602-090-Q6-K6-C10
gcgttcgcntcagggtcccaattggcaatgtctgccacagtgactgcattgggtctctgtgattcttcacaagtgcgctgctgcaggcgcttgtgttcattgcatccacacccataactctgctacttctccccgcccggtgcgctacacccacccctccccgtctccatgccatgctttcccccggagcctctctctcccgcccattttgtcagcagcctttctttcattcctcggctgtgcggcagcgccgagtcctgcagtcattctgcatggcaggcgggtgtaatagcgaggcgtggnnnanaannnnnannnnnnnnnnnnnnnnnnnnnnnnnnnnnnnnnnnnnnnaaaaaaaaaaaaaaaaaaagggccgggccgttttaggggtcccaagtttacgtccccgtgcttgcaacgtaatagtttttttttggggccccctaatttcatttcactggccggggtttt

SEQ ID NO: 6374 - DNA, 369 bp, Chlorella sorokiniana
  Clone ID: LIB3602-090-Q6-K6-C11
cgcttttgctgtccataaccacctctgcccttgatcttgttcagccaggtcccttgcgcacctgcccatcccctgttcccacccgcccgcccgtcacctgaacgacttcattcccgcctgctctgctttgtgtgcccgactcccgagcgcgccagtgacctcgcccccccactgttcagatacgcctaccccctttcttggcgcgctccccctgccaacacccaacccctttgttgacatgccaaagctgtgtgcaatgcagtgacgacctgtttttctccgcccagtttgcttctttataaacggcagcaaaagcacttgttggaacgcgctgggataaccatggcggtcctgtaactatattcaaca

SEQ ID NO: 6375 - DNA, 320 bp, Chlorella sorokiniana
  Clone ID: LIB3602-090-Q6-K6-C12
gcgttcgcaatcggcgcccccggccgcgcgccccccgtctgtgcgcggccggccgccctgcactgcaccgcctttgatgcaattgcccagcgaatttcgctgcccgcacacacacacacttgcgtttcatgcctgatgagtagaacgccctcgagccacgcacccacctaccaccccaaccacaccaacctgcaccccggtttctcatctttgattcagccgcccggttgaggctgccggaggctccatccccttcttttccgctttcattcgtcactacactttgagttttgcggctgtggttgtaacgcaatttttgt

SEQ ID NO: 6376 - DNA, 574 bp, Chlorella sorokiniana
  Clone ID: LIB3602-090-Q6-K6-C2
gcgtgcggctgcacacacacacacccttactccgcccctcgctgccaacactctccccctgcaggtgcgacctgtatgtgagctgcgagccgtgcatcatgtgcgccggcgcgctgagcctgctgggcttccgctccgtcacctttggctgccccaacgacaagtttggcggcaatggctccatcctcagcgtgcaccaaacgggctgtggcggctgtggcagcagcgccagcgagacacagcagcaggaccaccaccagcagcagcagcagcagcagcagcaggaagcagagcaaggagcggcagcaggcagcagcagcgggagcagaccatgccaacagctgccgcagggcgcagcacggcagcctgggcgggcctatcccagcaggggagggctgctagcagccgaagctgtcgaactcttgcagcgcttctatgcggcaggcaaccccaacgcaccggcgccgcatcggccggtgcgggagcggccaacggcgccagccatgctagacactgcggccatgcagcttggttgatgcaagttggctctgccagtgttgctgcacattccact

SEQ ID NO: 6377 - DNA, 572 bp, Chlorella sorokiniana
  Clone ID: LIB3602-090-Q6-K6-C3
cccgggtcgcccagcgtttggcggcgcgcatacagctggggggggtgtgtgccgccccacggctttgcggaggatgcgactcgaccggtgtgtagcaagcgcggtcgcggctttgtgtacgtgcacatccagccgcacaccagtgcatcctgacagatcagggcggctgggccgtggacttgattggggggggggagcacattgaccaggacttggcagaggtgctgcgggagctggaggcccgccgcccgccagatgcgccgccggtcaagccgctggagggcagcctggagaatgtcaacgggcgcggctgcaatgagacggcagaaggccacaccgtggccaaggagcagttttgcgatccggtgcagtactacacagggcagcacgcggcctgcttcggacaggtgcggcaccactaccacagcgatgcgcacgagctgcagtttgggcccgcggagttgagcagtgacggcacggttgtgcagtagccgaggcggcggcagcggcggcggcggttggctgccgcgtgcatcgcattttgtttcccagcccttgatttccttaaattt

SEQ ID NO: 6378 - DNA, 480 bp, Chlorella sorokiniana
  unsure (1)..(480): unsure at all n locations; Clone ID: LIB3602-090-Q6-K6-C4
gcgttcgcgcttgnacgaaccatcgcgctcatcaatgccaacgagcacggcaacggcacagccatcttcacaggcagcggggcggcggcgcgccgcttccagagcgaagtggatgtgggcatggtgggcatcaacattcccatccccgtgccgctgccattcttcagcttcacaggctggcgcgggtccttctatggcgacctccagatgtacggcaagatgggagtgcagtttttcacgcgcaccaagacggtcacgcagtcgtggaaggacgccgacagcaaggccatcccaggcctggccggtgtgggcgcaagcacgcctggcggcaagcactgagcggcctggcttacggcagccggccagcccggcgggagctcttgcgacagccagagttttgtatatctaccgattgttgtatcacaggtccagcccagcagttcaaatggggcagtgttgtaatgcatgcgtatatgtaaa

SEQ ID NO: 6379 - DNA, 190 bp, Chlorella sorokiniana
  Clone ID: LIB3602-090-Q6-K6-C5
cacagagctgactggcgtggctggtctgtgcatgcggcaaagctttctgccacaggcgcagcagggctggctgactgcgggagaaaccggatgagcctctactgcattttagctgctgttgtacctcatacctgcccgtccctgtggtgttgagcgtttgcatgcacacggttgcaagttggaatgtgat

SEQ ID NO: 6380 - DNA, 585 bp, Chlorella sorokiniana
  unsure (1)..(585): unsure at all n locations; Clone ID: LIB3602-090-Q6-K6-C6
gtcataaacaacccagcgccctctcccctcagcactgccaggttttccctgtcgccctccttgctttcccctccctactgccgcccgttcaggcatgcacaggtcaccccatcgcatgacaactcactccaccccaacctgaacaatgacttgtacctgtgtaagcgtccagctgtgaaaaaaaaaaaaaaaaaaaaaaaaaaaaaaaaaaaaaaaaaaaaaaaaaaaaaaaaaaaaaaaaaaaaaaaaaaaaaaaaaaaaaaaaaaaaaaaaaaaaaaaaaaaaaaaaaaaaaaaaaagggggggcccctttggaaaaaaccaaatttaccgcccggggtggtaaaaccttaaagttttttaatggggcccccaaaaaaaaattaccggcccggcttttaaaaccgtggggggggaaaaaccctggggttacccaaattaaaagctttggaaaaaaaacccctttttccaagggggcgtaaaacgaaaaggccccccccgaaggccctttcaaaaaattgccccntcctaattgggaaaagggaccccccctttaacgggcaattaaagggggggggggggggg

SEQ ID NO: 6381 - DNA, 214 bp, Chlorella sorokiniana
  unsure (1)..(214): unsure at all n locations; Clone ID: LIB3602-090-Q6-K6-C7
acgcgtccgnaaaaaaaaaaaaaaaaaaaaaaaaaaaaaaaaaaaaaaaaaaaaaaaaaaaaaaaaaaaaaaaaaaaaaaaaaaaaaaaaaaaaaaaaaaaaaaaaaaaaaaaaaaaaaaaaaaaaaaaaaaaaaaaaaaagggggggccgttttaggggacccaattttacttccccggccttgcaaggtaatattttttttttggggccccc

SEQ ID NO: 6382 - DNA, 569 bp, Chlorella sorokiniana
  Clone ID: LIB3602-090-Q6-K6-C8
gtccccttcaccaggctacggctttggcggcatgctgaccgtggagctgcccaatctggagcgtgcaaagctgttcatggagcgcctgcagaacaagcacggctttggcctgatggcggtcagcctgggctactttgacacgctgatgtcggcctcggcggcctccacatcctcagagctgtctgacgctgagctggcacgtgccggcattagcggcgggctggtgcggctgagcgtgggcctgaccggcagccaggcgcagcggtgggcacagctggaggagagctatcgccacgtggcgggcgtgccgctgagtgtcaaaccagccttcaaggcggtgcaggtgacgcgcacgcagggcggcggcctgaagcgcactccctcctggcactcctttggcaccctggacgacacagacacggaggaggatgcagacggcaccagcgtgctgacaaccgaggcagctgcgctgctgggcacgcccagcgtgaaggtgcggcggctgaacagcggcgccgaaatcatctacaggcgcctgctgccccaggcgccagtcgccggcgcagctg

SEQ ID NO: 6383 - DNA, 517 bp, Chlorella sorokiniana
  unsure (1)..(517): unsure at all n locations; Clone ID: LIB3602-090-Q6-K6-C9
cagncgccgntgctgtgcatgagtacaagctgcagacagcagctgctgcggcggcggcaacggcctcacccatcaaaaccgaggtagaggccccgcagtccgctggccccggccggactgcccgccccgccaaaggcagcgactcgctcagcagccgcagggagagacagtggctgtaacgccggctgcgccgcaagtcaagaccgaaatggacgcgccacaggtggcctcccagcagctctgacagctgcagcagcggcagcccgcaggtctccgcggccctgccccccgcagcgcagcttgcggcggctgagccgctgcacgcacacgcagcagtggcgccagcagcgtttgaggtggcggccgatgcagcagcagcgctgcagtcgtttaggcggccgcgcagtcgttgtgcaaccttctactcttttctgtgctgcgctgccgccgctgagcaaagctcaagccatacggtgtgctgcaaaattggcagcaatnggaaaacaaaccaacccca

SEQ ID NO: 6384 - DNA, 381 bp, Chlorella sorokiniana
  unsure (1)..(381): unsure at all n locations; Clone ID: LIB3602-090-Q6-K6-D1
cccggttcgacccagcgttcggttgncctgaccanagtgctgtgctcctgccgcttcatcaacaatcccatgcctcctcaaagaacatgcccgggctggcaaagcctgctaccacatcccgttgattactgttgagtgccaatagacgtttctgcaagctgctcctcacccctgcaccccttccgctctttagcacctgttctgtgctcccagcacctctcccgctctctactgcccctcctgctgccttctcgcttcctcggcttgcactgggtgcatcagcggctgacgccgctgcgctgccctgctgtgaatgctctagcctccctggctgccacaaaagccctgcatccgcaccacccctcggtgctcttttgctgt

SEQ ID NO: 6385 - DNA, 340 bp, Chlorella sorokiniana
  Clone ID: LIB3602-090-Q6-K6-D10
ccgggtcgacccagcgttcggctgcagcgtgctgcgcgccagccacccagggatcaaagcaggcccggggcccctggggcttggtgcgcacgccagctgcggctttgaagcgcgaaaatgcggccagccgggcgcgctaagtgagagccgcgcggcgcggcagtcccacgaagcaggcctggggcccagtgactggcagcctcccatgcgcggcgcgccgatctctgtaacagtatggcaataaaaaaaaaaaaaaaaaaaaaaaaaaaaaaaaaaaaaaaaaaaaaaaaaaaaaaaaaaaaaaaaaaaaaaaaaaaaaaaaggggcgggccgttttaaa

SEQ ID NO: 6386 - DNA, 486 bp, Chlorella sorokiniana
  unsure (1)..(486): unsure at all n locations; Clone ID: LIB3602-090-Q6-K6-D11
ggcctgtccctggnagcttgcggcatcagcgatgactcccanagtacatcctgatgcgcctgctgggtggtgccaagaagcgcaagaagaagacctacaccaagccgaagaagcagaagcacaagcacaagaaggtgaagctgcgggtgctcaagttctacaaggtggacgacagcggcaaggtgcagcgcctgcgcaaggtgtgcccccagtgcggccccggcatcttcatggccacccacttcaaccgcgtgtactgcggcaagtgccacctgacgtacgtgtacgacaaggagggccagaccgcctaagcgccccgctcccccctgcggatgcacgcttagcagcagcacacgcggcgggtgcgcccggcatgccggcacaccagccacggagcggcggggcgtccctggcagcggcgcagcgcctgcaagcccttctgttgtgttctgtgccgctgtaatacccctgctgcaaaanaaaata

SEQ ID NO: 6387 - DNA, 585 bp, Chlorella sorokiniana
  unsure (1)..(585): unsure at all n locations; Clone ID: LIB3602-090-Q6-K6-D12
ccacgccgtccggnggggacttcagggaaccggtgcaggcctgcagtgacacgaatccccgctggtcgtcagctctcaaaacccggtgaacgcggccatcatgtgcacgggcagcccaatcacctggaagcacatgcaggtgctggttacgacggaagcaggcaccggcatcagcgggaccattcagaaggacgtcaccaccgccgcctgcgtctacacctgccaggacctcctggagcagtgcaccattactgcgcagtgctgcgactcaggcccgggcatcattcggcccatcacctgtgccgatgagatctgcactcagactgctgatgcacctgttgtagtgtcgggccccactggtgacacagacggcacccactctcgtctatccgtcaccatgaacgaccctgaaacttacggcctggccgtcaagcagtactggttcaccgccaccaaccaagccgacacgacaaaagtgctgtcgggctacagcgactcggaccccaggtgctgttcagctcggaggtggcggcgtttgaacccttgctgtgcacgagcgccgtgatcacatggggcagcatgcag

SEQ ID NO: 6388 - DNA, 366 bp, Chlorella sorokiniana
  unsure (1)..(366): unsure at all n locations; Clone ID: LIB3602-090-Q6-K6-D2
cgcagggacaccttggtnnntggcaaggggnnctcggcnnngcccgcnacccgctgcnnggcagnnctgcgccccactgtgcnnnattgcnntagcacncnncagcaactnnnctgcccgnannntcccgggnaagnncgcgcnnccagtagcccccgcagnncgatgcccgcccgcgccgcgaccagcgggtggacgtacnntcgagtgaaggacccgtggggccccggtggtnngggcgaacaagggcnngctctacnngtctaactactnnngcaagtacccagtggnncaagcacccgcgctgnnacgacncnngactgcannnacctggcnnncacggcgccccgcgcccgcncccgcacc

SEQ ID NO: 6389 - DNA, 569 bp, Chlorella sorokiniana
  Clone ID: LIB3602-090-Q6-K6-D4
gcaaagcagcctagcggcaggcaccaccagcgggcgtgcatcccttgcacgactgcccagcggcaggggcatgtccgccgccaagccgcgtggcagcaggatggcttccctgcccggcgacggcgctggcaaggtggcgggcacaggcgggctgggcagcagcgccgccaagcatgcagatgaggaggatgaggcggtgcagcggtcggctgcgtcctggagccacccagccgcggccaccaatgcaggccgggcagccgctgtccgcaagtcgtccgccagcgctgcacgcctgtccatgtgcaagcagctggtggctgggcccagcggcggcagcgccaagcacggcatgcacaagccggccgctgctgcaggagggcactcaccgcccacggctggcagaacgaaacactagagtgcgcaagcttgccaatatgccctaacatatagtgaggggcgacctggtgagcccgcctaccagttagcttagatgattgcagtattgtgtcaattgctcacttgccaacttcttcccctgcctgccatgccttgctgaaatccgttggcct

SEQ ID NO: 6390 - DNA, 557 bp, Chlorella sorokiniana
  Clone ID: LIB3602-090-Q6-K6-D5
ggtcgggggcatgaatgccattgaggcggccattgagcgcctgtccaatgccaccctgagcacatgtggtgtacgggaccggcaacgaggagcgcctgaccggtaagcactagacgtgcgacatgaacactttccgcttcggcgtggccgaccgcggctgctacatccgcatccccctgcccgtgcagctgggcggtaagggctacctggaggaccgccgccccgacgccaacgtcgaccgctacactgttgcgctcctgctcatcaatgaacaccctactctgagcggcttgaccaaccctggcggtgtgacacggcccgctgatggcatcccgcgcccgcagccggccgatcgctgctgattgttgcaagcagaccctagatagcgagcaggcggcacggtaagccgggcagccagacgacgaaccttacctgtgcatgtgtgcgcctctgcactgctgttgcagatacacacccgtattttttacatcagttggggcgcctgccatgcgtgtactctcccatcccaagcttgacggcgacacacgcccggatgg

SEQ ID NO: 6391 - DNA, 595 bp, Chlorella sorokiniana
  Clone ID: LIB3602-090-Q6-K6-D6
cccacgccgtccgtaaaaaaaaaaaaaaaaaaaaaaaaaaaaaaaaaaaaaaaaaaaaaaaaaaaaaaaaaaaaaaaaaaaaaaaaaaaaaaaaaaaaaaaaaaaaaaaaaaaaaaaaaaaaaaaaaaaaaaaaaagggggggcctttttagaggttccaattttccttccccttgcttccacctttttattttttttttggggcccctaaatttaattcccttgcccgcgttttaacaacttgggacttggaaaacccttggttttccccattttattccctttgaaaaaattccctttttccccagttgggtaattacaaaaaagccccccccctttcccctttccaaaattttgccccccttaattggaaattggacccccccttttagcggccttttaaccccgggggttttgtggtttccccccagggtaccctttacttttgccagccccttagcccccttttttttgttttttttcctttcttttttcccccttttcccggtttttccccttaaagttttaattggggggttccttttagggtcccatttaagggttttacggcccttaaccccaaaaaatttttttg

SEQ ID NO: 6392 - DNA, 569 bp, Chlorella sorokiniana
  unsure (1)..(569): unsure at all n locations; Clone ID: LIB3602-090-Q6-K6-D7
tgcagctgcaaaaaagggcatgnactgggcgccctgtccatgggcggaccggactacagcggcggcacgtttactgacgaccctgctcccaacgtggcggctcccgcctgcgagatgtgccctctttcgactcgtttgagcaagcggcgcccgaggctcccaagccccgcaagaccaccatcaccctcaacctgtcccgccagatttcggggtttgagggggcgcctgcgggcggcgaggcgcagacgcccggagtggactcgctggggcttggggcagccgcagtgcccaaacggccgccgtccacggcgccccgcaaggcgcccacgcctgtgccgcagccggcggtgcagccggtggagcaagggtaccagcgtaaccggcgcgcagcggcggcgggggtgcacgctctggccgctgaggtgtcggccatggaggaggacgatccagaggagcagcagcatgtgcagcatgtgcagcatgtgcagcagcagcagcagcgcggcgccgctccgcagctgcaaatgccgcatgtgcaagtgcagcaggtggcgccggcgcccacccat

SEQ ID NO: 6393 - DNA, 590 bp, Chlorella sorokiniana
  unsure (1)..(590): unsure at all n locations; Clone ID: LIB3602-090-Q6-K6-D9
ccacgcgtccgnaaaaaaaaaaaaaaaaaaaaaaaaaaaaaaaaaaaaaaaaaaaaaaaaaaaaaaaaaaaaaaaaaaaaaaaaaaaaaaaaaaaaaaaaaaaaaaaaaaaaaaggggggccgtttataaaggatccaaatttgggaaccccgtgggtgggggacccctttttttgttttctggggtcccctcaatttcatttccggggccgtggttttccaaggggggccctgggaaaaaccttggggggcccccatttttaatcgctttgcggggggtaccccctttggcctgccgggtttttagcccttgggcccgcccccttttttctttcccaagggtggcccacccctgggtgccctactgggccgctccttcaaaggggggctttaagggcggggggtgtgggggtccccctcagggggccctttaccttggccagcgccctgggcccccgctcctttggtcttttcctttcctggccccttgggccgcggtttttcccttttggccttatttgggggctccttttggggtttccctttaggggtttacggtggggggcccctttaaggttgtttaggggggt

SEQ ID NO: 6394 - DNA, 583 bp, Chlorella sorokiniana
  Clone ID: LIB3602-090-Q6-K6-E1
aaaaaaaaaaaaaaaaaaaaaagggggggggggagaggggaaaaaaaaaaaaaaaaaaaaatataaaagataaaaaaattaaaaaaaaggggcgtgcgccgtttttagatcttcttttcttgttccctagtttccatatcctcttgaccgcctttttttttcgtcctgcactggtgaaaaccctggggtgggggggggggggacctgcttggcgggaaatccccctgtttgcccgcgtgggggggtggggttgcaggccctttctttttcgcccttcctctccttttttcaggctgcctggctattggccctctccctgttgtggcgcctttttcccggagttttgtggtgccttcttggcggcggtgtccgttcccctgtgccggggcctttatcccccggtgttttcgtttttttcccttcctttgtcgtctcccttgcttgttttccttgtctccctttttttggggggctccctttgtttttccgctttgttcctttacggcgcctcccccttttggacctcgtttttgtttttgggtcccctttcgccccctttcccctttttgcccgtttttccccc

SEQ ID NO: 6395 - DNA, 573 bp, Chlorella sorokiniana
  Clone ID: LIB3602-090-Q6-K6-E10
caaataataccccctgccaattgccatcccatcgcgcttgttgcgcccgactgtcaagccgtctccctctcctgggacccccttttgccctctggagtgtccctgtttttcctgctgtgcgttttcagctttttctgctttgagcctcctgcccgctcatccgccgctcatgtgcccagaccacccccccgtgttttgatttgtgcgttccaatgccctgccccgccccgcccattagccgtgccggcacaccgcaattgatttgcccctcgccggccccagccccctgcatacctgctgccccaaacgaaatgctctgtactctcccccacgcatctggtatggcatccctttttgtgagcttcctactgccgctgccccggcccggcgcctgaggcgccctgcgctgcgcagcacagcagttgaccaccctcccgccctcttcttttcccaatcacagcactgtaccccccactcactcccacccgtcaactcgtgcgtcgcactgatatcagagccccctgccccccttccgcgcatgagtcgcacgcccccacaaataaaccatataca

SEQ ID NO: 6396 - DNA, 398 bp, Chlorella sorokiniana
  unsure (1)..(398): unsure at all n locations; Clone ID: LIB3602-090-Q6-K6-E11
ggncaaccaccgctcgggcaagattgtggtggagctgaacggccgcctgaacaagtgcggcgcgatctcgccccgctacgacattgcggccaaggacattgaggcgtgggtgggccgcctgctgccctcccgccagttcggccacatcatcctgaccacctcccagggcatcatggaccacgaggaggccaggcggaagaaggtgggaggcaaggtcctcggcttcttctactgagcggccttgttggatgcgccgcagcagccacggtggaccacagccgtggcggatgcagcacggccggcgcgcccggccgcggtgtttgctgcagcaccggcggcagccctgggtgctgcccccctcttagattgctgcaccgcacggttgtaacagaggttac

SEQ ID NO: 6397 - DNA, 452 bp, Chlorella sorokiniana
  unsure (1)..(452): unsure at all n locations; Clone ID: LIB3602-090-Q6-K6-E12
gcgttcggctggttgaggagcaggaaaacgtgagcgtgtgcagctggcggacgagtacatgagcggcgcggccctggcgggcgccagcggcagcagcctgcccgagggctaccgcgctcggtagagagttcaagccaatgtcattattgccgttcgcgccatgctgcaccggcagctgggaacatgggcggctctgctttacctgcagcttgcaccacctctgcttgcatggtaccccgcatgccatcccttgacatacacacaagcactcgctaaaccagtcaccttgccttgtcttcgcgcctctctgattgtggacggcgcccttgtttcgcggcgtctctgcatggcgcccaagcaaaatgtcctttcatcggcctaagctactcccccttgactagccatctgataccatttcatcctatgtttccactgtaagccagaaggacana

SEQ ID NO: 6398 - DNA, 563 bp, Chlorella sorokiniana
  Clone ID: LIB3602-090-Q6-K6-E2
gcgttcggccggcgcccggccggggaactggtggctgggtgtgcaccaagagatgacggacgaagtggcggctggcgcactgtctggagggctgatactacgtgctgtacggggacagcattatggaggcgttccgggggcagacgtgggctgtgacgccagcgaccggtacagcgaaaacctggagggctggagccgcctggagccgcccaaggtgctagtggctggaatcttaagagaccaagcggtccacctgctgtggctggtgtgaatgaatggggaggggccgcgggggctcaaccccaagccgtttcggtcatgattggtaccaatgatgtggcgcacctcagttacatgcatgggtacaacgccagccggatagggcacattgcggagctgggcgcgcaaaaccgcgtgcgtcgagctgcagcggcaggtgccacaggccaccgcggtggcgctggtgctgctgcccatggaacccatgatgctgcaagctcctcagctcatgtttgggcccatggtggcggcagacaatgcggagctgcatcagtatgtggcgg

SEQ ID NO: 6399 - DNA, 587 bp, Chlorella sorokiniana
  unsure (1)..(587): unsure at all n locations; Clone ID: LIB3602-090-Q6-K6-E3
gcgttcgtgctgacttgttggcgcctanagaagggccacagcctgcgccgagagcgaatcctccaagagaaccacaatgaagtttgagctggacgacgacacggtgctgcgcctgtcgggcgtggccaccgccgcttacagcgccacgctgctggtggtgccccgcacctcccacgacatcttggagggagcgcagaatggatccacggccagcgacgagcacatcggaaccgcccgctggtttggtgcagcgctggcgtgtgacgccgccaccaccctgtctgtggggctgtctgagggcagccaggatgccaagcgcaacgcactgcgcgcaaacggcctgtgctgggtggcctgcggcggcatgcacctctacaacgccggcgctggtgtgcagaagaaggaggttgcctactcgtccgctgcgctggcaggcgtgctgggggcgctgtgcctgtggcgcggcttccgcaacaacgatgacgatgccaaggagctgtgagcttcaacacaatttctgacaccttttgtgtttgatgcgttgcacaactgatgggaacaatgagcaggacgcccaggcatgtgga

SEQ ID NO: 6400 - DNA, 570 bp, Chlorella sorokiniana
  unsure (1)..(570): unsure at all n locations; Clone ID: LIB3602-090-Q6-K6-E4
gcgttcggttctagnacgcgagcgggcccttttttttttttttttgcttttcctctttttacagtgccgcatgcatgggcaaaaccatcagtgcatgtcacttcctgggacagccagcccggccgcgaccggccagcagcgccggccgcaggcgcgggtgctagtcatttgtgcgcgccggccgggaggcctggcagcgcggggtgctatactcgtggctcttcacacgcggctgcaggggcggaggcccccggccgcgtgctcctcactgtgggcgatcagtctcctccgacgcccgtgcaaggtgttgctccatcccaacaagagaggagtgcgagtgccgctgctacgggctgcccgtggacatcacaataaccgctgcccagcgccaacactgccgctagcgggggcgcgctcagtcgcccttccggcggaaggagcagccctcggtcaggcgggccttgccaccggtgggcacgcacagcacggtgttgcagctggggcacaccaccacggtctggctgtggctgaacacagtcgtgatggtgaagcagccctggcacttcacat

SEQ ID NO: 6401 - DNA, 533 bp, Chlorella sorokiniana
  unsure (1)..(533): unsure at all n locations; Clone ID: LIB3602-090-Q6-K6-E5
gncgctcatgaacggcattgagtacccgcccgatgagactgtgcgcaaggagctggtggcccaggtgcgcaaggccattggccccattgccacccccgatgtcatccactgggcgcctggcctccccaagacccgctccggcaagatcatgcgccgcgtgctgcgcaagattgccagcaaggaggaggaccagctgggcgacacgtccaccctggccgaccccggcgtggtgcaggtgctgctggagctgcgcggcaagtaaactgcgatagtatgcacttacgcgagtgacaccggcagcccggctgcccgcccgcccaacagcgatacacagagccggccccccacgaacgggcggcggttgaacgagccacccctaacctcatgcaccctgaacccaatgcctttgcctgtttccgtttccctgccgctccgctctctgaccgctcagtctctccgggggctttgtcgcacgcactcgagttttccccagtggggggcgcggaccatgcgcccgcccctcgagccccatt

SEQ ID NO: 6402 - DNA, 570 bp, Chlorella sorokiniana
  Clone ID: LIB3602-090-Q6-K6-E6
gcgagcgcgtgcactgccgctgggccatgctcggcgtggccggcatcctggtgcaggagattgtgaagccggacgtgttctggtacaccagcggcgccaccgtggagctgccctttgacatcaccggcctgctcgcctttgagctgttcgtgatgcactgggttgagtcccgccgcggctacgacatcaagaagccgggcagcatggaccaggaccccatcttcagcaacttcaagctgcccgcccatgagcccggctaccccggcggcatctttgcgccctttgtgcccggcagcctggaggagctgaaggtcaaggagatcaagaacggccgcctggccatgcttgccttcatcggcttcaccatggctgcccaggtgacgggcaagaacccgctggcggcgctgcgcgagcacctggacaaccccctgggcaccaccatcttctccaaggccgtggtcgtgcccggccaggcggtcgtgcccccctgcgccatccccgacaccatcgagttcaacggcatcactatcccggctggctgcttcctgcactccctctggccttgagcat

SEQ ID NO: 6403 - DNA, 572 bp, Chlorella sorokiniana
  unsure (1)..(572): unsure at all n locations; Clone ID: LIB3602-090-Q6-K6-E7
gcgcctggctgggtcctctcantacgggttcccagctcagcatggccgacatgtttacctacgagggagtggcgcgcctgctgagcaaccgcagcgcggtcctgcccgcctgggtccactacgttgcattcgacctgtgggtcgctcgctgggaggtgctggatgctcaagagcgtggcgtgccccagctgttgatgctggcacccctgttctgcacaatgatggccggtccagctggcctgctgctctatctggcgctcatccgcccatggttcagcgctagcgctgggcgccgcggcggggccggcaagcaggattgaacagtggatgttggcacgagtgcacgagcgccagcagctgcacagagagcaagactggtggagtgagggatggatgctgccggccagccgctgcaaggagtgactgagagagttgcacagggtgtgcctgtgtgcgcccgcggcatacagacaagcatgaacattcaagggctgcgacccagcgctctgcgcagttctaggcggctcagtcccgttttgtatgttcagctcacagcaagttgacaaattttg

SEQ ID NO: 6404 - DNA, 332 bp, Chlorella sorokiniana
  unsure (1)..(332): unsure at all n locations; Clone ID: LIB3602-090-Q6-K6-E8
cggncgcgtgggcgcngacggccgctcgcgatctagaactagcccacgcgtccgggcagttccagcaggcgggcctgggctggcgcctgggccgcccacatggctggagctcgcatgtgaccacctgccgccgcatactagcgattgctgctgcctgaccgctgcatgccaaacgcgcttgtcctgggccatgccacgccgtctattttgtgagagcacctagcttgaatttttgcaaccccgctctgtacacgtgcccattccttggttttccccaacgatgcccttgatgtccttgatgtgcacgccttcgtttgtaaacctgtgacttc

SEQ ID NO: 6405 - DNA, 580 bp, Chlorella sorokiniana
  Clone ID: LIB3602-090-Q6-K6-E9
tgctcccgccctctccctgcggcacaacaccctctctcgcgctcggcgtgccagccgcgccacgatcgccacccgcgccaccagcgaggattctgtcgtcgagaaggccaagggagccctcaactctgccaaggaagccgtgggcgacatgactcagaaggttaaggagagcctgtcccctgctgccgaccatgtcaaggaggctgcccgcgaggtgggcactgccgtgaaggaggacgccaccaccgccaaggacaaggtggctgatgccgccaccgccgccggcgattccgcaaaggccaaggcagaggccgccaagcagcgcatgtcggaggctgcggagggagctaaggacggcgccgccgacatgatggagcgcgccaaagagaagggcaaggacatggccaacaccgccgccgacaaggcggaggacatgattgaaaagatccggccctaaaccaagggctataccttgctggctgtggcggcaacaaaaccgagcccaccaaacagccagcggcctatgccggcagccctcgtggccgtgccggcggccggcactgccgcagctagccgtcgg

SEQ ID NO: 6406 - DNA, 577 bp, Chlorella sorokiniana
  Clone ID: LIB3602-090-Q6-K6-F1
acgtccgcgcagctgcacagcctgcaactcagcagctggcagccgccacaccgctggcagcagccgcagagccggccgcagctgagcctgtggcggacgctgagcaggaggcggtgcatgtggtaggatccctgctgcctgcaccggcgcccgcggctgtgccttcggcacctgcccttgccagcggcagcagcgattcgcctcgcaagcccggcgccgctggcagtgccgctctgccgtctggcaaggcggccgccggcagcagcaaggagctggaggcgcagctgccggagctgtcagagcacgacagcctgcggcgggtgatgcaccccgctgtgctgtgtgccgcctcagcagttgttgctggctgcgtgctcggtgtgggctgggccgtgggcgccggccacctctgaatgcgcttgtgcgctgccagctgcttggcatgccaactgccttccccgtttttgtttggcagcaacccctgcctggcaaaaggcggtcggtgcgggccgccccgtacttcacttttccttttgtatgcctgccgcttcattcgcagccttttcggcatctttgc

SEQ ID NO: 6407 - DNA, 390 bp, Chlorella sorokiniana
  unsure (1)..(390): unsure at all n locations; Clone ID: LIB3602-090-Q6-K6-F10
gcgttcgnttgccgcacacctggcagcgccacagccgctgcgggcgtggagcagctgtcgctggtttggacaggtggtcagcgtgtgctgccggggcctgctgctacctagccagtggcgagcagtagcttccattgggcagggctgcccagccccgtctggttgagcatttagctattcaagacagtatgtgtttgttttgcggtggcgtgcgtcgttttatctctggtatgtcactccacactcactgcaccaggccccgctgcatgaaatacccgtaccgcttttgccagcctgcttgcccgcttgcgtcaaccaaaattttacaagtcccacaccagcagccttttgccgggctccgcccgactgccacttgtaactgtcagtttg

SEQ ID NO: 6408 - DNA, 477 bp, Chlorella sorokiniana
  Clone ID: LIB3602-090-Q6-K6-F11
tctgcctgctctgcggcccttcatacctgggggcctttctgtatcatcttgcagcaatggcagccggctgcatctttctaacatcgtcaccggcccactcgtttgtgccatgcccacctgcctccaacgtcacccttcatcaaccctcacccaacccatccacctgccacccatccactggggggggggtgcgccacaacctctgccacccactcaccacccatgacccggtgaacgccctccatgcaccatcctccccatccaccaaatctgccaccccaaacgcacgtccgccgctgcaccacctgccgccccctcacccgcgcccatcttccacccgccgcctttcctgccgctcaccgccgcacatcctacctccgccacctcactccgtgtgcacccttcacccgcgctctgcacagcggctgttgccctgctaagctgctgccgaacccttccttcttgctcgctcaccca

SEQ ID NO: 6409 - DNA, 566 bp, Chlorella sorokiniana
  Clone ID: LIB3602-090-Q6-K6-F12
gggacctgcgcctggtcaaatgccgggctacggcgtggatgccttcatgaccctcaacgcctctgagacacagagtgggaggagtcgcgagcggagctgcagaccggcgctctgcatgctggggtcgtctccggcctgcccgaactgcacgactcgcaccccgctgtgctgcacgctgcgcatgcttcgcacgctgcggtgcaccgccccgcgcatgctgcgggcgcggggcaccgcccggcggtgcagcagcatgggcagcatgcacagcatgggcagcatgaggaaccggtgggaccattttcgcaccccgtccacttgcggcacgggcagcatgcacagcacgggcagcagcaggagcatgagcagcagcaccacgagcatgctgtgcaccagcagcagcatggctgatgcggcatcccggcagccagcgtgattgcacagtgctgcgcaggccgtcccggccaggtgtgctgccactgcgacacagcctcacgtaccacaaatcatcaagggtttttgcacactatcagattttccagcgtagcgcattttgagtcccgtct

SEQ ID NO: 6410 - DNA, 586 bp, Chlorella sorokiniana
  unsure (1)..(586): unsure at all n locations; Clone ID: LIB3602-090-Q6-K6-F2
gcgttttgcgcgtgcatcgagcccagccatggggggttttgacgagatcgacggcctcgccaagttgcgggaggccagcggcgaaggtggcgtgggcgtgggcgagcgcatgttagcacaaatgctgcaagagatggatgggttgcagtcacgcattggtgtggttgtcattggtgccaccaaggcgggggactgcctggatccagctctgctgcggccagggcgatttgacaggctggttgaagtgccgccccctgacaacgccgggcgggctgcaattttctgcgtccacacccggcacatgccgctgtctggagtggacgtgcaagacctggcccacaggacggaagggtttacaggcgcatccatagcagcatgttgcaaagaggcagcactttgtgctctgcaagaagacttgaatgcctcttccgtaatgactcgccattttgatacagctatcagcatgcttacctctcgcctacaactgttgtgatgtgaatgtggcacgctatgcgccacgtatccgtcagtgtttgttaatcaacgagctgaaaaattttgtttntgttttttttttttacataat

SEQ ID NO: 6411 - DNA, 512 bp, Chlorella sorokiniana
  unsure (1)..(512): unsure at all n locations; Clone ID: LIB3602-090-Q6-K6-F3
gcgttcgctgccctctgcgtttngaaactgcaagagggaacccaccgatgcgccgcatgtgtgtactgctttcttcaacgccaccatcacccaccccctcattcgcaccatccctgcactacccacctcctcgccggctgcatgcgctgcactcagcaccatttcatcaaccaatcgcctcccttggatgcgagacttgctctccctgcactctccctttgccctgcccccccaagccaaactcaagcacctgctcaagccaacccacatccgccctttaccaagcaaacccaaacttctcatgcaacagttttctcccccttttcattccagtaccagtgtttgactaccaatcgtcctcccaagcggggctgccaagcctttttgtccagctgccggctgtcatgagctgttgccgctgctttcccccatccggcttgcgctgcaccgccgatcctctctactcccttctctgtacagctggctcagcagatgtaacatgcgagcttgcg

SEQ ID NO: 6412 - DNA, 201 bp, Chlorella sorokiniana
  unsure (1)..(201): unsure at all n locations; Clone ID: LIB3602-090-Q6-K6-F4
gcgttcgncatttgcccgctntcgaagctgccggactccatgccatgatactcatgcacgcttgctaccatccatttcttgctggccttaaccataagtgttgctcgccgtccgcctgagccaacactcgtgcagcagcataattcttcccctgtacactctagctgctgctctggcccctggggggatacgttgcactgt

SEQ ID NO: 6413 - DNA, 575 bp, Chlorella sorokiniana
  unsure (1)..(575): unsure at all n locations; Clone ID: LIB3602-090-Q6-K6-F5
ccgaggagcagtggagggcggcggccgagtttgagggtgatttccagtccatggcggtgtgccccttcagcgagcaaacgctattcagcgcactggcgctgcgcaagctggggcgggaggaggaggcgcatgctctgctcgagcggctgctggcgcatgcccaggcactcgcggaggcggaggcgcgggtcgactactttgccacctccctgcccaccatgctgctgttccatgacgaccttcaagatcgccaggaggccaaggccctgtttctggaggtgcaggcgcggtggggcctgggccaggctgcccaagcctgggcgctggctcacgaggtgcttcgtcgagacccctcgcacggcagggccgcagacctggtggcagccatgcaggaggcgcggtacagcaagaatagtgaggatggagtgtgacaagagtgtagcagtggcagccccttgctggacagcgctggcgagggtgcctggaagcagcagcagaatgcggctgcgggtactgtacatttgcaaatcttaacgcaatgcagttctgtaaatctaccagtcgaaaaanaaaaa

SEQ ID NO: 6414 - DNA, 574 bp, Chlorella sorokiniana
  unsure (1)..(574): unsure at all n locations; Clone ID: LIB3602-090-Q6-K6-F6
tgnagcccggnagcgatctgggataccgaccgctgctgaggcggcggcaagtaagtgcagcaacgaatggccacaagtgccgcaccagcccaggggnaagagtgtgcagcgaccttgtgcaggcaggcggcaccggctgctcctgccgcccgctgccacagctgagctggcagcaaacgtggccagccgctgcctccagcgctgcagcaacacctgcagcagcaaaccaaatccccaaaccaacccgcgcccctttgcccatgtgaaccccacacgtgcccacccaacctggctgcacgctgaatgctccacacactgcctcgccctccaaatgatagcctcacctgggaactggagaatgccctttccaagcatactgtgtgccctcctccgcatccaccctctgtagcctgttcagtctcagtgccactctgcggcctctcattgtcggtggcctgcccctgtgttgtccggtgatcagcttatgattcttttgaacttgctttggcatccaaccgagcctgcccctccctggctgcgcctccagtagcgcccggccagcctctgtaacaca

SEQ ID NO: 6415 - DNA, 386 bp, Chlorella sorokiniana
  Clone ID: LIB3602-090-Q6-K6-F7
cgcccggccagcccttccctctgtgtctgcctgccccagcccatcctctgaactttctggcccctctgattcgtcagctcatcccaccgtccaccttgcatgatgatgcctcaccgccacgcacgctccccagcatttgattttcctaacttccttctcctccaaatcagccgtttatgtgccacctctgacctgccgcccctctgtcgcgccttacatatgcaccctcttccttgagactggcagcgcccctctgaagtgtaaatcactcacactcaaaaaaaaaaaaaaaaaaaaaaaaaaaaaaaaaaaaaaaaaaaaaaaaaaaaaaaaaaaaaaaaaaaaaaaaaaaaaaaaaaaaaaaaaaaaggggcgggcggttttaa

SEQ ID NO: 6416 - DNA, 315 bp, Chlorella sorokiniana
  unsure (1)..(315): unsure at all n locations; Clone ID: LIB3602-090-Q6-K6-F8
gtgagnacaagnagcgcgccagnaagccaaggccgacaaggcggtgcagaaggcgcaggccaaggcctcgggcgccggcaaggctgtcaagaacatgcctaagggcgcgggcaagggcggcgccaagagcaccggccgctaagccagcggcaatgcagcgggcgtagcggcctgctgggccgctgccgttgtaacgcacttcctcggaaaaaaaaaaaaaaaaaaaaaaaaaaaaaaaaaaaaaaaaaaaaaaaaaaaaaaaaaaaaaaaaaaaaaaaaaaaaaaaaaaaaaggggcgggccgttttaaaagaac

SEQ ID NO: 6417 - DNA, 575 bp, Chlorella sorokiniana
  unsure (1)..(575): unsure at all n locations; Clone ID: LIB3602-090-Q6-K6-F9
ctggccaaccgccagctgctggggctggacccggncagggtcaacgtgtttggcggcgcagtggcgatcgggcaccccatcggcgcaagcggcacacgccttgtggtcacgctgctcaacgtgctgcgctgcaagggcgggcgcctgggcgtggccgccatctgtaatggcggcggcggtgcctcggcaatggtgctagagcggacagaggcgctggaggaatgagttgaacccagggcggctgcaaggccacccattgttgtgcccgttgtgcttcgcgcggccgcctgaggcaggccgacacgccacgctcgtccttgtacatgatagcacacgtgcagtgtgcatgctcgccgcctgtggcatatttgatggttgtttgctgtatccacttcctactttttccacgctaatacattagtgccaccgttgtcagttttcccctgcgtgttgccccgacgacggccaacccctcattcatgccgccatgctgcacctccaccatcacctcagcagcgcacccaaatggccgaacaacctgtcttaacccgatcttctagcgtggctctgcacct

SEQ ID NO: 6418 - DNA, 446 bp, Chlorella sorokiniana
  unsure (1)..(446): unsure at all n locations; Clone ID: LIB3602-090-Q6-K6-G1
gcgtttcggnccggcaggcgtcgctctacgcgcgagggcaagcggcgttacgaccgcaagcagtccggctatggtggccagaccaagcccgtgttccacaagaaggccaagaccaccaagaagatgtgctgcgtctggcctgcaccgtgtgcaaggcccagcacatgcacgccatcaagcgctgcggggacttcgagatcggcggcgacaagaaggtcaaggggctatactagtaaaaaaaaggagagcggcaggcggagagcatgaccgagaaatggaggcagcggcgcccgctcaccctgggcggcctgctccccgcccggcgcctcgctttggccgcctctggccactcgtacgcctccttgtccatgcccttgtgcttcctgagctgcccaacctggcatgcaagcagcctggccgtctgtaatgccattggcgtgtgaaaa

SEQ ID NO: 6419 - DNA, 478 bp, Chlorella sorokiniana
  Clone ID: LIB3602-090-Q6-K6-G10
gtgttcaccatcgtgtggggcgtgttctacgtgtccacccggtgagcgccgcgcctcctgcactgcactgctggctgtgtgctgtgagctgtgctgcggcaaaggaaggggtgctggctgtgagatgcgccgccttgtcatggcgcacgccctgccgctgctctgctacgtggctgcttgtccacatgcctgcggtgaatgactcgccacctcatttgcctcgctctgtcgcccatatgcctgcagcgagattgacgctgcgtctgaccgcgagaacgacgatgactttggcctgaccctctgagcgggcgcccagcatcaggcggcccgcgcggcgtaggcccacgggcctgccgggcaaattttcgtccttctgttgcagcttgtccgccatgtgtacgctaaatccaaatttcaccccgagaagagaactcgctatgtagcacccttgtgtgaacaccgcccctctggggctccc

SEQ ID NO: 6420 - DNA, 586 bp, Chlorella sorokiniana
  unsure (1)..(586): unsure at all n locations; Clone ID: LIB3602-090-Q6-K6-G11
tcgcctgnttcttcgagcccacccatctggacgttcagtgacatcacactatgtccgagcatttcgtttcgttagcgctgccatttcattgcccccctccgattcttttggtcaaccaacttgatccccaacaaacgcaccctttcatgcacattcgtttccatttgatgagcagatccagagggaacagatgtcgcagcanaaaaaaaaaaaaaaaaaaaaaaaaaaaaaaaaaaaaaaaaaaaaaaaaaaaaaaaaaaaaaaaaaaaaaaaaaaaaaaaaaaaaaaaaaaaaaaaaaaaaaaaaaaaaaaaaaaaaaaaaaaaaaaaaaaaaaaaaaaaaaaaaaaaaaaagggggggggcgttttttgaagggtccaagttttataacccagggtttgcgaaattaaaatttttttttagggggccccctaaaaaaaaaatcccggccggcgtttttaaaaccggggtgtggggaaaaaccccgggggtcccccaactaaatacccctgagaaaaaaacccctttttgccggggggggtttaaaagaaaaaaagccccccccccattcccccttcccccaaaa

SEQ ID NO: 6421 - DNA, 579 bp, Chlorella sorokiniana
  Clone ID: LIB3602-090-Q6-K6-G12
cgtcgcctgtgcacactctggcacctgcagtgcctcccttgactgcaccccgcgcaactttgccctgggcagcgatggcagcgcctcggaggcttttgatctccgtcgacaacagcgacgcttcagaagctgcagtgaaatgggtcatggccaacctgtaccaagaaggcgacgaggtgcacctggtgcacgtgatcccccggctgcagctggctgccacctacggcgcgccgcccgtcgacttcctgccgttccaggaccccgcagcctatgaacagctcataaagaccgcagaagactttattgccaagcgggcgctcacacacgtgggcaacatcacgccgcagcccgtggtgcacatcgtcaagtacgagatcgacaccgactcgattggcaacgtggtgtgcaagaaggccgaggagctggaggcggcggtgactgtgctggcgcggcacagcaagtcaaagctgcaagagttctttttggggtctgttagcaacttctgcgtgcaccactgcaagcgcccggtgctggtgcacagcggctgaacggctgagtagcggggcagggccacccaca

SEQ ID NO: 6422 - DNA, 454 bp, Chlorella sorokiniana
  Clone ID: LIB3602-090-Q6-K6-G2
cgtggttcggcccgtcgtcgagtagcgcagcacgatggccaaaatcaaggcccatgagctgcgcggcaagggcaaggaggagctgctgcagcagctcaaggagctgaagcaggagctgagcggcctgcgcgtggccaaggtcaccggcggcgcccccaacaagctgtccaagatcaagggggggcgcaagggcattgcccgcgtgctgaccgtggtcaactagaagacccgggacgctctgaaggaggcgtacaagggcaagaagtacgtgcccctggacctgcgcgtcaagaagacccgcgccatccgccgccgcctcaccaaggcgcaggccaacgccaagactgagaaggctgccaagaaggcgcgcgccttcccgcagcggaagtacgcgctcaaggcgtgaaggccttggaagcagcccgctgcagccgtgcaggcacacctctaggca

SEQ ID NO: 6423 - DNA, 521 bp, Chlorella sorokiniana
  unsure (1)..(521): unsure at all n locations; Clone ID: LIB3602-090-Q6-K6-G3
gcgttcgggcgggcatcgatctgtggnagctggggggcgaggacgcgcgccccgaacgcctgcagtggctggccgagaacgcgggcaacccgcccatggccaaaaacaagcgggccatgaagaaccccgagaagctggcggccagcaagaagacgccgctggtggcccgctacctgcacgggaggggggggtatgtgcgcgccgactcgcagtaaacgggcggctccccccggccccaaacgggcaggcgccgagtgacactgctcgtcggcgggccgcggcgcgcgagcctccctgccatagcgcttgaggggcggcttgccatgcccgcgccgccgcccgcacctctgcttgtgtagtttcccgctgctgttctgcttccttccctctgacctctcgcacacataccgctgctccacgattcgctttggcggcgccgcgcccctgctcgccggcattcggcggcggggcgctgcactgcatgcgggcgtgccccctctgtaaggcaggcccatgcnnna

SEQ ID NO: 6424 - DNA, 83 bp, Chlorella sorokiniana
  unsure (1)..(83): unsure at all n locations; Clone ID: LIB3602-090-Q6-K6-G4
gcgttcgctgncctctccttgnatacttcacactggtgtaactgccgtctgagtggttgttgcaaggcccactgtttacatgc

SEQ ID NO: 6425 - DNA, 503 bp, Chlorella sorokiniana
  Clone ID: LIB3602-090-Q6-K6-G5
ggcatgcagggcgtgcccgccatgcccacctaccagcccgcgtacgcccccatggagggcggacccatgcccgccgtgccgctgccgccgcagcccgtcaagcgcccgctgaccatcacctcccccgacgacgatggctcgggcgccgccgctgcccagtactaccagcacccccagcagccgcagatgccgcccatgcagcaggtggactaccagcagcagcagcagctgcagcagcagtacgcctaccagggctacgggcagagcatggagtatggcggcgagcagcagggggcgccggcgggtggcaggcgctactcggctgtggctcgtcagtgagaggagaggctctctaccagggagatggccgctcatgcagccattctgcccgccaatccgtgccgcctgtcctcactgcttgcttgcaataacacgtcgatgcttttgccgagtgcttttccacccatcttgtctgccctttcacagtgttgagtcattgccaa

SEQ ID NO: 6426 - DNA, 568 bp, Chlorella sorokiniana
  Clone ID: LIB3602-090-Q6-K6-G7
cgctcccagtacacgctcagccatgcgcccgctactgctgttagcaatggtcgcagcggctctggcagtcgtgctggccgcctccccgggacaggccaacgccgacagccgccgctttgtgctgcccatggacaccggcatgccggccaagtctgtttggcccgagctggtgggcaagccctgcgagcaggcgcgagcggcggtggaggccgacatgcctgccggcgccctggtgctggtggtaccagagcaggccatggtgacgatggacttccgcaccaaccgcgtgcgaatcttctgcacccgggaaacagggctggtgtcggcgccgccgcgtgttggctgaggctgcacagcggctttgcccgctccggcccgccggccaccagctgtgataaattgctggaaatgggccacggccgggactggccttgccctgtccctcgtgtacttgtaaatgcccttgctgtatgtttacgatccattcatgccatgctcttgcgctcctgcccctgctagctgtctgctcctgccctcgcctgctctaccctgctccacccatctcctg

SEQ ID NO: 6427 - DNA, 536 bp, Chlorella sorokiniana
  unsure (1)..(536): unsure at all n locations; Clone ID: LIB3602-090-Q6-K6-G8
gttccttcttccttcctcttcctcggacccacccagccactgtgcctttgcttaggaggggcagcccagcccgcgcctgtcagcgtcccgtgcccagcgtctctccctgtgcccttgtcccccagaggttgtattgcgcagggcgctctacaattttgcctcccctcctactacttgtgtcccccagacctttcattcaaaccgttaccaccaatcataggctcaaacgaaccgacgtgtaacatgtcccgtgcaaaaaaaaaaaaaaaaaaaaaaaaaaaaaaaaaaaaaaaaaaaaaaaaaaaaaaaaaaaaaaaaaaaaaaaaaaaaaaaaaaaaaaaaaaaaaaaaaaaaaaaaaaaaaaaaaaaaaaaaaaaaaaaaaaaaaaaaaaaaaaaaaaaaaaaaaaanngggggggngggnttttgggaaaaacaatttttttttgcgggggttatgaaaaataaaagttttttttttttggggcccaaaaaaaaaaaaaacggggccggtgttttaaaaacggggggtatggg

SEQ ID NO: 6428 - DNA, 289 bp, Chlorella sorokiniana
  Clone ID: LIB3602-090-Q6-K6-G9
ccccgcagggccccatgagaacctggctgaccacctggcggcccccgacgccaccaacttctgggtggactacgcccccaagtccgccggcatcggctactaagctgtttccgtcgcttgactggcgccgcccgctcgcccgcccgctgagtttacggccactcgcggcaacaggcagcagcggcgtctgtactttctgactcctccggcgattgctggtggcgcaccttgcttgctttgatgcttgcttcgggggcctaggcaccctcccatgcaacacatgaacccc

SEQ ID NO: 6429 - DNA, 185 bp, Chlorella sorokiniana
  unsure (1)..(185): unsure at all n locations; Clone ID: LIB3602-090-Q6-K6-H10
tcggggaaaaccctttgcgcagctggaaacgagcgtgcacccatgacggacagagtggagccagccagtggagccggaggcggccagcctcttcttctctcagcgccagttcaccgactgagcaaanacaacccaaactcacgacagaatgagcgactgacctgcggcgtctgctggaagcgccc

SEQ ID NO: 6430 - DNA, 480 bp, Chlorella sorokiniana
  Clone ID: LIB3602-090-Q6-K6-H11
tcgtaaaaaaaaaaaaaaaaaaaaaaaaagggggggagagaaaaaaaaaaaaaaaaaaaaaaaaaaaaaaaaaaaaaaaaaaaaaaaaaaaaaaaaaaaaaaaaaaagggaggaattattttaaaggatacaaatttaaataaaacttgtttagaaaaaatcttttttttttttttaaagcccccaggggttcctttggggggggggggcctattttttcgcggcggcctgggtaaacccttttggttttttttttttgttcccccttggttcttttccccggttcgggcttttgacctgttggctttggggcccccttgggtcgccctttttttaagtgggtcgacctttttgctttttgggaggcccctttttttggaaagttccccccccggggttcctttttcttacgggcgggggcttttttttgtttttttgtgcgcccttttttcccggttttttttatttggtggggttttt

SEQ ID NO: 6431 - DNA, 573 bp, Chlorella sorokiniana
  unsure (1)..(573): unsure at all n locations; Clone ID: LIB3602-090-Q6-K6-H12
ggctcccgcagacaagacaggccgccaagccgccaggcggtcaagaagagctccttcaanaagacgaagaagccccgctacagcgtggtgttccaccgccccaagaccctcgttcgcagccgggaccccaagttcccccgcgtcagcgcgccccgccaggcccgcctggatgagcactccgtgatcaagtaccccctgaccactgagtccgccatgaagaagattgaggacaacaacaccctggtcttcatcgtggacgtgcgcgccgacaagaaggcgatcaagaaggctgtggcccgcctgtacgacatccagaccaagaagatcaacaccctcatccggcccgacggccagaagaaggcgtacgtgcggctgaccgccgactacgatgcgctggatgtggccaacaagattggcgtgatctaaagcgtgcggctggagcggggcggctcccgcccctcccaacccacccttggcctggtgccaaggcgccggcagcctgcacggccaccccacgcggccggcggcgccggcgcagcagcggcagcggcgcgtcgggcgcagtgcgcagcc

SEQ ID NO: 6432 - DNA, 577 bp, Chlorella sorokiniana
  unsure (1)..(577): unsure at all n locations; Clone ID: LIB3602-090-Q6-K6-H2
gnaaaccaanccacacatcaacatgcaggccgctctgtcccagcgtctggctgccatcaagccctccggccgggccacccgccaggtgacccgcgcctccgtggagtggtatggccccaaccgcccccagttcctgggccccttctccaaccccccctcctacctgaagggtgagttccccggtgactacggctgggacaccgcgggtctgtccgccgaccccgagaccttcgcccgctaccgcgagctggaggtgatccacgcccgctgggccatgctcggcgccctgggctgcgtgacccccgaactgctgcagcgcaacggcgtcgccaacttcggcgaggctgtgtggttcaaggctggcgcccagatcttccaggagggcggccttgactacctgggcaacccctccctgatccacgctcagtccatcgtggccatcctgctgacccagctggtgctcatgggcctgattgagggctaccgcgtcaacggcggcccggccggcgagggcctggatgccctgtaccccggtgaggccttcgaccccctgggcctggctgacgaccccgacacc

SEQ ID NO: 6433 - DNA, 565 bp, Chlorella sorokiniana
  unsure (1)..(565): unsure at all n locations; Clone ID: LIB3602-090-Q6-K6-H3
gcagtgccaggggnatccattaggttgggcgtggggcgttcactgcaggcagtgaacgccgcagagcgattgacaagcggtcgtggtagcatctggtaattttgcgcccccagctttgctggccttatgatggctgggcctcaaaggacatgatgcgcgctaccaagctcgtgctggggggggggctgacatccctgctggctcggcccgctgcttctgtggaagatgtgcccaccgtcgaccagccggagcgctcgctgaacatggaagtgaagcccgagccatgccccaagggtgacgataaatgcttggcccacaagtaccgagttgcgctgctgcatgccctcaccacgatcgagactccgccgcccaaagcggaatacctcgactgcccgacaggctactgcccctgcctgacatgccccaacacctgctgtggcaaatgcatggatgccacaagccctcagtgcaccagcatcaagtgccttttcggctggggctcatgctcgtgaggccacttaagtgaagttaagaagcttctctgttgaacactgcctagcatgct

SEQ ID NO: 6434 - DNA, 581 bp, Chlorella sorokiniana
  unsure (1)..(581): unsure at all n locations; Clone ID: LIB3602-090-Q6-K6-H4
gtgggcaaggggccggccagcgggtgggacaagnaacatcggacctgggccttccgcacccccaaggaggccattgagggcaactacattgaccacaagtgccccttcaccggcaatgtcagcatccgcggccgcatcctgtcgggcaaggtgaagagcaccaagatgaaccgcagggtggggggtgcgccgcgactacctgcactacatcaagaagtaccagcggtacgagaagcgccacaccaacatctcggcgcacatctcgccctgcttccgctgccacgagggcgacaccgtggtcatcggccagtgccggcccctgtccaagacggtgcgcttcaacgtgctgcgcgtcatccccgcgggctctggcgccaagaagggcttcggctccttctaagcaggctggactaagggcctcttgccttgctggctgaagccctcgacagcagcagcagcagccccagcacggcatgcaagcgctgcagacgccctgctgccctgagtaagcgccgccatgtgccggcggtggcagcagcaccgcccgccttgcatacacctggcccctaagatgccggcca

SEQ ID NO: 6435 - DNA, 574 bp, Chlorella sorokiniana
  Clone ID: LIB3602-090-Q6-K6-H5
gcacctttgtggccgtcatgtacctgttcacagtccaggattccttggtgattcgccgcaccgtgttctaccgcgagcatgcggccggcacgtacaacgtcatccccttctgggcggcggagctgctggctgaggcgcccttcctggtggtcaatgccatgatctacagcgtgatcgcttactggggcgtgggcttcatcccggacgccgccaagttcttctggtactacctgatgatcctgctggtcctcttcgccttcatctcctttggcatgatgtcggtccacatcacgcccaacctggagatctccaatgccttctccgcctttgcctttgccctcatcaacctgatgtgcggcttcatgcggcccaaggcctccatccccaaaggctggatctggctgtactacctcgacccagccagctactcgctgtacggcatggtggccaaccagctgggtgacgtggactcgctgatggagctgccacccggctcggtgaggcttggggatttgggctaacaaccttgtgccattagttgtgcccagctgccggcagctgtcgcttgcatgcg

SEQ ID NO: 6436 - DNA, 316 bp, Chlorella sorokiniana
  Clone ID: LIB3602-090-Q6-K6-H6
gctgctgtggctgcatccactggcgccgcctctgcaggctctagtgccagccacgggcagccatgctctctagtgaagtgtgcgtgtcattgcaacgccatgcagagtgaatcgagtggacccagacctgacatagctgcaacttccgacggccaaactgtttacttgcacgtgcaccagcccagccggctggtgccgcttgcatgacgcaaagctagcttaccccttttctgataacccatgctgttgtttttgcgctccatcctctgtttcgcccacaagagtacttgcacctgacatgtgatcgctctctttc

SEQ ID NO: 6437 - DNA, 582 bp, Chlorella sorokiniana
  unsure (1)..(582): unsure at all n locations; Clone ID: LIB3602-090-Q6-K6-H7
gntgtgggcgccaanaagcgggcgtggacttcttccctcactgcgtccacctggtcagctgggagaaggagaacatctcgtccgaggcgctggaggcggcccgcatcgcggccaacaagtacatggtgaagaacgcgggcaaggacgccttccacctgcgcgtccgtgtgcaccccttccacgtgctgcgcatcaacaagatgctttcgtgcgccggcgcagacaggctgcagacaggcatgcgcggtgcgttcggcaagccatttggtgtgtgcgcgcgcgtgggcatcggtcagatcctgctgtccatccgctgcaaggacacgcacgctgcggtggcggaggaggccctccgtcgtgccaagttcaagttccccgggcgccagaagatcgtggctagcaggaactggggcttcactccctacctgcgcgacgattacttggagtggaagcgtgagggccgccttgtgaacgacggtgtgaatgccaagctgcttggcaaccacggcccgctggacgcacgggagcccggccagattttcgagggtcctgcccgtctgtggcgtgtgccggtgcatgcct

SEQ ID NO: 6438 - DNA, 546 bp, Chlorella sorokiniana
  unsure (1)..(546): unsure at all n locations; Clone ID: LIB3602-091-Q6-K6-A1
cgctgncggcctcctcgtctgctgcccgggcatgcctggctgcccccgccggcacgtttgtcaacaccacgggcgcactggccgccacgcaatgccccctgggcaccttcaacgacgacagtgctcaagacagctgtgaggcttgcccgcccggcaagtacgccagtaccatgggatcccaggcctgcaagacttgcctggccggcacctactcgatcgcccagcccagctcttgcaaggtctgcgcggctggctactcgtctcccattgggtccggcagctgcaacccctgcaagcccggcacctacgccagcaaaccccgctccggcacttgtgacctctgccccaagggcttccagtgcgccacccccgccactgcgacgcccaaggcttgcctggccggctcctttgcacccagcgacggctcgaccctgtgcaccccctgccccgccaacaccttttccaataccactgggccagatcacatgccagccctgtgccgcgggtaccaacacccgcggcctcaccggccagaaggcgtgcact

SEQ ID NO: 6439 - DNA, 396 bp, Chlorella sorokiniana
  unsure (1)..(396): unsure at all n locations; Clone ID: LIB3602-091-Q6-K6-A10
gctctgnagcagcttgtcccagcgcctgcaattcttttgaccccattcctttcttttgcccgctagtttgtgctgctcctatcttcgtcgcatcacatgggtgtactgccccacgtttcatggcccatccccactcacaccttgcctcccgcccgagcgcactaccccccccatccccacccccacattgctcgccgtctgaacgtagtcccaccaccgccactcgccccagccctgccccatattaaataacgctgcgccgaccgtgcggattttcctcccgagcattctagtgcctgcgcatttcaaggccccacgttttcttcacaatggcacctgccattcctgactgtaactacaacgcagctnacaacaaaacaatgctcgatactttag

SEQ ID NO: 6440 - DNA, 122 bp, Chlorella sorokiniana
  unsure (1)..(122): unsure at all n locations; Clone ID: LIB3602-091-Q6-K6-A11
ccctaagtgcaaacacgggggggggcgtgtcccagctgcacagaacagggcagcgcgcctggncgcatcgaacgctgcatgcaccgctcctgagctcgcgccctgcgcggttgtgtccacct

SEQ ID NO: 6441 - DNA, 322 bp, Chlorella sorokiniana
  Clone ID: LIB3602-091-Q6-K6-A2
tcgcattcatgcctgcagcaccgctcctggggcctgcccagggcactgctgctgaggagagctgatccgcctcctgtgcccgcccatgctgccgcagatgcccacgtttgccacgcagcggcagctggagaaccacaagtcggagccgctgctgtttgaggtgcagctgctgcgcgtgggggggcggaggtgaagggccaccgggagtgccgaacgaagcggcagagcctgtgatctccctccactgctttgcgactgctatttgaactgccattcccgtgtgctgtatcggcgcgtcattgcgagtgtaatgtacaacaag

SEQ ID NO: 6442 - DNA, 569 bp, Chlorella sorokiniana
  unsure (1)..(569): unsure at all n locations; Clone ID: LIB3602-091-Q6-K6-A3
gcgttcggtgcgcgcgtgtgcagctgatcaagacggcaagaagatgcggcgttcgtgcccaacgacggctgcctcaacttcatcgaggagaacgacgaggtgctcatcgccggtttcggccgccgcggccacgccgtgggtgatatccccggcgtgcgcttcaaggtggtgaaggtgtccggtgtgtccctgctggcgctcttccgcggcaagaaggagaagccccggaactaaacggcccgcgcccagcagcggcagcagcggcgcgcctcggcaacggggggcgccgcgtccgccagcactgcacctgcctggcggcggcttgggagggcgtgcagcgcatgcagcgtgcaccgccgcggccctcccgatagtttaggaccccacaaccagctccctctgctcccactactgatgtaacacgcaactgccaaaanaaaaaaaaaaaaanaaaaaaaannaaaaannnaaaaannaaaanaannaannnnnnnnnnnnnnaaaaaaaaaaaaaaaaaaaaaaaaggggcgggccgttttaggaggacccaagtttacttccccgtgct

SEQ ID NO: 6443 - DNA, 545 bp, Chlorella sorokiniana
  unsure (1)..(545): unsure at all n locations; Clone ID: LIB3602-091-Q6-K6-A4
gcgttcggcggnataggggcactacgacgagcccgacttttgtgccaggctggactccctgctggcgacactggatggtactgctgagggcgggcggtacactgatgtcgccatgcgggaggtgtggcgggcccgcatgcgaaagggcgcccctggggacaggcagccggatggagcaacacaagcgaggcagcacaacggtcggtcctgctggcggccaggtatgcttcagacctgggcgaggcggcacggctgtccatggccaacatccgcctgacgcaccaggacgcgaccacagcaggacaatccatgtcctttgcgatcatcgttgctgctctgatccaggggcacaggcttgatgatgagctggcatgggggcggctgtggccggcggccaaggcaggggagctgccaattgcgcacgcagtgctggctggagaggagcggcaggtgccggttgactccacagccaccatgccgcggccagacagcctgttccaggcggcctgggtggcggcggcggcgcgcagctctcggataaccat

SEQ ID NO: 6444 - DNA, 346 bp, Chlorella sorokiniana
  unsure (1)..(346): unsure at all n locations; Clone ID: LIB3602-091-Q6-K6-A5
ggggggggggggggtcnccncccgctgggccgtgcggggcgccctgggctgcntcttccccgcggtgctggtgatgttccgcggcgtgctgttcggcgtggccgtgtggttcatggctttttttttttcttccctgncagcnccctgtgggggtgtgggggctcccccctnccgcncnccccctccatcgtgggcggggggggggttcctgcgttgctgctgggcgcctctttcttctgccgcgccctcggcttgggccctctcgcttcggcgcggtcctggtctccctgtgccccgggggcgccctcgcccccctgtgtctggctgtccccccctcctccttggc

SEQ ID NO: 6445 - DNA, 590 bp, Chlorella sorokiniana
  unsure (1)..(590): unsure at all n locations; Clone ID: LIB3602-091-Q6-K6-A6
cggncgcgtgggcgcggtggcagcagactgggtctacggctcgccgcacgagagcgtgctggtggcggtggtggtgcccaagaaggcttttgccgacaagcactcggacctgggcagcaaggaggcgcagcaggccatgctggcggagctggcggccgcccagaaggccaagaagctcaagggatttgaggccatcaagggggtgatcctgttcgacgagcacttcaccatcgagaacgacctgatgacgccctccatgaagctcaagcgcccgcagctgcagcagcgcttccagccgcagatcgatgcgctgtaccgcgagctcaaggcagcccaggcagcgcgctaagcagcggcgctggtattgaacagcctgtgcctcatattgcaacagtcccggtgccacgacgcggcgaacgctgcagccgggctcatttggttgttcagttgggcttggggaccgcacggactggacggctccattgcttcggatgttttctatgcagcgtgtttgccaggctgcccatcatgcctcagagacttgttttgcaaccgctgcttggtcgagaggtcaactctgttatctgttg

SEQ ID NO: 6446 - DNA, 245 bp, Chlorella sorokiniana
  unsure (1)..(245): unsure at all n locations; Clone ID: LIB3602-091-Q6-K6-A7
acanaacagcgaagagcgcgctaatggaggaagaagcggatgcggcgcctngagcgcaagcggcggcggcagcgggccaagtaagcggcctgccccgcagcccagcagcgctgcggcgcctgggcgcagccgcccgctcgcacgcgtgcaacggcgctgcagcggccagccggcgtcacggagtccgggcgcccggcagccgccgatgaaatgtgacggccgagtgtgtaatgctcacgaccgtg

SEQ ID NO: 6447 - DNA, 559 bp, Chlorella sorokiniana
  Clone ID: LIB3602-091-Q6-K6-B1
gcgttcggcctgcagtgggcctcctgggcggggacgcctcccgcatccactgcaaccccgactgcggcctcaagacgcgcaagtgggaggaggtgctgccctcgctgcgcaacttggttgccgccgcccagctggttcgcgccgagctgggtgctgcaggcgcagccctgcctgccacccccaccaaggcggcgggtgctgccgagcatgctggcgcggctggctctgtgccggcggcgccggcggcggagcgccgggcgtcgtgcaacgcggggtgctgcgcccggggcgagtgaagcgggctggaatgaactggataaactgctcgagcagtgagtaactagtcaactcacggcccagagccagggcgggcgagggggcagcagtagcgcctgccgcctcccccttttcaagttgcatttcaatgcatgctttgcacttttgggtgccacccatgggtggccggttgcatgactcattctagcgcatgcttgcacaccatccatccttttccccacccgccaaccctcgcatcatccgactagttgcgctgatcatt

SEQ ID NO: 6448 - DNA, 561 bp, Chlorella sorokiniana
  unsure (1)..(561): unsure at all n locations; Clone ID: LIB3602-091-Q6-K6-B10
ttcgnaaaaaaaaaaaaaaaaaaaaaaaagggggggggagagaagaaaaaaaaaaaaaaaaaaaaaaaaaaaaaaaaaaaaaaaaaaaaaaaaaaaaaaaaaaaaaaaaaaaaaaaaaaaaaaaaaaaaaaaaaagggggggccgttttgggggtcccagtttttcttccccttgtttgcaaggttttggtttttttttgggggcccttaattaaatttcttgggccgtgtttttaaacgggggggctgggaaaacccttgggtttccccattttattggttttggggaaattccctttttccccggttgggttttttccaaaagggcccgcccggttcgcttttccaaactttggccccccttgttggggaatggggcccccccttttagggggcttttaaccgcgggggttggggggtttcccccaggggggccctttacttttgcaaggcccttagcccccgttcttttgctttttttccttttttttttggcccgtttcgcgggttttcccgggcgttttttaattgggggctttcttttggggttcctttttaggt

SEQ ID NO: 6449 - DNA, 558 bp, Chlorella sorokiniana
  Clone ID: LIB3602-091-Q6-K6-B11
gacacctcgggccgcctgcacaggaggtggggcctgatggacgaactggccaagtgcaagcgcagcatcaccaagcggctgcccgaggcaccgcacgaggtgctgctggtgctggacggaaccacgggcctcaacatgctcaaccagtcgaaggagttcaacgagacagtgcgggggggggggatcatcctcaccaagctcgacggcacggcgcgcggcggcgccgtggtgtcggtggttgacgagctgggcgtgcccgtcaagtttgtgggcgtgggcgagggtatcgaggacctgcagccctttgaccccctcagctttgtggacgcgctcttcccggagggcggtgctgcggctgaaagcgaggatgcgtaagcaaggcagtgccacggcacgctcagcaagggcaggcatggctggccaatctgtccccttgcgccctgcacattcgcactgaactggatcctgcccgttcgacttatgcacatttacattttagttgtgacaacaccacagttttgtttttgcacacacaatgtcaactaacatacatgggac

SEQ ID NO: 6450 - DNA, 552 bp, Chlorella sorokiniana
  unsure (1)..(552): unsure at all n locations; Clone ID: LIB3602-091-Q6-K6-B12
gnaacaatgtaacgcgatccaatgcccgccgcccgtctggcgcctctcacctggaaccctgcccgcggcctctcgctaggaactcgctgaaggggccaggctgagcagccatggcggtgccgccgttccacctagcgtttcctgtgcacagcattgaggcggcacgggacttttacatgggcaagctaggctgcagcgaggggcgcagcgcggagcgctgggtggacttcaacatgtttggccaccagatcgtggcgcacctagtcgacggctactcggcagcagccagccacaacaaggtggatggagaccccgtgcctgtgccccactatggcgtggccctcggggtgcagcagttccagcagctggccgagcgctgccggcagcagggcgtggcgtttgtgatagagccgcacctgcggttccagggccagccgggggagcagtggaccatgttctttctcgatccttccggcaatgcgctggagttcaaggcgatgaccaacccggacaacctgttcgccaagtaccgggtcgactgaggaggcagta

SEQ ID NO: 6451 - DNA, 522 bp, Chlorella sorokiniana
  unsure (1)..(522): unsure at all n locations; Clone ID: LIB3602-091-Q6-K6-B2
ttgtgttgcgctacacggtcaagcgggggggcgggtcaacatggtgttacacggccagcgcgcggctgtggcgttctcagacccaacttcatgggttgaacaacaaaacgggggtggcttgactggtcgataagctggtgcctgagggtttcagcctcgatcgcctgcttgtgagtcggggggggtcgatcaaactgaggagctctttcagtacagccgctggcagaacctgcacaccctgcgctctctgtctgtgtcgggcctgtctgccttggggcggggcggtcacccgggaggctgcgctgtgcgcgctgcttcccccggcgcgtgggctgtccgagctgcgcctcaacccttccttggncgaggcatttggccgctgggaggcgctgtgcctcgccctggtcggccgcaccgtgctgcgcgcgctgcgcctcgcctccttctccttcttcccttttttttttgcgcccttcctgctgtttgccgcgcccctcttcctgtcttgctgtccttctgggg

SEQ ID NO: 6452 - DNA, 346 bp, Chlorella sorokiniana
  unsure (1)..(346): unsure at all n locations; Clone ID: LIB3602-091-Q6-K6-B3
cgcaggcggngcgggggggcgcgcgcaccctcacctcggtgcacgaggcgtacctggacgacctggtctaccccaccgagatcgtcggcaagcgcatccgctaccggctggacggctccaagtgctcaaggtgctgttggaccccaggaccgcactccggggtgcgggaccganacctttgcgagcgtgtacaagcggctgaccgggcgggacgtggcctttgagttccccgtcagcgagcagtaagcggctcgaagcctttggcggcagcggttgtcagcccatgtcgccctgncgcgccgcgcagcagcggcggcgcacgcggcggtttcttttctcctccttt

SEQ ID NO: 6453 - DNA, 354 bp, Chlorella sorokiniana
  unsure (1)..(354): unsure at all n locations; Clone ID: LIB3602-091-Q6-K6-B4
cgcttttgctgtccataaccacctctgcccttggacttgttcagccaggtcccttgcgcacctgcccatcccctgttcccacccgcccgcccgtcacctgaacgacttcattcccgcctgctctgctttgtgtgcccgactcccgagcgcgccagtgacctcgcccccccgctgggggggtgcgcctaccccctttcttggcgcgctccccctgccaacgcccaacccctttgttgacatgccnnagctgtgtgctntgcagtgacgacctgtttttctccgccctgtttgcttntttatnaacgggngctnaagcgcttgttggatcgcgctgggtttaccatggcggtcctg

SEQ ID NO: 6454 - DNA, 582 bp, Chlorella sorokiniana
  Clone ID: LIB3602-091-Q6-K6-B5
gcgttcggcacggcctgctctgcggcccttcatacctttgtacctttctgtatcatcttgcagcaatggcagccggctgcatctttctaacatcgtcaccggcccactcgtttgtgccatgcccacctgcctccaacgtcacccttcatcaaccctcacccaacccatccacctgccacccatgcactcaccttccctccgccacaacctctgccacccactcaccacccatcacccgctcaacgccctccatgcaccatcctccccatccaccaaatctgccaccccaaacgcacgtccgccgctgcaccacctgccgccccctcacccgcacccatcttccacccgccacctttcctgccgctcaccgccgcacatcctacctcccacacctcactccatgtccacccttcacccgcgcttcacacagcggctgctgccatgcaaagctgctgccaaacccatccatcatgctcgcacacccactcacccacacgtccaacgtatccagacccattttcaaggcccgactgtacagtgcctttttgcgtccttatgccgatctggtaccaggacttaatg

SEQ ID NO: 6455 - DNA, 551 bp, Chlorella sorokiniana
  unsure (1)..(551): unsure at all n locations; Clone ID: LIB3602-091-Q6-K6-B6
gacgcctgctctgcggcccttctacctttgtacctttctgtatcatcttgcagcaatggcagccggctgcatctttctaacatcgtcaccggcccactcgtttgtgccatgcccacctgcctccaacgtcacccttcatcaaccctcacccaacccatccacctgccacccatccactcaccttccctccgccacaacctctgccacccactcaccacccatcacccgctcaacgccctccatgcaccatcctccccatccaccaaatctgccaccccaaacgcacgtccgccgctgcaccacctgccgccccctcacccgcacccatcttccacccgccacctttcctgccgctcaccgccgcacatcctacctcccacacctcactccatgtccacccttcacccgcgcttcacacagcggctgctgccatgcaaagctgctgccaaacccatccatcatgctcgcacacccactcacccacacgtncaacgtatccagacccattttcaaggcccgactgtacagtgcctttttgcgtccttatgccg

SEQ ID NO: 6456 - DNA, 59 bp, Chlorella sorokiniana
  unsure (1)..(59): unsure at all n locations; Clone ID: LIB3602-091-Q6-K6-B7
naaaaaaaaaaaaaaaaaaaaaaaaaaaaaaaaaaaaaaaaaaaaaaaaaaaaaaaaaa

SEQ ID NO: 6457 - DNA, 561 bp, Chlorella sorokiniana
  unsure (1)..(561): unsure at all n locations; Clone ID: LIB3602-091-Q6-K6-B8
ggcgccgnggggagnagccgatgcagatcttcgtgaagacctcagggcaagaccatcaccctcgaggtggagtcttcggacaccatcgagaatgtgaaggccaagatccaggacaaggagggcatcccccctgaccagcagcgcctgatcttcgccggcaagcagctggaggacggccgcaccctggcagactacaacatccagaaggagtcgacgctgcacctggtgctgcgcctgcgcggcggcatcattgagccgtccctgcagatcctggcccgcaagtacaaccaggacaagatgatctgccgcaagtgctacgcccgcctgcacccccgcgctgtgaactgccgcaagaagaagtgcggccacacctcgcagctgcgccccaagaagaaactcaagtaaactactcgcttcggcacgagcggaagcggcatgagcggcagcaaccgctgccccccccccgccccgccagccgggatgccatgacagcaccggctgctcagctgctgatgtgctgcatgtcaattgctgctgcggaaatgtaacggtggtagcgat

SEQ ID NO: 6458 - DNA, 557 bp, Chlorella sorokiniana
  unsure (1)..(557): unsure at all n locations; Clone ID: LIB3602-091-Q6-K6-B9
accctnctcgtgcctcgtgctggcgggggcgcgctccaggacgagcggcgagcagcactggaggccttcaagnagggcgacgtgcgcttcctcatctgcaccgatgtggcggctcgtggcatcgacatccagggcctgccctacgtgatcaacatgacgctgcccgaccgctccgaggactacatccaccgcgtggggcgcgtggggcgcgcagacacaatgggactggccatttctctcgtgtcctctgtgcctgagaaggtctggtactgcacggtcaagggcattaagccatggctggcaccagatgccaagaacacgcgcaccaacgagcagggcgggcacaccatttggtatgacgagccgcagctgctgcaggacgtggagaagcggctcacacggcgcatccccgcgctagcggccgacctgagcctgccggctgagattgctgcgcgcgtggcgggcacgcaggcgggcagcggcggcgcgacgcagtacgggcagcagcggggcggcggcgtgagcaaagatgtcatggagcgggtgcaggcggtgcg

SEQ ID NO: 6459 - DNA, 589 bp, Chlorella sorokiniana
  unsure (1)..(589): unsure at all n locations; Clone ID: LIB3602-091-Q6-K6-C11
gcgttcgggnaaaacggttccagaagctgtgcgaccgcgaggcggcgctcatggccgagattgccacgctgcgcaaggaggtggaggcgtgaggcacccgggactgcgcctgggcatgtgcaccacctgaggccgcactgccggtgctgtcgagcggctagctggcatggcagcaagcgcaaggcagcacggtcacgaggctgggaacgcctcgtggccgtcggctacattgccgcctgcgcttggcggcacccatgtgtggcagcccgccatgcagctgcctagcgctcatgcccagcaacgtccaggcagcacagccatcccctcgcagcagcagcagcagccgcacttgcaccccgcatgactgagcagcagacgccccaaactaacgacccatgcagcgccgggggtggttgcccccgcggcgggcccgcggcgcgactgtctgtcgcccacgcttgaccttgcttgctccctctctgctccctccctacttactgcttcaaacctgacactcgctctttgattccccggactgcctcctcctttgctccctcctgcttgctcgctccgtttgcacggcgccggc

SEQ ID NO: 6460 - DNA, 320 bp, Chlorella sorokiniana
  Clone ID: LIB3602-091-Q6-K6-C12
gcgttcgcaatcggcgcccccggccgcgcgcccgccgtctgtgcgcggccggccgccctgcactgcaccgcctttgatgcaattgcccagcgaatttcgctgcccgcacacacacacacttgcgtttcatgcctgatgagtagaacgccctcgagccacgcacccacctaccaccccaaccacagggggctgcaccccggtttctcatctttgattcagccgcccggttgaggctgccggaggctccatccccttcttttccgctttcattcgtcactacactttgagttttgcggctgtggttgtaacgcaatttttgt

SEQ ID NO: 6461 - DNA, 520 bp, Chlorella sorokiniana
  unsure (1)..(520): unsure at all n locations; Clone ID: LIB3602-091-Q6-K6-C2
tcgcccgngctgcccgccgctgccagccgaggccatcttcaagaggcgttccgggttctgcgccccggtggcgcgctggcggtcatggagatgaaccccgcctcccccatcttccagcgcatcttcagcaaccccttcccttacgtcgccttcaagtccacggagccgtggcttctggagggcctttccctggacatgcccagcgcgatgaccgccgccggcttcctgccgccccgccagctcgagaactcgccacgccacaaaaccgtggttgcagtcaagccgcagcagtgagtatgaatgcggcggctgtgtgccatcaagccatgccatttttgctggagaacacagcgggcattgagcctgctctagctgcaacggctctgtcctgagctgaccctatgaactgtttgatgtgccttgatatccttctcgcttgctgcattccagcacttgtgatttatatcccatgccatagctgctcaagcaaccctgacctgctgtaatgctactgtacgcc

SEQ ID NO: 6462 - DNA, 516 bp, Chlorella sorokiniana
  unsure (1)..(516): unsure at all n locations; Clone ID: LIB3602-091-Q6-K6-C3
acccggccgccatgcaggggggggggcggggggggggccgacggcgaatttgtggagcccacaggcgagctgaatgccaccgctgttgctgagctggtgaagctggccccggctgctggcgatgcctccgctggctggtctttgttcaattccatctcccctgnccggtgggggggggggggctgnnnctttgccacnctggcnagcgacctggctggcgggggcgctcgcgggctgtacatccgcgacgtcgctggcctcctgctcactcctgagggccaggagcttgtgggcaccgacagtgacgaatacccccttcctaagcccctgttgccgggtgcactggctgcctgggcctgcgtcangacggctgcctccggcgtcggcaccggcatccctgtgccggttgtcgctgaatccgctgccccggcgcccacgccggctcctgccccgggctgcggcgcacctggtttgggggttggtgccccgctgctggcggccgctctggcccgctgg

SEQ ID NO: 6463 - DNA, 580 bp, Chlorella sorokiniana
  unsure (1)..(580): unsure at all n locations; Clone ID: LIB3602-091-Q6-K6-C4
cggaccgccttccgggtcgacccagcgttcgcggncgcgtgggcggccgcgtgggcgggcgcgtgggcggacgcgtgggcaaggagcggggcgtggatgcgctgccgcccgctgaggttgagcagatgatcggcgccgaggtgcgggcgcggctggcgggccgcgtgcgctgggagcgcgtggcggcgtacgaggtgcttcaggaccccttcagcgtggacgacggcacgctgacgcgcaccatgaagccgaggcgggacgccatcttcaaaagtatgccgctgaggtggcgcgtctgcagtcgcacctgcgctgatccggcagtgccccgtgcattgtcagcgccagaacacccagcagtgcccaggagcgctgccgcgctggatcgccagccccatgtgcgggcctgtgaacctactggaccggcctcgcagctcagctagttgcttgcccagttgggtgttacaaatgaatgtcgccgctcagcttggcctgcagctttctcacgcaagcccagcacctttgcgggtacagttttgcgtttcaaatcagatgccagcgcgcaatatgtgactgcact

SEQ ID NO: 6464 - DNA, 190 bp, Chlorella sorokiniana
  Clone ID: LIB3602-091-Q6-K6-C5
cacaggactgactggcgtggctggtctgtgcatgcggcaaagctttctgccacaggcgcagcagggctggctgactgcgggagaaaccggatgagcctctactgcattttagctgctgttgtacctcatacctgcccgtccctgtggtgttgagcgtttgcatgcacacggttgcaagttggaatgtgat

SEQ ID NO: 6465 - DNA, 570 bp, Chlorella sorokiniana
  Clone ID: LIB3602-091-Q6-K6-C6
gtcataaacacccagcgccctctcccctcagcactgccaggttttccctgtcgccctccttgctttcccctccctactgccgcccgttcaggcatgcacaggtcaccccatcgcatgacaactcactccaccccaacctgaacaatgacttgtacctgtgtaagcgtccagctgtgaaaaaaaaaaaaaaaaaaaaaaaaaaaaaaaaaaaaaaaaaaaaaaaaaaaaaaaaaaaaaaaaaaaaaaaaaaaaaaaaaaaaaaaaaaaaaaaaaaaaaaaaaaaaaaaaaaaaaaaaaggggggggcccgttttaaaagaaccaaatttaacgtccgcgggtttgaaacgtaaaattttttttttggggcccccaaaataaaattaacgggccgggttttaaaaacgtggggaggggaaaaacctggggttacccaaattaaatcgcttggaaaaaaatccccttttgcccagtgggggaaaaacaaaaaaggccccccccaatcgcctttccaaaaatttgcccaccctaaatggcaaatggaccccccctttaacgggccattaaaccc

SEQ ID NO: 6466 - DNA, 536 bp, Chlorella sorokiniana
  Clone ID: LIB3602-091-Q6-K6-C7
ggagcgcaagcggcaagcgcagcaccagaggaggagcagcaacaaccagggcagcaggcggcggggcacccagccacgccagagctgtagccaccgctgcaccaaatttagccaaatcgtgatatctatccctgctaatctgctgcgctgtccccgctcccgccttgcccgctttgtctgctgcccatcagatgcccgaggtgggccgggaggaggagggtgaggagcaggccggagtggatggagtgcccaaggtcggctttggcgccatgtgaagggcgggagccacaaagggcccctgcagcccttggccgctctatgtgccgctggcaccccagtgccacccttcaaaaccgagcgctgtgccttgtggtccgctgcgcttctcacttcacgtaacaccttgtgttgccttgtactccgccccaaagtacgtccgccccagagtagacagcccctgtacattctgccttggcatgccccaattgagctgcatcttgtgcactagcctgctgacgtgtaaaatgcaagttgag

SEQ ID NO: 6467 - DNA, 582 bp, Chlorella sorokiniana
  Clone ID: LIB3602-091-Q6-K6-C8
gtccccttcaccaggctacggctttggcggcatgctgaccgtggagctgcccaatctggagcgtgcaaagctgttcatggagcgcctgcagaacaagcacggctttggcctgatggcggtcagcctgggctactttgacacgctgatgtcggcctcggcggcctccacatcctcagagctgtctgacgctgagctggcacgtgccggcattagcggcgggctggtgcggctgagcgtgggcctgaccggcagccaggcgcagcggtgggcacagctggaggagagctatcgccacgtggcgggcgtgccgctgagtgtcaaaccagccttcaaggcggtgcaggtgacgcgcacgcagggcggcggcctgaagcgcactccctcctggcactcctttggcaccctggacgacacagacacggaggaggatgcagacggcaccagcgtgctgacaaccgaggcagctgcgctgctgggcacgcccagcgtgaaggtgcggcggctgaacagcggcgccgaaatcatctacaggcgcctgctgccccaggcgccagtcgccggcgcagctgctgccaacagcgc

SEQ ID NO: 6468 - DNA, 588 bp, Chlorella sorokiniana
  Clone ID: LIB3602-091-Q6-K6-C9
taaaaaaaaaaaaaaaaaaaaaaaaaaaaaaaaaaaaaaaaaaaaaaaaaaaaaaaaaaaaaaaaaaaaaaaaaaaaaaaaaaaaaaaaaaaaaaaaaaaaaaaaaaaaaaaagggccgcaggttttggggcctcccaagtttccccccgctggccttcccaatgctttcccttttttttgggttccctgggggggatttaatgggccgcggttggccaccgttttaaacgtggaaaacccggggatgccccccactttaaccccctttgaaaccctttccccttttccccttttggcctattggcaaaagggcccacccggtcggcccttcccaactttccacagcttgattggtaattgggaccctccttgtcccccctttttaggcccttgggccgggggggttcccctctttgcacccttttaactggccacccttttagggcccgttcttttggtttttttccttttttttcttgccctttgggcggtttttcccggtttccccttaaagggggggctcctttggggctcccgattaagggttttagggcccttggcccccaaaaacccgataagggggatgg

SEQ ID NO: 6469 - DNA, 408 bp, Chlorella sorokiniana
  Clone ID: LIB3602-091-Q6-K6-D1
gcgttcggcgcttcgcatccgtctgtcctttgttccgtgtgagtgttccttttttccccgctcctcctaccatgtgtattcttgggtcatatgttgtaacatagagttttaaaaaaaaaaaaaaaaaaaaaaaaaaaaaaaaaaaaaaaaaaaaagatataaaaaaaatcaaacataaaatacgcgtgcgtggggaggtaataacctttttttatggggtcccctcctattcatttacactggcccgtccttttttcaacctgccgtgactgggtaaaaccctggctgttgcccacctataatcgcctgtgcgggacatcctccttctctcccgctggctgtttttgctaaggaggcccgccctcgatcgatccttcccaaccgttgcgccgcctgcctggcgagtgg

SEQ ID NO: 6470 - DNA, 503 bp, Chlorella sorokiniana
  unsure (1)..(503): unsure at all n locations; Clone ID: LIB3602-091-Q6-K6-D10
ttccgggtcgacccagcgttcggctgcgctggcgcggcccccggcggcggcgcggccggcggcctgagcgcgctgcagtgcgtgctggcggttgcgctggcggtggccgtctggggcctgctcctggtcaccaagctggtgctgggctacctgctgcgcctgatagccaccacctacgtgcagcactacgacgacaagcgagcagcagcaacgcgcaccgcgagccgtgcgctagaggcgcggcggcggaccatgggcggccccgctttgcaggcggctgcggcagcggctggcggcggcggcaagaaggaggagtgatggaagcggcgtgatgcctttaggctcagatttcatgtacatcagatttcatctgtttgtgtccagcacgctttgtgaaattgctatccanaaaaaaaaaaaaaaaaaaaaaaaaaaaaaaaaaaaaaaaaaaaaaaaaaaaaaaaaaaaaaaaaaaaaaaaaggaaaaaaaatttggggggtcc

SEQ ID NO: 6471 - DNA, 112 bp, Chlorella sorokiniana
  unsure (1)..(112): unsure at all n locations; Clone ID: LIB3602-091-Q6-K6-D12
gnaccacgtcacttgctgcccaggcctgaggccccgctctcgtcccctcactcccagctgccctcaatcctgatgcaatgaagcagcttgtgctcgctgtaagcgaagcacc

SEQ ID NO: 6472 - DNA, 431 bp, Chlorella sorokiniana
  unsure (1)..(431): unsure at all n locations; Clone ID: LIB3602-091-Q6-K6-D3
gcgttcggcanaggcatccagnagagcttcaggagggggacgacggctgggtgatccgtgacggcgtggtggtcatcatcaaggactccaacatacccgacggcaccatcatctgagcccanaaagccagccgggcggcagcagcacctcaacatcaccttgccgccccggcgcgctgccggcacgctgatgttgcaccgtggctgccttggccgcatttttgccatcccattcattcgcgttggcctgtactcccgcttgtcttgtccagtctcccttttccctgtcccctgctccctcctcctgacccttgctctgctcccgcggggttttgctcagccactacccgagaatgcaccaccaacccgaatgcatttcatactcgcgcgcgtgtgatgacccgcccagccgatctgtaagacatttctttc

SEQ ID NO: 6473 - DNA, 545 bp, Chlorella sorokiniana
  Clone ID: LIB3602-091-Q6-K6-D4
gcgttcggccggcgcggcggcggccatgcggttgcgggcggcggcgaggacgatgcacttgccacgactggcgaatttgaggaggaggagggccctgctgccaaggcggtgcggcagattgaggagcggctgtcggcggcagaggacgaaacgtatgtgggagatgtggaggaaatcgagggcgaggcggagcagccggccgcgcagcaggcgcagcaggcggaccggcagcagcgcaatggcggcggcgtgaagcactagccggtgccctttcattcgcagcctgcttgccggcggggatgctgctgccccattgggcggcggctgagcttgccggcgggcgggaccccttgcctttttaccagagagattgcagagagcgttgtgtgagcgtgcgagactgccttggatgtaccattgagcgccccattttccccacaccagactttcttccccctgccagatccaatccacccatcgttttccttctgcaacaagaagtcctgccactgcatctcaccatcaaggcagctgcatagtgcgct

SEQ ID NO: 6474 - DNA, 530 bp, Chlorella sorokiniana
  Clone ID: LIB3602-091-Q6-K6-D5
aaaaaaaaaaaaaaaaaaaaaaaaaaaaaaaaaaaaaaaaaaaaaaaaaaaaaaaaaaaaaaaaaaaaaaaaaaaaaaaaaaaaaaaaaaaaaaaaaaaaaaaaaaaaaaaaaaaaaaaaaaaaaaaaagggggggcctttttagagggttccatttttttttccccttctttgcaactttttgttttttttttggggccccttaatttaatttacttgcccgtttttttaaaccgtggtatttggaaaacccttgggtttccccattttattccttttggaaaaattccctttttccccgtttggttttttaccaaaaggccccccccctttcccttttccaaaattttgccccccttgtttggcaattggcccccccttttttccggccttttaaccccgggggttttggtgtttccccccagtgtgcccttttttttgtccgggccctttggcccggtttttttggtttttttcctttttttttttcccctttttccggtttttccccgttagtttttttatggggg

SEQ ID NO: 6475 - DNA, 371 bp, Chlorella sorokiniana
  Clone ID: LIB3602-091-Q6-K6-D6
ctcagcagggtatttacatgtgccatgcctgcatgcacgctatcgcgctaggcaggggatggcagctgagggcgagatgaaaggcagttctctgaaggggtgtgtcgtgtggcgttcaacgctgcatggcattattgctcgggatggaagcccgcccaggaaaccccccggcgtgtgttgggcaaagtagctgctgactggcgcaatcagaggcggcagcgagttcaacaaaggctgaagtacacttgcagctgactggcggctgctgcggacagcgctacgccagcctgaaaggcttgaaaggcgaggagctgtggcaagtccagctggcttaggcggccaccatctccttgccctcctggcctgcctca

SEQ ID NO: 6476 - DNA, 77 bp, Chlorella sorokiniana
  unsure (1)..(77): unsure at all n locations; Clone ID: LIB3602-091-Q6-K6-D7
naaaaaaaaaaaaaaaaaaaaaaaaaaaaaaaaaaaaaaaaaaaaaaaaaaaaaaaaaaaaaaaaaaaaaaaaaaaa

SEQ ID NO: 6477 - DNA, 268 bp, Chlorella sorokiniana
  unsure (1)..(268): unsure at all n locations; Clone ID: LIB3602-091-Q6-K6-E1
gcgttcggccctgnagtggtaccagcaggcggggctgcagaacggccgctgggccatgctcggcgtggccggcatcctggtgcaggagctgctgcactccaccggcctgggcggcaaggctgctgacgtgtactggttcgacgccggcaacaacaccttctgggcgcccaaggagaccctgattgccatctccttcctgctgttcaactgggctgagctgaaccgcatgcaggactacatcaagcccggcagcaacgtgaccgacccc

SEQ ID NO: 6478 - DNA, 563 bp, Chlorella sorokiniana
  Clone ID: LIB3602-091-Q6-K6-E10
agctcctactttcgtcacagacagtgaagaagtgatcgagatcaacccgtacctgctgggcacgatggcgggcggcgcagccgactgccagttctgggagcggaacctggggcggcagtgccggctgtacgagctgaacaacggcaagcgcattaccgttcggggcgcctctaagctgctggccaacacgatgttctcgtaccgcggcatggggctctccatgggcaccatggtggctggctgggacgaggcgggccctgggctgtactatgttgacagcgacggccagcgcaccaagggcaagctgttcagcgtaggctctggcagcctgtacgcctacggcgtgctggacgagggctaccgctgggacctgagtgtggaggatgccattgagctgggcctgcgctctatctaccacgccaccttccgcgacgcggcctcgggcggcacggtgtcggtgtaccacgtgacccaggacggctggaccaaggtgcggggcgaggacgtgggagagctgcacttccgctactacccccagccagaccagcacccatgcaacctgg

SEQ ID NO: 6479 - DNA, 452 bp, Chlorella sorokiniana
  Clone ID: LIB3602-091-Q6-K6-E12
cccagcgttcggccccttcagctcacgggtgcccgtgcgccggtgaccaggcgtcgtcatcgcccctccccaagtggacgtgagcggcgtggacatctccaagtttgacgacgcctacttcaagagcgccgagaagaagcagaagaagcagagcgaggagggcttctttgccgagaagaccgagaaggcgccgctgcccgctgagtatgtggccaaccagaaggcggtggacgcggcgctgctgggcaagctgagcgacgagctcaagggctacctgtccagccgcttcacgctgcgctctggcgaccggccgcacctcatgaagttctgaggtgccagcctggcagctcgctcgcccagcaagcggcccggcggccgggcttgcttggcggcagcccgcgcggcacgcggcgggtccgtagtgcacggcccgacgagcgctgtgcggcggc

SEQ ID NO: 6480 - DNA, 519 bp, Chlorella sorokiniana
  unsure (1)..(519): unsure at all n locations; Clone ID: LIB3602-091-Q6-K6-E3
gcgttctgccggtttccccggccaagaacgaggatgccgttcgccaggcaggtctccatcgggcgcgtggcgctcgtccagtacccggaggcggaggccggcaagctggtggtgattagcgatgtggtcagccccaacgcggccctggtggacttccccggccagacgcggcgcgtgatcagcttgagagcggctggcactcaccgacttcacggtggacatcccccgcctcgccaagaaggcggtgctgaagaaggcgctggaggaggcggaggttgaggccaagttcgccaagagcgcgtggggccagaagctggccaagcgcgcggccaaggcggcgacgaccgactttgaccgctacaaggcggcggtgcagaagatgaagcgcagcgcgcaggtgcgccgcgccttcaactcgctgaagaaggccgccaagtgagcggagctcctcgcagccgcagcagccgcccaattcattgcgcccggctcgccccctggtgtaatgtagcacgcannana

SEQ ID NO: 6481 - DNA, 116 bp, Chlorella sorokiniana
  unsure (1)..(116): unsure at all n locations; Clone ID: LIB3602-091-Q6-K6-E6
gagcttgtgtaattcgcnccgctaaaaaaaaaaataaanaaaaaatattaaaaaaaaaaaaaaaaaaaaaaaaaaaaaaaaaatataaaaaatttaattttaaaattttaaagttt

SEQ ID NO: 6482 - DNA, 409 bp, Chlorella sorokiniana
  Clone ID: LIB3602-091-Q6-K6-E8
acagttcggggggaagccagctgggcgacaagctggcgcccagcaccgacagcacgggcctgaacaccgagctggccactgtctttcgcaagctggccgagaaagtcgcaggcgagcccttcaggcagccgccttcaagaaggtcgccgacatcatcgatgccttcccagaaaagacacctccgcctcccagctcaaggactccaagggcgtcggcaagagctcgcttgccaaggtcacagagtggcttacaaccggcaccctggcaatccttgaggaggctggcgctggggtgaacgcgccggaggacaagtcagcggaggtggccctcaagttcctgtgaggggctctggagtcgccccgctgccctggtgtgcggccatgcttcagccagcgcgccagtcttgtcc

SEQ ID NO: 6483 - DNA, 499 bp, Chlorella sorokiniana
  unsure (1)..(499): unsure at all n locations; Clone ID: LIB3602-091-Q6-K6-F1
gccccccgccggccgcccactttgaattggagcctggatgggtggcgctgctgcgctcgacagcactggggcacggtccgcgatgccatgtcagtggcgccggcaggctgtgatgctcgagggatacccgccgggtgtgcgccgcgcgctggtgctgctgcgcggcacggagcgtcggttctggagcggccattatggtgccaagtttgccgcgccatcgctgcgctttttgccgccgccgccgcgtggtagctgaagcaaacgtgcggcatgagaatgggtgggccaacaaccttgtcatgaaatcgattcttggaccttgcctgtgcaatgcaaaatccgagctggcctgtgaatgcaactttgcagctgtaactgcacaagtgcagaanaaaaaaaaaaaaaaaaaaaaaaaaaaaaaaaaaaaaaaaaaaaaaaaaaaaaaaaaaannaaaaaaaaaaaaaaaaaaaaaaaaaaaaagggggggcccgttttaga

SEQ ID NO: 6484 - DNA, 411 bp, Chlorella sorokiniana
  Clone ID: LIB3602-091-Q6-K6-F11
gcgttcgcaatccgcctgcccgcctatttgttctgctttgacttgggtaagtctaagcaggctgggatgatgcaggagatgcaatgatggactgctgctcaactcgtggcacctcatgatggcaggccagactcccaagtgatgagcggctcccttggagcggcggtgctcgcatgccatatagatagaaacattaaaaccatctccttgacgccgtcacatcagcgtgcatgtgtatctgccatagtgtacccatctcatggcatttttgtgggctgtaatgcctcctccaaaaaaaaaaaaaaaaaaaaaaaaaaaaaaaaaaaaaaaaaaaaaaaaaaaaaaaaaaaaaaaaaaaaaaaaaaaaaaaaaaaaaaaaaaaaaaaaaaaaaaaggggggggcccgtttta

SEQ ID NO: 6485 - DNA, 331 bp, Chlorella sorokiniana
  unsure (1)..(331): unsure at all n locations; Clone ID: LIB3602-091-Q6-K6-F12
gcgttcggcatccanaaaagtacgaggtcatggagtgcgacattgcgccccagtggcctcgcgagccgtgaacgtggcgccctacaagggcaagcacgcgcagggcagcggcggcgaggcggcggcagacatctaccggcaggcggcagcggcagacccggggccctcaaccagcgcgcgggcaggcgggggcggccctgttggcctgggcggcggcacactgcacgtccaggaggtgatcgacctcacgggggacagccccgccccctcgcggcggcgcggaaccgctgcctcccccctgggcaagggcaagcgcaaggcagggtcgtga

SEQ ID NO: 6486 - DNA, 562 bp, Chlorella sorokiniana
  unsure (1)..(562): unsure at all n locations; Clone ID: LIB3602-091-Q6-K6-F3
ccggngtcgacccacgccgtccgcgnaaaccttcgcgccgctaccgcgnaggattgagggtgcatccacgcccnngctgggccatnngctcggcgccctnngggctgcctgacccccngagctgcntgcagaacaacgngcgccnngctgacttcggcgagnngcggccgtctggttcaaaagccggcngcnnttcgatcttcaacngaggacgnngcctgaactacgctgnnggcaacccnnctccctgatcccacgcccagnntccatcgtgnngctgtgctgnnctgacccnnagctggtgatcaatgggcnngccgccgaggcgtacccgctaccagcggcgagnnggccccgtggagaccagcggcganctccctgtaccccggcggctntcttcgaccccctgggtctggctgacgaccccgacaccctggctgagctgaaggtgaaggagatcaagaacggccgcctcgccatgttctccatgttcggcttcttcgtgcagggcctggtgaccggcaagtcccccctggaaaacctggctgaccaccttgctgag

SEQ ID NO: 6487 - DNA, 551 bp, Chlorella sorokiniana
  unsure (1)..(551): unsure at all n locations; Clone ID: LIB3602-091-Q6-K6-F4
tcggcacagtctccagcccagcccccggggcgctttattcaccccagctcaccccagccttctcccaggagtgccggcctccgcctctgcggctcttgcctgccgcgggcccctgcgcgctcatctgaaatgctccccgccaaactcatcccctgtcttttcctcgccacgcctttcagatgcattcaagctcggtactcggccaacttgaacttactccaaaccgcactcctgttagcccttcccctccacgaccttgcggcgcagccgcctgtgtgtgcttcccactcgcaggcctgccgccccgcacccatccataattttttgcccggcccctttggtttctctgcccatcgccgccggatgcggcgtcccccagatcgctcgtctctctcttcctacctcctgcatgctgcagcaagctatacatggccgttcagccaccgcatccccccttttttgcccccctagtgtccttcgtcccctcgcgtgcgtcttactaccgatacctgctgtnccaacaaaacccagccatgtgactgaccgagtgc

SEQ ID NO: 6488 - DNA, 564 bp, Chlorella sorokiniana
  Clone ID: LIB3602-091-Q6-K6-F5
ccgaggagcagtggagggcggcggccgagtttgagggtgatttccagtccatggcggtgtgccccttcagcgagcaaacgctattcagcgcactggcgctgcgcaagctggggcgggaggaggaggcgcatgctctgctcgagcggctgctggcgcatgcccaggcactcgcggaggcggaggcgcgggtcgactactttgccacctccctgcccaccatgctgctgttccatgacgaccttcaagatcgccaggaggccaaggccctgtttctggaggtgcaggcgcggtggggcctgggccaggctgcccaagcctgggcgctggctcacgaggtgcttcgtcgagacccctcgcacggcagggccgcagacctggtggcagccatgcaggaggcgcggtacagcaagaatagtgaggatggagtgtgacaagagtgtagcagtggcagccccttgctggacagcgctggcgagggtgcctggaagcagcagcagaatgcggctgcgggtactgtacatttgcaaatcttaacgcaatgcagttctgtaaatctaccagtcg

SEQ ID NO: 6489 - DNA, 504 bp, Chlorella sorokiniana
  unsure (1)..(504): unsure at all n locations; Clone ID: LIB3602-091-Q6-K6-F6
tgnacccggnagcgatctgggataccgaccgctgctgaggcggcggcaagtaagtgcagcaacgaatggccacaagtgccgcaccagcccaggggnaagagtgtgcagcgaccttgtgcaggcaggcggcaccggctgctcctgccgcccgctgccacagctgagctggcagcaaacgtggccagccgctgcctccagcgctgcagcaacacctgcagcagcaaaccaaatccccaaaccaacccgcgcccctttgcccatgtgaaccccacacgtgcccacccaacctggctgcacgctgaatgctccacacactgcctcgccctccaaatgatagcctcacctgggaactggagaatgccctttccaagcatactgtgtgccctcctccgcatccaccctctgtagcctgttcagtctcagtgccactctgcggcctctcattgtcggtggcctgcccctgtgttgtccggtgatcagcttatgattcttttgaacttgctt

SEQ ID NO: 6490 - DNA, 249 bp, Chlorella sorokiniana
  unsure (1)..(249): unsure at all n locations; Clone ID: LIB3602-091-Q6-K6-F7
gngctgatcaagcggccaaggcagctccaacagctacgccatcaagaagaagacgagatcgagcgcgtggccaaggccaaccggtaaacggctgttgcgcacccaccaaaacagcagcccgccacagccggcacccctgggcaggatgccagaccgccagtgcagcagcacggtgtggttcagctgctgttatcgtggcaggctttccaattaggcgcgggtgttaggattgtgtaacacagcgcaccc

SEQ ID NO: 6491 - DNA, 485 bp, Chlorella sorokiniana
  unsure (1)..(485): unsure at all n locations; Clone ID: LIB3602-091-Q6-K6-F9
gtccgcacacctcgacgcccgacgcaaggaggctggttccacaccgtgtgggaccccacctttggctcctccgactccatcaccaccaccggctacaaccagtgagcgcccgctgaggcaatggcgccggcccagccgccagccgccttacgcaccccaacagagcgggccagtggtgcccctaacgcgacccgcacacaccccgcgcacccacgttccggcacaacgcatgatagcgctcctgctcccccctgtttctcctgtctgtttgtaatttttcagtagctctgccctgctgactgctgccgaatttgtttgctagtgtgggcccccttagccttcagacactgtgcgtcaccccctgcccagccgcccagcggcaccccctgtgcttgcgcctcagaactgtnctgcaccgccgccacttnccataacaaatatagcatggtcatgtaaagtgcagtggcaaaaaaaaaaaanaaaaa

SEQ ID NO: 6492 - DNA, 551 bp, Chlorella sorokiniana
  Clone ID: LIB3602-091-Q6-K6-G1
tcgggacagcgcctggctcccgcgaggcaagacaggccgccaagccgccaagcggtcaagaagagctccttcaagaagacgaagaagccccgctacagcgtggtgttccaccgccccaagaccctcgttcgcagccgggaccccaagttcccccgcgtcagcgcgccccgccaggcccgcctggatgagcactccgtgatcaagtaccccctgaccactgagtccgccatgaagaagattgaggacaacaacaccctggtcttcatcgtggacgtgcgcgccgacaagaaggcgatcaagaaggctgtggcccgcctgtacgacatccagaccaagaagatcaacaccctcatccggcccgacggccagaagaaggcgtacgtgcggctgaccgccgactacgatgcgctggatgtggccaacaagattggcgtgatctaaagcgtgcggctggagcggggcggctcccgcccctcccaacccacccttggcctggtgccaaggcgccggctgcctgcacggtcaccccacgcggccggtggcgccggcgc

SEQ ID NO: 6493 - DNA, 325 bp, Chlorella sorokiniana; identical to SEQ ID NO: 6196
  Clone ID: LIB3602-091-Q6-K6-G11

SEQ ID NO: 6494 - DNA, 437 bp, Chlorella sorokiniana
  Clone ID: LIB3602-091-Q6-K6-G12
tctggtgaaggcatgctgcccaaggccgcatcgccagcccgctgttcaaccacctcaaggtgtacaagggcgcggcccacccccacgaggcgcagcggcccattgacatcaccagccgcatctccaagaagcccgctgaggctctctgagcgcgccccgaagcgcagccctctggggcaggtggcagggcaacggcctgggcttgattcagcccgcggcgcggccctgtgagctttcccagagcggccatgaatggtgggcggcgagcaacgcggcggggccatccgcattgggggccacgctgtgcatgcaccgcccgcccacagcagcagcagcagcctcacgtcccggttactttctgtcacttcccttccactccccgctccccggcacacttcttctttagttcatgagtagccatgtaaacacatacatgc

SEQ ID NO: 6495 - DNA, 580 bp, Chlorella sorokiniana
  unsure (1)..(580): unsure at all n locations; Clone ID: LIB3602-091-Q6-K6-G2
gntgaggtgtcntatcgagtcaaggcgcggcgggttcgcgtgaagggccctcgcggcacgctgcagcgcgacttcaagcacctggctgtggacatgttcctgactgaggaggagggcaagaaggtgctcaaggtggactgccactttggcaagcgcaagagcctggcgtccatccgcacctgcacctcgcacgtgcagaacatgatcaccggcgtgaccaagggctacgagtacaagatgcgcctggtgtacgcccatttccccatcaacatcaacatcgagaacaagggcggcaaggtggagatccgcaacttcctgggcgagaagattgtgcgcgtggtggacatgctgccgggcgtgacctgcgagcgcagcgccgccgtcaaggacgagctgatcctgaccggcaacgacatcgagctggtgtcccgcagcagcgcgctgatccaccagaagtgcctggtgaagaagaaggacatccgcaagttcctggacggcatctacctcagcgagcgcggcaccctggtgaagcccgagtaagcggagcccgcacgttgcagtagaggtggcggcacgagcg

SEQ ID NO: 6496 - DNA, 508 bp, Chlorella sorokiniana
  unsure (1)..(508): unsure at all n locations; Clone ID: LIB3602-091-Q6-K6-G3
gcgttcgggccaccattgccagctgcggccgggtggtggtgatggaagcggggcaggtactggagcagcagaagcagccacagcaggagggcgagccggtgcagcagtaagtctcgcagtagcgtggcagccttcagcgcggcagccttagaaggaactcacagccggcatacgacagcagccggaggcacaagtgaatgccgctgcggttgcagccatgcagccatgcacggcctggcctgccctgtctatcatgccagcaccatccaacccggtctatgttacaagatgactgcnaaaaaaaaaaaaaaaaaaaaaaaaaaaaaaaaaaaaaaaaaaaaaaaaaaaaaaaaaaaaaaaagangnnaaatttaaaaagaattaaaattacgtnccgcgtgcttgcgaacgtctttgctttttttataggggcactctaatttaatttcactggcgtgtccttctccaacgtctgggcctggggataaccttggccttcccccatttt

SEQ ID NO: 6497 - DNA, 579 bp, Chlorella sorokiniana
  Clone ID: LIB3602-091-Q6-K6-G5
ggggccgccaacaaactcaccctcagctccaatgacggcagtggcctgggcgaagagtggggcaaggtatgtaggatttaatcgcatggagcagtaagctagctcccctcttccctcaccaaccgattctgcatgtcccgccctggcctgtgtccccttgcagacgttcagggagacgcagcccggtgaaacgggggtgccagcttactctgtcaacgatgttgcccaaatgttcaagatccccaagttcgactttgtgaaaatcgatattgaaggcgccgagggccgcgtgtttgttccgggcgccgacctcagctggctgggcggcccccgggtggtctccctggaaatccacgacttctttgccgagaggtttggcatgacggctgtcagcggacacgtggacgccgcttttgcccagcacccaaactaccagatcgcccgggacaacgaacacgtgtttttcatcgataaggaccagctcgcagcagcccgcctgtccagcgcagcccagcctgctggcggtacgccatagcgtgcacgccgcatggttggttgacagcttgcctctgagttccg

SEQ ID NO: 6498 - DNA, 743 bp, Chlorella sorokiniana
  unsure (1)..(743): unsure at all n locations; Clone ID: LIB3602-091-Q6-K6-G6
cacgcgtccgcgtgnattggtgggcacagtcnacagcggtgagccgcaggnncagccccagcccccgcagcagggcgagcgccnncgaactatgtccgccgnggnagcagnnaagcccgaggtggccgnngctgccgaggnatgnnccaagccgnngcatctcccacnnccccatcttcgnngcgcctcttgccacctntnntggcggcaccgggtgttggcgggnncttctcgggccgtggnncggccannaggcaganaagcggcgagnngcggcggagggggcggcgagggggcggcgatgaacgaaggctnngcccccgaggnnaggagntgcannaggctgagnnttccagcccggttgtgcccagctggnaggaagggtggnnnaggtggccnnaccggcgaggnnaggaacgagnngcggcgctnnngtttgaacgccannnagtgcaagcnnntgtaccgnngtttgaccaacccgacaacnnggggaaagtggaaggggagcggggncnngtgggccaaagggccccgcatccctgcnnagcacaaggnagnnaacaagnnaagaatccccgcttcctgnatnngcgccaggaacaagaacnngctcaagaatnnccgcagnncaacccacatncatncnnatgcccgnnngcaccaagggtnngcaggaaagcacggcnnggcagcgaaccaaggcccatggntnngtggagncnntgcgtggaaccctttgc

SEQ ID NO: 6499 - DNA, 136 bp, Chlorella sorokiniana
  Clone ID: LIB3602-091-Q6-K6-G8
ctctgaactgcaaaaaaaaaaaaaaaaaaaaaaaaaaaaaaaaaaaaaaaaaaaaaaaaaaaaaaaaaaaaaaaaaaaaggggcgggcggctcgcgaatctaaaaactaggtttctagaatcgcgaaccgccgcgc

SEQ ID NO: 6500 - DNA, 477 bp, Chlorella sorokiniana
  Clone ID: LIB3602-091-Q6-K6-G9
ccgtcgtcgaggtagccagcacgatggccaaaatcaaggcccatgagctgcgcggcaagggcaaggaggagctgctgcagcagctcaaggagctgaagcaggagctgagcggcctgcgcgtggccaaggtcaccggcggcgcccccaacaagctgtccaagatcaaggtggtgcgcaagggcattgcccgcgtgctgaccgtggtcaaccagaagacccgggacgctctgaaggaggcgtacaagggcaagaagtacgtgcccctggacctgcgcgtcaagaagacccgcgccatccgccgccgcctcaccaaggcgcaggccaacgccaagactgagaaggctgccaagaaggcgcgcgccttcccgcagcggaagtacgcgctcaaggcgtgaaggccttggaagcagcccgctgcagccgtgcaggcacacctctaggcagcggccgctccggccccatgtaacttgacgcccg

SEQ ID NO: 6501 - DNA, 556 bp, Chlorella sorokiniana
  Clone ID: LIB3602-091-Q6-K6-H1
gcggcctggccgaccgcatccagcgggcgagctggaggcagagttcggacgctacggccgcgtctcggcgacctggattgcccgcaacccgcctggctttggcttcatcacctttgaggacgagcgtgatgccgatgacgccgtggccggcctggacggcaagaacgggtgggggggggggcgcgcccgccccgggcgccgcgacggcggaggcgggggccgcggcggcggcggctacggtggcggcggcttcggcggtggcggctacggtggcggcggcggcggcggtggcgtccgccggtgcttccagtgtggcgagcccggccacattgcgcgcgactgccccagcggtggcggtggtggtggtggccgcttcggtggcggtggcggtggtggcttcggtggtggtggtttcggtggcgggcgtggcgaccgctgtgtgtgccgccgtggtgaccgtttcgtcggccgccgccggtgccgcgggtgtggttaccggcgtcgtggttcctcccggcgtgacctccggggtgtggtcgtccgggggggccggttc

SEQ ID NO: 6502 - DNA, 575 bp, Chlorella sorokiniana
  unsure (1)..(575): unsure at all n locations; Clone ID: LIB3602-091-Q6-K6-H12
ggctccgcancaanacaggccgccaagccgccaggcggtcaagaagagctccttcaanaagacgaagaagccccgctacagcgtggtgttccaccgccccaanaccctcgttcgcagccgggaccccaagttcccccgcgtcagcgcgccccgccaggcccgcctggatgagcactccgtgatcaagtaccccctgaccactgagtccgccatgaagaagattgaggacaacaacaccctggtcttcatcgtggacgtgcgcgccgacaagaaggcgatcaagaaggctgtggcccgcctgtacgacatccagaccaagaagatcaacaccctcatccggcccgacggccagaagaaggcgtacgtgcggctgaccgccgactacgatgcgctggatgtggccaacaagattggcgtgatctaaagcgtgcggctggagcggggcggctcccgcccctcccaacccacccttggcctggtgccaaggcgccggcagcctgcacggccaccccacgcggccggcggcgccggcgcagcagcggcagcggcgcgtcgggcgcagtgcgcagcccggc

SEQ ID NO: 6503 - DNA, 590 bp, Chlorella sorokiniana
  unsure (1)..(590): unsure at all n locations; Clone ID: LIB3602-091-Q6-K6-H2
gctacnncgctacgcgctgggcgcaacggcacgcatcatgnnacctgcccgcnncgcgcatgnaacnncggtcgtttggcnnacgaccagcaacnngtgatgatcaagggccaacnngagctggaaaacgccacgcagnacgtacgttngacttcattgtcgcggnttcaacgggccgcgacaaggagcaggttggcgaaggacgtgggccgcaacaggtacttcacccctgaccaggcggtggagtacggcatcatcgacaaggtcatgaacccctctgacgcagtggcgattgagcggcgcgactacgagggcatgctgcgtgccagccagtcgcagggccgcggcgcgcgcagcggcggcgccatggccggcgccgatgcctgagcgcagaccctcccttgcaactactactgctgtcggccgcaggcgcgcatgcgtcagatttagtgcttgcgctcggccgctgctctgctgctgcttactgtgcactctacgctcacgccgctgcctttggctgccgcttgttcgctttctctcctgtccagtcatcctctcatgccccttgactttccctcccctgctcagcc

SEQ ID NO: 6504 - DNA, 575 bp, Chlorella sorokiniana
  unsure (1)..(575): unsure at all n locations; Clone ID: LIB3602-091-Q6-K6-H3
gcagtgccaggggnatccattaggttggccgtggggcgttcactgcagggcagtgaacgccgcagagcgattgacaagcggtcgtggtagcatctggtaattttgcgcccccagctttgctggccttatgatggctgggcctcaaaggacatgatgcgcgctaccaagctcgtgctgggtgtggggctgacatccctgctggctcggcccgctgcttctgttgaagatgtgcccaccgtcgaccagccggagcgctcgctgaacatggaagtgaagcccgagccatgccccaagggtgacgataaatgcttggcccacaagtaccgagttgcgctgctgcatgccctcaccacgatcgagactccgccgcccaaagcggaatacctcgactgcccgacaggctactgcccctgcctgacatgccccaacacctgctgtggcaaatgcatggatgccacaagccctcagtgcaccagcatcaagtgccttttcggctggggctcatgctcgtgaggccacttaagtgaagttaagaagcttctctgttgaacactgcctagcatgcttcaacccct

SEQ ID NO: 6505 - DNA, 395 bp, Chlorella sorokiniana
  unsure (1)..(395): unsure at all n locations; Clone ID: LIB3602-091-Q6-K6-H4
gcgttcgggcggcgctgcgggcgcggcagctggggtgctggcacatgtcgccacaatgccgaagccagaggagtgaactgatggagggatagtgcccctactaaggggcctactgatcgaaatgacgccagaggctgcgactggctgcccagcaccagcttttcacccgttttcatgctgtcacatggattatggccaagcttcccaccctcacgtgtatgcaagcatatgcctcacggctgcatgctatgccatccatcaagccaagtccgccaattgttcttctgccggcagtatgcctgccgttgcctgcccgcaaggactcggggtcctgagcctggatgcagtttatgttactattagttcgcctgtacagcatagtaatgacatgcntg

SEQ ID NO: 6506 - DNA, 502 bp, Chlorella sorokiniana
  unsure (1)..(502): unsure at all n locations; Clone ID: LIB3602-091-Q6-K6-H5
cgcagtaacgcgccgncaatgcgcgggggcttggccgagcagccgccctgacggccaggctgcatgccctccgggctggcaatctactccggcgctaacagaacacgtgttgtggctcaatggccaaatatggggagcggcctggcatgctgccggccctcccgcatgcatccttggtgtgggcaacgaccataaatccaaaatcccaggcctcttgatacttgaacccgccccaactgggctgcaatagttgcgcgcagtgggcgctgcgctctgcattagccctctcagcccctgcctcttcttttcaccatgctgccaactcttccatcaccatatgcaagcgcgctccctctttgtgccccccctttgcctgcatgctagtccgcggtcagtccagccggctaatacaccagtactcttttgctcctcgtacagatcaagccatttcattttcgagtgcttgtgcgcactttgtctgcaaaacaattgcgcgcnnnna

SEQ ID NO: 6507 - DNA, 94 bp, Chlorella sorokiniana
  unsure (1)..(94): unsure at all n locations; Clone ID: LIB3602-091-Q6-K6-H6
naaaaaaaaaaaaaaaaaaaaaaaaaaaaaaaaaaagaaaaaaaaaaaaaaaaaaaaaaaaaaataacatacaaaaaaaatggcaaaaataata

SEQ ID NO: 6508 - DNA, 577 bp, Chlorella sorokiniana
  unsure (1)..(577): unsure at all n locations; Clone ID: LIB3602-091-Q6-K6-H7
gntgtgggcgccagnaagcgggcgtggacttcttccctcactgcgtccacctggtcagctgggagaaggagaacatctcgtccgaggcgctggaggcggcccgcatcgcggccaacaagtaccatggtgaagaacgcgggcaaggacgccttccacctgcgcgtccgtgtgcaccccttccacgtgctgcgcatcaacaagatgctttcgtgcgccggcgcagacaggctgcagacaggcatgcgcggtgcgttcggcaagccatttggtgtgtgcgcgcgcgtgggcatcggtcagatcctgctgtccatccgctgcaaggacacgcacgctgcggtggcggaggaggccctccgtcgtgccaagttcaagttccccgggcgccagaagatcgtggctagcaggaactggggcttcactccctacctgcgcgacgattacttggagtggaagcgtgagggccgccttgtgaacgacggtgtgaatgccaagctgcttggcaaccacggcccgctggacgcacgggagcccggccagattttcgagggtcctgcccgtctgtggcgtgtgccggtgc

SEQ ID NO: 6509 - DNA, 574 bp, Chlorella sorokiniana
  unsure (1)..(574): unsure at all n locations; Clone ID: LIB3602-091-Q6-K6-H8
gnaaggagccgggacccaccatctaccgcatgaagctgtgggccaccgacgccgtgcgcgccaagtccaagttctggtacttcctgcgcaagctgcgcaaggtgaagaaggccaacggccagatcctggccatcaacgagatctttgagcgcaaccccaccatccgtgaagaactacggcatctgggtgcgctaccagtctcgtaccggctaccacaacgcctacaaggagtaccgcaacaccaccctgaacggcgctgtggagcagatgtaccaggagatgggcagccgccaccgcgtgcgctccccctgcatccagatcatcaagaccgccacgctcacggcgtcccagtgcaagcgcgcggccacgcagcagctgcacgacagcaagatcagcttcccgctggcgcgcaaggtgctgcgcccctcgtcccgcaagttccgcaccaccttcaaggcggtgcgccccaacgtggccatctactgagcgcctcgccccaagcggctcgcggccacactggcggcagcagcggcggcggcggcgacccagcttgtgctctggagcggcgccgctg

SEQ ID NO: 6510 - DNA, 584 bp, Chlorella sorokiniana
  Clone ID: LIB3602-091-Q6-K6-H9
acgcctgaggtgccccctgccctcaaccgcttcacccgcacgctggacaagaacatggccgagagcctgttcaagctgctgatgaagtaccggcccgaggacaaggcggccaagaaggagcggctgctgaaggaggcggaggcgcgcgaggctggccaggaggttgagaagaagaagcctgtggtggtcaagtacggcatcaaccacatcacgcagctggtggagagcggcaaggcgcagtgcgtggtgattgcgcacgacgtggaccccattgagattgtggtgtggctgcccgcgctgtgcaagaagatgggcgtgccctactgcatcgtcaagggcaaggcgcggctgggcaccgtggtgcacaagaagacggccaccgcgctggcgctgacggcggtgaagaacgaggaccagcgcgagttcgccaagctggtcgagtccttcaagaccatgtacaacgacggcccccgcgtcagctggggcggcggcatcatgggccccaagagccaggcggcgcagaagaagaaggagcgggctctggccaaggacgccggcctccgcgtgtaagcgggcagcaccca

SEQ ID NO: 6511 - DNA, 373 bp, Chlorella sorokiniana
  unsure (1)..(373): unsure at all n locations; Clone ID: LIB3602-092-Q6-K6-A1
ccacgtggncggctacagcccgagctacacccccgacacctggtccgagtctggcgactcttacaagctgggcaccaagggccttattgcttgggccggcctgattgtggtgctgctgggcgtgggcatcaacctggtgatctttatctctgccctgggccagtaatatggcgacgccccccgcgtcggcagcagcagcagcagccagcagcantcccttgcagctaccccccgtgaagacaaaccctcaccctaccctagctggcggttttaccatgcgccgctcccntgctttccgtttcactgtctttttcgttcctgcgttcgttnagtggtggaggcccgttctgtgtacctgacctggtggccgcgt

SEQ ID NO: 6512 - DNA, 594 bp, Chlorella sorokiniana
  unsure (1)..(594): unsure at all n locations; Clone ID: LIB3602-092-Q6-K6-A11
gcgttcgtcggcgcggngttggtgttgaccagcggcaagctgggcatgacaggggcgatccaaaggcggaggagattgtaaagacgatgcccaacgcctacatgctgcagcagtttgacaacccagccaacccagaggtgcactacacctcgacggggccggagatttggcgggacacagacggcaaggtggacttcctcgttgcgggcgtgggcaccggcgggacgatcacgggcgcgggccagttcctgaaggagcagaagccctcggtgcagctggtggctgttgagcctacggagagcgctgtgctcagcggcggcaagccgggataccaccagatccagggcatcggcgcgggctttgtgcccaaggtgctgaagcgcgagctgattgacgaggtgcagcgcgtgacgagccaggaggcggtgaccatggcgcggcggctggccacggaggagggcctgctgtgcggcatcagcagcggtgcggcggtgcaggcggccatccgcgtggcgcagcggccggagaacaagggcaagatggtggtggtggtgctgccgtcctttggcgagcggtacctgtcgacagtgctgt

SEQ ID NO: 6513 - DNA, 264 bp, Chlorella sorokiniana
  unsure (1)..(264): unsure at all n locations; Clone ID: LIB3602-092-Q6-K6-A12
naaaaaaaaaaaaaaaaaaaaaaaaaaaaaaaagggacggacgaatataaaagaaaccaaaataacaaacacaaaacatgcaaaaaaaataaaatataggggcgtgccgctctaaaagaaaccaacttggccgtccgcgtgacaacgaacgtgactggctataaccttggggtcccccaaacttaatcggcgggcggcacatttcacatctcggcggactggggaaatcccgggggaggcccacacttaatcgccttgcccaac

SEQ ID NO: 6514 - DNA, 579 bp, Chlorella sorokiniana
  Clone ID: LIB3602-092-Q6-K6-A2
cacttgaaatgctcgagaaactcgggatgctatcctcagtgggaagtttgaccaggtgcgtattaacctgccaaacggtgacatggttggtcacactggtgatattgaagccacagttgttgcttgcaaggctgctgatgaagctgtcaagatggtcttggatgctgtggagcaagttggtggtatctatcttgtcacagctgatcatggaaacgcagaggatatggttaagaggaacaaagctggcgagccgatgcttgacaagagtggtagcatccagattcttacctcgcatacgcttcagccagtccctgttgctatcggaggccctggtctccacccaggagtgagattccgctccgacatccagacacccgggctcgccaacgtcgctgccaccgtgatgaacctccacggcttccaggcccctgctgattacgagacgaccctcatcgaagtcgttgacaagtaaaaaaaaaacactgctctctgaagccaaaattgctgtagccaattttgtcgctatagttttggggtgtcaaggaatgatcgcatcattgaataatttgagatttgaca

SEQ ID NO: 6515 - DNA, 598 bp, Chlorella sorokiniana
  unsure (1)..(598): unsure at all n locations; Clone ID: LIB3602-092-Q6-K6-A3
cccggttcgacccagcgttcggtggnactacaccaagttcctggtgggccagnaacggcgtggcccgcaagcgctacaagcccaccttcaacccggccgactttgatggggatgtggcccgcctgctggcaggcaaggagccgctgcctgccgagtgcatcgcgcacccgggccgcaaggtctgcaaggtggatgcctaggcacggctcggcccgccgcccttgtggatgcctgggcatggcggccacccctgggcacgtgccttgcagacgcggcgccacctgcagtcactacagatggctactaattagtggccttgtaggactggcatttttttgctgatgccaaacgagccacctgagcgtcccccagttttccatgcttctgttccggccggcgcaccgcctgcacgtgctgccgccccagcccagcagcaccgcccgcccatgacggcagcaggccaaaccgcaccctcggacgcctgctgcccgacgcagcggccgctgtggggccacgcctgcgacctggcaggccccactcggctcgcgggccgctgctggctgtggcggcagcatgcgcagcgagctgcgccccgccg

SEQ ID NO: 6516 - DNA, 177 bp, Chlorella sorokiniana
  unsure (1)..(177): unsure at all n locations; Clone ID: LIB3602-092-Q6-K6-A4
tgttttattatcatttttggctctgctagcgtatgcgggtgtgctgttggcgagattcagcttgaataattttgatcaaactgtcggctgtgatctattaataatctaaattttgagagggtccaaacnaaaaaaaaaaaactaaaaaaacaaaaaaaaaaaaatataaaagggcgt

SEQ ID NO: 6517 - DNA, 567 bp, Chlorella sorokiniana
  Clone ID: LIB3602-092-Q6-K6-A8
gcaccaagccggcaccaagaaggcacccagaagcaggccaccaccaagaagctgcccccaagaagtcttcctctggcgccagccagtggtacggccccgaccgccccaagttcctgggcccctacagcacgaacttcgtgcccagctacctgaccggcgagttccccggtgactacggctgggatacctctggcctgtcggccgaccccgccaccttcgctcgctaccgcgagatcgaggtcatccatgcccgctgggccatgctcggcgccctgggctgcgtcgtgcccgagctgctggacggcaccaaccacattgcctggttcaaggccggcgccgagatcttcggcgacgacggcatccagtacctgggcatccccggcctgatcaacgccaagtccatcgtggcgaccctgatcgtgcaggtggtgctcatgtcgtatgttgagggctaccgcgtcaacggcggcccggccggcaccggcctggacgctgtctaccccggcggcaacttcgaccccctgggcctggctgacgaccccgacaccctggctgagctgaaggtga

SEQ ID NO: 6518 - DNA, 287 bp, Chlorella sorokiniana
  Clone ID: LIB3602-092-Q6-K6-B1
tcttggcctcgcctgggccaccgtccaccagggcctccacaacgccttctccagtgcggcgacgtcatcgactccaaggacatcactgacagggagacgggccgttcccgcgggttcggtttcgtcaccttcgcttcggacgaggctatgcgccaggcgatcgcaggccatgaacgggcaggagctggacggccccaacatgaccgtcaacgaggcccagtcccggcgctgctgtggctgttgtcgacgattaagctgcaggaggcggtggcgggtacagacgccag

SEQ ID NO: 6519 - DNA, 280 bp, Chlorella sorokiniana
  Clone ID: LIB3602-092-Q6-K6-B10
cgagtgttctcttctcatagtgttggttctgatttacaggtaattaatataaacaagggaatacgtcatcatctgtgtagccggcactcctgccacgtgcgatgcaattaatgcaggcggtatattttgctaggattatgtgcaccaaaggttcgtgacgacgtagtgttttgaattcttgtaaggctcctcttcaaagcccacgccgaagcacatctgagtacttcaaatttaatgtatatccatatgagcaatctaacgagttcaagaattttaattt

SEQ ID NO: 6520 - DNA, 551 bp, Chlorella sorokiniana
  unsure (1)..(551): unsure at all n locations; Clone ID: LIB3602-092-Q6-K6-B11
gctgcgccggcggcaggccgcctaccgcaccaccattgagcaggacgatgccatcattgctgacccaaccaccggcccccgtcagaccgtggccgcgcgtctgctgcgcnatcgaaaagcagatcctggcgggcgccacccaggcggcgctggcgctgccgggggcggcagaggccgccgctctggggccgctgcctacggcagtcaagatggagtaacagtcttccttgctgtggtgcgaaatcatgcacaaggtttggttacctgtcagtgccgcgtgccgcgtcacccgatgtgcgggctttagcctgcccaacccagccccgtttcctttttcactgccgggctccccctgcccaccggttttattgtatcatagcagcatgcgcccttttcccccggctcgtatttcgtggcgttttcaggactctcaccccacagcacccccaccccttctctgcgataccctcagcacttgtaacgcactgcagcttaaaaaaaaaaaaaaaaaaaaaaaaaaaaaaaaaaaaaaaaaaaanaaaaaanaaaaa

SEQ ID NO: 6521 - DNA, 589 bp, Chlorella sorokiniana
  Clone ID: LIB3602-092-Q6-K6-B2
gcgtgggctgcaactgcgcgtggagggctagctagctagctcctcccctccccatctcatcctgatctccaattatctgcgctccctagctcgctagatctcctctagatctcatcatgtctaccatctacatgagccagctctctactgctttccctctaatggaggagggggatcaccaggatcaccatcaggggcacttccaggccttcaccctgcccaaggatccccccatattgttcccttttgtgatcagcaacagcggccctagcgacaacagcagtactctcagctacggatcagaccagcacttgatgcagcaccatgccatgctagatcagccccaacatatgatcggtgaatcatccagtgtgttctcgacgccgttcccgaccgtcgagagcatccgcgacgacatgatcgagcgatcctactcgtacgatccatatgatatggagaagctgcaggccaccagcggatcgctcaagatcggcaagtggacggcgcctgctcccgcagccaagatgaggatcacgaggaagacgagcgatcctggtgtcaagaagccgaggaagagggcgccagcata

SEQ ID NO: 6522 - DNA, 567 bp, Chlorella sorokiniana
  unsure (1)..(567): unsure at all n locations; Clone ID: LIB3602-092-Q6-K6-B3
ctcctcatcctcacactcctgtggtgcttagcttccttccctcgccgccacccaccaagnaaaggaggatgtcttgctgcggcggcaactgcgggtgcggcgccggctgcaagtgcggcaacggctgcggcgggtgcaagatgttccccgacgtggaggccaccgccgggggcggcgccatggtcatgcccaccgcctcccacaaggggagctccggcgggttcgagacggccggggagaccggcggctgcgactgcaccacctgcaagtgcggcaccgcgtgcggctgctcctgctgcagctgcaactgagccggcgcccaggaggccggccggcagaggcgagcacgaggatgaggaggacaagcaagcaagcaccatcaccaccagttcaccaccacccagcgtatcatcaccagccgccgcatgcgctcgcgggcgcgcgcgctgaataaaataaaaccaccgttcgtgttccgtagttctgtatgcccctgtcgcgtgtgttcgaccagtactgtccttccttgtgcctncacttctaatgaatatttggcgcctcaacttt

SEQ ID NO: 6523 - DNA, 490 bp, Chlorella sorokiniana
  unsure (1)..(490): unsure at all n locations; Clone ID: LIB3602-092-Q6-K6-B5
gacacacagtaagctcatagccaatcaaacctctccatctccgaagctccaaccgaaccgaggatgtcttgctgcggaggaaactgcggctgcggcaccgcctgcaagtgcggcaacggctgcggcggctgcaacatgtacccggaggccgaggccgccggcgccaccctcctcgtctccgccaccgccacccacaaggcgagctccggcggcatggagatggcggccgagaacggcggctgcggctgcacccagtgcaagtgcggcaccagctgcggctgctcctgctgcagctgctagatcattgatcatcgatcatgcatgcaccgcgcgtgcagcatcgatcatatcgatctactactaccataccatgtaaccgctacctgatcgagggccttatctatgcacctgacctgcatcagcagtcaggtgccatgccatgcttgttgtaaacaggcccccctaaataaaatctccctggtttaactna

SEQ ID NO: 6524 - DNA, 382 bp, Chlorella sorokiniana
  Clone ID: LIB3602-092-Q6-K6-B6
gtgccctacgcccagcggcagcatgtacgcgcgcaacccgcccttcgacccgtctgtgcacatccatctggactttggccgcgagggccactgagcgcttgctggcggcggctgcagaccgacgcagggcagccactggagccgctgtcctgccgtcctgcagcagcgcacaaccggcagccctgaagagcctctggatgtagcggcggccctgcagagtctgctagtgcagccgcagtaatgagcctgtgctgtggaaccctgctgcatgttgtcgggcatgggttgtgctgcgccgacgggcctttgcagcctgaggctgctcccgtttcgcatgcggcactctgaactttgccaccctcacactgtaatcctcctggcg

SEQ ID NO: 6525 - DNA, 646 bp, Chlorella sorokiniana
  Clone ID: LIB3602-092-Q6-K6-B7
gggacgcaccacgccggctcgtgggtgccagcagcacgcggagaacgtgaagagtgacggcatgtgctctgcaactgcgccacacgtgagcgtcgcccgtcttgttccctgtttgatgattcctgcagcgcctaacgatcgagaattggcagcgttccgtaacctaacaaacaagggcctgtgcgagaggaatcaacaccgaaggtgtgcaagtacactcgtgccactgtgaagacggtggccgacaccgctggtgatgatcctaacgaggagctgctggtggtcatgggcgagaagggccgctcccagctgcagcgcgacatgcgggagagcatctacgccaccattgcggacaccaacaaggtccgggtgaccttcccggaggccagccagattgcggaggagctgctgaagacggagtttgacaccgcgcgcatcatctacaaccgctttgtgtcggccatcttccagaagcccacgatcgccaccgtgctgtccccggacgcgctggagaagacggcggcggagggcgcgcccatcgagcagtacgagattgaggggcccgaccgcgcggagctgctcatggacctggccgagttccagctggccaccacgctgtacaactgcatgctggagaacaactgct

SEQ ID NO: 6526 - DNA, 323 bp, Chlorella sorokiniana
  Clone ID: LIB3602-092-Q6-K6-B8
acaaggtagagagtcacgcaagcagatcaaggaaaggaagaacaggacaaagaagatccgtggtgtgaagaagaacaagccggagatgccaagaagaaataagaacatttctgtcttcatctattcactatcagcctttgcttggtttaggacggtatccctgtggcaatgttgctgagtgcttaattatgactaagaaagactttgccatttgtgtcaatctcccgttatgttaagagggcattttgtagtatcttatgctaagattttgaggaacttggtcagactaatctcatatacacctgctgtcgttgttcttggtt

SEQ ID NO: 6527 - DNA, 581 bp, Chlorella sorokiniana
  Clone ID: LIB3602-092-Q6-K6-B9
gtggcttcacgcagtttgccgctgtttgccaaaggtgctgcggcagcagccagcccctctggcccctctggccatctgcttttcacaatgaatgaagctgtcctgtacctgctgcagctgcggcagtatgcgtaccttcttaccaattgacaccttccacaagtgatgcctccctccattactcttcccttgcagctctccctctgcgcatgcgaatgcaccctcctgcccaccaccaaacgagcgctcgtgcgccgctccctactcctccccacaacactcccactcatcctgctcatgccatctgcatgggtgaatgcatgtttgtgaagtgagtttgccgcgctgcaaatgccttggcacctcaagtttttctgaaacgttcccatgagcgcctgttgtgcctgcccgtccttccgttccgtgtgtgcacccgcgatgccttgccgtgtccactctcctgttcaagagcgcctgttgcgcgtgcctgcatgcccttcctgcctcctcattgcacatgcctcctccataccaccttgagtgtgtgtgtcgacacattacaatacgcataccatagccag

SEQ ID NO: 6528 - DNA, 541 bp, Chlorella sorokiniana
  unsure (1)..(541): unsure at all n locations; Clone ID: LIB3602-092-Q6-K6-C1
cgggttgacccagcgttttttcgccgcagnaggtaaagacaaagagccggcgggccagggctaccgcgcgcgtacgcgccacatgttcagccgcggcttcaggcagaagggcttcatcccgctgtccacctacctgaccaactacaagctgggtgactatgtggacatcaaggtcaacgccgcggtgcacaagggcatgccccacaagttctaccacggcaagactggctgcgtgtggaatgtgaccaagcgcgccgtgggcgtggagctgctcaagcaggtcaacgggcggtacatcaagaagcgcatccacgtgcgcatcgagcacgtgacccccagccgctgccacgaggagttcctgcgccgctgcaaggagaacgacgcggcgcggnacgcggccaatgtggagggcaagccgctgccggtgctcaagcgccagcccaagggcccccgcaccgaggccatcatgcnggagaacgtgaagatggagaccatcacggccatcccctacgatatcctcaaggagggcgtgctctgagcg

SEQ ID NO: 6529 - DNA, 539 bp, Chlorella sorokiniana
  Clone ID: LIB3602-092-Q6-K6-C10
acctcgccgcagatctggcctttggcgttcataccgtgcctgatccccgaatgttgagtgtgggggcggctcggctggcggtggcgggttttgcacgccgctctgcagagcggcacgtactggctgctgtgcacaccctacctgcgatctgttgctggctgtctgcagctgacccatgcagcctttcttgttcgcactgcaacgtgctctcctcttttgcccttgcacccgtgcagctacgagcagcagcagcggccggtgtatggatggccagctcaagctccacagccaccgccgcccagcggagcgccggccggcttcccgcccgcggctggctatgcaggtgcagccggctatccgcctgccccggggcagcaggcgtaacgaacgcagcgcttggaggcacgcccaaactcgtgtgctctcccagcagcgaagctgggcccaccccgcctccgctgctcttctgcctgtttcgattgccaacgctgcccatgtgcttgtgtgacaacatagtcgacatgatgtgcgcatgtgct

SEQ ID NO: 6530 - DNA, 606 bp, Chlorella sorokiniana
  Clone ID: LIB3602-092-Q6-K6-C11
gcgttctgtttttcctcaccgagtttgcggtgacagtggcagatggcgagccgcagctcacacctgaagtggacgcctgggccgcgccctacctcgtgcgcatcgtggcagcacacgtggcagacgcaaacaacgaccgcctcatgtccggcaccgcctgcatcaagtttcccaactgcagaaagggcgctgagggtccgttcatcctgcaacgctacaaagacttgtatcgcgaggcgcaggagtatgagaaaaagttcaagcgctgggcgccgggctcgctggtccgcatgtaccaggggagcgctgtccaagcaaagcagcagctggacagcgcgcaagagcgaggcttcactatggacgacatgattgaacccaagacagccggcctgctgcagcagtcgcaggaggactggcacgaggtgcaccaagctgcgctggaccgcgcacgctgcgccgcctgcacccgcgtcggcatcggcctcatgcgctgctcagcctgcaagtcggtcaagtattgcagcagcgcctgtcaaaaagccgattggaaagcccacaaggaagtgtgcgcctcgttggccgcaacgcacgccgaccgccgcaacc

SEQ ID NO: 6531 - DNA, 445 bp, Chlorella sorokiniana
  unsure (1)..(445): unsure at all n locations; Clone ID: LIB3602-092-Q6-K6-C12
cgggtcgaccacgcttcggcgccggcgcccccnnccgggcggggggggggggggcgcggccaaacgcacggcgcggggggggctgtgcggcggctggccgggctaccggcngcgcgcgccgcaggcgcacgagcgggccccgccggcgggggggatgggggtcttgccgcccaccccccncccacccccgggggggggggggggcgcccctnnctcctcannctctgaccacaccatccgcctggggctggccgncgcgccggcccacgagtcgggggcggtccggcgcacggcgggctgtcggggggcgtcgtggtcgcggcggaggggctggggcgggtngcccgcggcgcccggggcgggtgggcgctggggggggcgcgcgcgggggggcagcgtgcgcgccgggggccggcgccgnccatggggggctcgccggcggcgg

SEQ ID NO: 6532 - DNA, 599 bp, Chlorella sorokiniana
  Clone ID: LIB3602-092-Q6-K6-C2
gcgttcgcagttcacagcataagaaacagcttcttgcggtccatttagccgcctgttcgatcaacaatgagctccatggacgtcacaggcaccgaaggtctcgccgttgattcgtggcagaagtcgtggccagaggtggtgggcaagtccataaaggaggccagggagatcattctcaaagacaagcccgacgccgacatcgtcgtgctgccagccgggtcgccggtgacccgggacttgaggcccaaccgcgtgcgcatcttcgtcgataccgtcgctgacacacccttcactggctagctctacctttgcaggcgcgaagaaatgtatgcctgcgccatgcatgcatgcgcgtggataagttttagtaattgatgaataaatgctagcaatgccgagcatcagcatggcatggatttgtgtaacttttcgttcagtctacttttttttttggtgagagaatcgtttcatctagttatgtgtacgtttgtttgtgctttggactagttcctgttggaaagtgtactaggtttgtatctgagtactcattgtgcacaaaattagagaatggcatgcgctacctagtccttccacgtggc

SEQ ID NO: 6533 - DNA, 423 bp, Chlorella sorokiniana
  unsure (1)..(423): unsure at all n locations; Clone ID: LIB3602-092-Q6-K6-C3
gcgcccnnctgcctcaanctgagctgaagcccactgtgcttgcctgcccacgcctnngccaannccaggcgnngctccaacnntgcatttgatnngtctccagnngccgtcccnngccatgtacccctactannnctccccccaactgcnnncgccactgtaccccaactgtctgtccgnnccgccacgcgcgcnnnagcaggcgtgcgaacgccgccctctctncnnctccctccnnccccggcccgaccctgnaatnntgtggggtggtgcacnnnctgcctcnnnccttcccttcnntcatggtncnngactgtgcccctctgnnagcctgnnnaccccgnaaagaagnncgctcnnccacgtgntnngtgtgcccgtgtnnttgggcttttnntcccctttcagctttgcncccccagt

SEQ ID NO: 6534 - DNA, 614 bp, Chlorella sorokiniana
  unsure (1)..(614): unsure at all n locations; Clone ID: LIB3602-092-Q6-K6-C5
gttcgtcgaggtgngacagctacatcgacgcattgcctaggcagccttactcgcttttgtactggactcgcaccgagatagatgcatacttggcggcttccccaatcagggaacgggcaatttcaaggatcagtgatgtgattgggacatacaacgaccttcgagatcgaatattttctaaatatccagatttgttccccgagaaggtatacaccatggagaactttagatggtccttcggcattctcttctcacgtctggttcgtttagaatcaatggacggaaaggttgcactagttccttgggcagatatgcttaaccacagccctgaggtagatgcattcctggattatgacaagtcatcgcaaggaatagtcttcaccactgatcgttcgtatcaaccaggtgagcaggtgttcatatcctatgggaagaaatccagtggtgagctattgctttcctatggttttgtaccaaaagagggaacaaatccaaatgattcagttgaattcttggtgtctcttaacaagtctgatgagtgctacaaagagaaattacaagcactaaagaaacacggtttgtcagagtctgaaagtttccccttgagggtcaca

SEQ ID NO: 6535 - DNA, 340 bp, Chlorella sorokiniana
  Clone ID: LIB3602-092-Q6-K6-C6
cggccgcgtgggtgattgctgaggggctcgccagggtcccgccgaggcggaggctctgatgaaggcggagcggccccgcgtgcggctcaacaagcggcagaaggcggcgctgaagcagtgggcggcggcacgcgacgcccgcaagcgcgagtagctgtttggccgtgcgcagcatgcaggagaggttgggccgcggcgctgcccatccagtgcctgttgcctcctgcatactttgcaatccaacaggttgtctgccttcatgcctcatgatagcgccgagcccgcattgggccggcgcacgaggcggcattgccggtcgatgtgtgaaacgcgtcacgca

SEQ ID NO: 6536 - DNA, 611 bp, Chlorella sorokiniana
  unsure (1)..(611): unsure at all n locations; Clone ID: LIB3602-092-Q6-K6-C8
cgcagctccanaaccaggncacgcccacggtatacgcacgtacagctcgatcgcaatggcgtcgctcgtcgccgtccagccggtcgccgtgcggggcctggccggcagctccatctccggccgcaagctcgccgtccggcccgcctccgccgccgtctcccgctccacccgcagggctcgcggggcggcggtggtggccaagtacggggagaagagcgtctacttcgacctggacgacatcgccaacacgacggggcagtgggacctgtacggcagcgacgcggcgtcgccctacaacggcctgcagagcaagtttttcaacaccttcgccgcgcccttcaccaagcgagggctgctgctcaaggtcctgctgctcggcggcggctccctgctcgcctacgtcagcgccaccgcctcccccgacctgctccccatcaagaaggggccccagctgccccccaccccggggccacgtggcaagatctaagtagatctgcaatcaaggccttcttcctcctctcgcctcgtgcttgtgtaccgtgaatctgatggattcccccctatggccctatctatgtcctctgttgatacttgatctttgtactacttcg

SEQ ID NO: 6537 - DNA, 589 bp, Chlorella sorokiniana
  unsure (1)..(589): unsure at all n locations; Clone ID: LIB3602-092-Q6-K6-C9
naaaaaaaaaaaaaaaaaaaaaaaaaaaaaaaaaaaaaaaaaaaaaaaaaaaaaaaaaaaaaaaaaaaaaaaaaaaaaaaaaaaaaaaaaggaaaaacatttataaaggaaaccggggttgcgcgtctttaggggtgcccaggtttttggtttctctttgttggcggcaccttttattcttttttttgtgggccgcccgttttatcaacttcgctgggccggggaatttcccgggcggtcgggccttggttaaacccctggcgtttccccccatttttttcgcctggtggcctttaccccctttgggccccttggcgttttcccttacaggccgtcccccatcccctttgccaaaggggcccccccctgtttggcctttttaaccccccctgttgtggcgctttcccccgggggggtgtttttttttcccgccgcgttaccgcccccttttccaggtcctttccctccttttttttcgttttttgcctttttttccgggccagttttgagggtttgccccctttaggggtaacgggggggcgcttttcggggttccgctttaaagtttttcgggcccggggcccctaaa

SEQ ID NO: 6538 - DNA, 428 bp, Chlorella sorokiniana
  Clone ID: LIB3602-092-Q6-K6-D1
gcgtttttgccacgtggccggctacagtcccgactacacccccgacacctggtccgagtctggcgactcttacaagctgggcaccaagggccttattgcttgggccggcctgattgtggtgctgctgggcgtgggcatcaacctggtgatctccacctctgccctgggccagtaaatggcgacgccccccgcgtcggcagcagcagcagcagccagcagcattcccttgcagctaccccccgagaagacaaaccctcaccctaccctagctggcggcgtcaccatgcgccgctcccttgctttccgtttcactgtccctttcgttcctgcgttcgtttagtggaggaggcccgcctgtgtacctgacctggtggccgcgtttttggttgagcggcttgtagccgcacatctgtattatcagctacgtc

SEQ ID NO: 6539 - DNA, 573 bp, Chlorella sorokiniana
  unsure (1)..(573): unsure at all n locations; Clone ID: LIB3602-092-Q6-K6-D10
gtttggntgtgctgcctgctgggcccatttgggtgcacgctgcgctggaagctgtcccactggaactacaagctggctggccagtgggcctggttccccgcaggcacctttgccgccaacatgctgggcaccaccatcgactttgcgctgcagtgcgtgctgcagcggcggggctccgccctgggatactggggcaccctgatgatcaactcagtgatcaccggcttcaacggcagcctgaccacagtcagcacgtttatcaccgaggtcgtgaagtttgcggatgccatcccagacaacttccgggcctacacctacaccctgctgtcgctgggctgcggctttgcgataggcatctgcctctacggctggtcggtctgggcctactgatacactactgatatacacggctaacagctcccagctgcatttcaacaggacctgctgccgctgcttgcgtgctgctgcggtgcactcaatgacctggctcaagtattgtttgcagttggttgcattacagatcccgtgtggtacacgtcttggctgctacttgtgcagaaactgctacatgtg

SEQ ID NO: 6540 - DNA, 601 bp, Chlorella sorokiniana
  Clone ID: LIB3602-092-Q6-K6-D11
gcccggcgtccttacatgcgcggatggaacccacaagtggcgcaatgcggccgcaggtcacggccccacgatgctgcagcacatctacgagggccgattaaacgagtacctgggcatggctgtgcgcgacctgctgtcggacgggatgcagggcctgattgacgacgccaaccggctggagcctttcttgctcaacctggcggacggccaggagtgagcgcggcacaccagtggcaagcccgcctgcctgaccaccccctgtggcgcacggcaaacctgcccgcctgaccaccccctgtggcttggggcacacggacggacggccattttcccgcgaggcctgctgcacagctgtgctgcctggtttgcactcatgcgcaactgattcactcggtttttccgtgtagcgtgcccgtttcatgcatccccgatcctgcatcagtagtgctattcccgcagcctggtagaaactgcttgtcttccccaactgccaacatggttcgaaatgccaccaccctcttgctgagcctccctgctgcagtgcactgtccagctgcctgcatgttgcccaactaccatggttcatgtttggccatttaca

SEQ ID NO: 6541 - DNA, 412 bp, Chlorella sorokiniana
  unsure (1)..(412): unsure at all n locations; Clone ID: LIB3602-092-Q6-K6-D12
gngtggtttgcggccagcgagagcctgatgagcgccatgccccgccgggcagcgccacgccggtgcgcatgaacccctgtcggagaagatcaacatgaagagcgtcacgtactgagcgcctcgctggcagcccccatggtctgaggcggcccgctggcagcggcaggggcctgaggccccacaccccgcagccgcgtgcgcctcggctgggcgggccagaatcgctgcccctcttactacactgagttttcgactcaaatttatgtcctatgcactcacccctttggttaaccctgtagcgcttgcctcgcacccccgcccgccggggaagcccgctctgtacctctgtgccatgtctgtatacacgcttttgctggcgcgtctggggtgtgttaagctgcgcacctaacat

SEQ ID NO: 6542 - DNA, 649 bp, Chlorella sorokiniana
  unsure (1)..(649): unsure at all n locations; Clone ID: LIB3602-092-Q6-K6-D2
gcctgccccccagcggattggcgtccctgnagcaggaaggtagctgcgatcagtctggccaaggcagtttggctttccggtcacatttggtgcgggagctgccagnatgacgtgtacgcctgcaggnacactacatgcaagtccatcgccgcgctgtagggtgctttgagcttgaacatcgtgcgaaggcgtgggagtggctgtggtcgatcgtctgtggacctcctttctccctgntcgctctagcatcagtctccatcatgccccgacgccgcttgcttgcccttcgtcgtgggncctttctccggcacctgcccttgaccgggtggttntgtggtgcggcctacgactgcggccaccagctcgttctccaagaacaagctggtggaggacattgtgggcaccatcatgttcatgccgctgatctaccccttcgagccctggcggatcaagcacaacgtgcaccacgcacacaccaacaagctggtggaggacacagcctggcaccctgtggagcgcgagaagatggagaagtggagccccgcggagtctgccatctacaagctgttcctgggcaccccgctgaagctgtttgcctccatcggccactggtggatctggcactttgacctgagcaagtacaccgagc

SEQ ID NO: 6543 - DNA, 414 bp, Chlorella sorokiniana
  Clone ID: LIB3602-092-Q6-K6-D3
ccccgcgtccgcccagcgtccgcgccgggtgcgctgtctgagatttgggagcaagagcggcaggcctggtcggtgctgctggatggctcggggctgagcgagcacatggagccgctgtatctggagaacctgcagaagtaccttgagacgatggcagcagaaggggagggtgcacagcaggagcagcagcaggggcagcagggcggcgagggcacacaaggcagcaggcggcaggaagcagcagccgaccgaccagctgccagcccagaaccatcttgatgcactgtccctgtcctcctgtcatgccgacttgcgtttatggcttgtcactcagcaggctttacactggcaagagttggcgaggaatcaggcaaatcaggaggaagtcagtgctaaatgaagagcatcccggtc

SEQ ID NO: 6544 - DNA, 77 bp, Chlorella sorokiniana; identical to SEQ ID NO: 6476
  unsure (1)..(77): unsure at all n locations; Clone ID: LIB3602-092-Q6-K6-D4

SEQ ID NO: 6545 - DNA, 550 bp, Chlorella sorokiniana
  Clone ID: LIB3602-092-Q6-K6-D5
gctgttgctcttggtcccgaccgcccctgcttctgctcccattcgccccgttctgtacacgcccatcacttactctatatcccgtcttccctgtccacagctcacctcccgctaccttccccgcccacacaatactgtgcctggctattccaggcccgcatgcgcgctgactgtgtaacaatgcgctcaggaaaaaaaaaaaaaaaaaaaaaaaaaaaaaaaaaaaaaaaaaaaaaaaaaaaaaaaaaaaaaaaaaaaaaaaaaaaaaaaaaaaaactccttctatagagcaaccataaatccatttaacgtggcacgccgacttaaaaacgtcttgtatggggaaacaccaaggtgaaaccaagggaaaaacgcttaacagcgcatcaacttaaaaaccccgggaataacccaaattacccccgctgaaataacccttacgaacaccagctgaactcataataaaaaatggcacaaacgatggaactaaaaaataaatccccacctttgtggaaattacaaaaccccctgagcggtgcactatacagcg

SEQ ID NO: 6546 - DNA, 580 bp, Chlorella sorokiniana
  unsure (1)..(580): unsure at all n locations; Clone ID: LIB3602-092-Q6-K6-D6
cagccgatcagtccgttcatcacaggnaaccaagtcgccaaaatggagaccacctttgtgatgatcaagcctgacggcgtgcagcgcaacctgattgcgcccatcctggaccgcttcctggccaagggcttcaccctgcgcggcctgaagttcatgaacgtgaccaagcagcacgcggagacccactacgccgacctctcctccaagcccttcttcggcggcctggtggagtacatcatcagcggccccgtggtggccatcgctctggagggcaaggacgtggtggcccaggcccgcaagatcatcggcgccaccaaccccctggcctccgaccccggcaccatccgcggcgcgtacgccatcgacattggccgcaacgtgatccacggctccgactctgtggagaacgcgcagaaggagctggcgctctggttctccgagggcctggtggacaacacccccgtgctgcgcggccagatctacgagtgaaccgcgcacagcaggctgtgagggcgcccaagcactgggcgcctggcagctagcagcggcaggcttgcgcccgagactcggtccggctcca

SEQ ID NO: 6547 - DNA, 63 bp, Chlorella sorokiniana
  unsure (1)..(63): unsure at all n locations; Clone ID: LIB3602-092-Q6-K6-D7
naaaaaaaaaaaaaaaaaaaaaaaaaaaaaaaaaaaaaaaaaaaaaaaaaaaaaaaaaaaaaa

SEQ ID NO: 6548 - DNA, 577 bp, Chlorella sorokiniana
  unsure (1)..(577): unsure at all n locations; Clone ID: LIB3602-092-Q6-K6-D8
cgnaggccttcgactggctctcgccgccctcaacgtcacgctggaggaagttgtggcgaacaccgagctgctgaccaacatcctggcctaccacgttgtgcctggcgtcgctgcggccagcactgacctcaccaacgaccaggtgctgcccaccctgctgggccagaacgtgactgtggccatcggcgctgacggcgtgtcgatcatctccgctaacccggccgcgctccccgccaaggtcatccagcccgacgtggcctctggggatgcccagggctcgatcattcacgtgattgatgccgtgctcctgcccgagctgtaagcagctgtgcggttcaccgaatgttgtgtctgtgatgatacacatgtgagcggtgcatgtgtgggcaggccgaattggcccgcccgcccacggcgccgccccttgatgccaccagtcccccatttcattctctcaacctagcgcggtcttcctgccccccagcccacccacccatcctctggatttctcccaccatccgttcattgcaattccctagcgccatgcctgccggtgattgtaatgccgcgaaccana

SEQ ID NO: 6549 - DNA, 521 bp, Chlorella sorokiniana
  Clone ID: LIB3602-092-Q6-K6-D9
cggaaccctaaaactaacaagaagaaggatgtatataagaggaaaaagaagcggaagagataaaaagagaagggcacctagaggaacgctgaaaaaacgagttgaagcacctggctgtggccatgttcctgactgaggaggagggcaagaaggtgctcaaggtggactgccactttggcaagcgcaagagcctggcgtccatccgcacctgcacctaaaacgtgcggaacatgataaccggagtgaccaagggctactagtacatgatgcgcctggtgtactcccatattacccatcaacatgaacatcgttaacaagggcggcaaggtggaaatccgcaacttcctgggcgagaagattgtgctcgtggtggacatgctgccgggcgtgacctgagagcgcaccgcccccttcaaggaccagctgatcctgaccggtaacgacattgagctggtgttctgcagcagtgcgctgattcaccagaagtgcctgtagaagaaggaagacattcgggagttcct

SEQ ID NO: 6550 - DNA, 230 bp, Chlorella sorokiniana
  Clone ID: LIB3602-092-Q6-K6-E1
cacttgagaaaacaccgcaatgctcgctctgcagttttgcccacggtcctaccctgctcttgccaatgcaacccaacgcacccgaaagtcaacccaatccaatcccaagcttttcatccctcattttgttgccttcattcatggctgacctcccctgtttgaccttttctctgacccagcctggccatgtacccttctccagggctgattcatgtaaacgactgatgggt

SEQ ID NO: 6551 - DNA, 618 bp, Chlorella sorokiniana
  unsure (1)..(618): unsure at all n locations; Clone ID: LIB3602-092-Q6-K6-E10
gggacaactctgcacgtcatcgcattctcgctgctcaaaaacctgaacgtgcccaagccgcgctggctgcccgacctggggcgccccaagcgctgcgccgtgctggacgagttcttcaacatctcagatggcgccacgcggcccaccatcagccgagagctgtatgagcagctgcttgcgcccgacttccgcttcaccgaccagtcccgggaggggcaggatcaggtgcaccagtacttccgggccgacttcattgagctcatgtgcaacagcgtggcccctgcgcttcccgacttcagctggagcgccgccaccgatggcgaggtggaccgagacggctactgcatcgtggaggtgcagatcagcgcgcaccacaccggtgctccatttacgctgccgggcttgccggaggtggctcccagcgggcggcgcgttgcgatggagcctgagttccttcgagtgcgagtggaggcggagcaggtcaaggagattgtggtgctgcccagcaaggcggnggcaggccccctggcgctgtatcgtgctctcgccaacgaagccaccagcgcggcatgagtggatgggaaggcaagctgtcctactatgtatcactaacgaaaa

SEQ ID NO: 6552 - DNA, 601 bp, Chlorella sorokiniana
  Clone ID: LIB3602-092-Q6-K6-E11
ggagcattgccaccagcacaacgagcccatgcctacctgggcgcgtgccattgacgcacccggcgtcctgtgtgagcgcatggcggactggatggaggcccgtgcagtggcgtgcttctccagcctgtccaaggcaaccgcggttccaaggctgactctgttcagacccctccccacaagccctcaccccacctcggcctggcccgcatgagcaaggtcccgtctggcgtgtcgccgcccacgccccccacgccctcctcccgcgccgattacccgctgggcggttcgcacgacaacctgcaggaggtcgctattgtgcgcgactaaatcctgaaggggcagccgccagcctatcaaacccatggtgacgccgaggccggcccccaagtgctggcacgtccgtcacccagccacgtatggcgatgcctgttacaaaaccctccgcccgcacgtggcagccaatacagttcaaacccttcttcctccctctgcttgctgattcatgcgcagcggcagcacagcgtaccgtgccactactcagctggccaggccgttctgccctctgttctgttctgccccggatatgaactctaccgtcgtg

SEQ ID NO: 6553 - DNA, 354 bp, Chlorella sorokiniana
  Clone ID: LIB3602-092-Q6-K6-E12
ctgggtcacgtgggggcctctcgtcaagccgccgtgcccatggtcatgccccacaggtctaccacggcaagtactggctgcgtgtgggatgtgacctaccgccctgcgggcgtctttctctttttggggggagggggctctcatcaaccaatttctgcacgtccgcatcgcgcgcgtgacgcctagcctctgccacgtggtactttctgcgccgcctctaagcgcaacaactgggcttgcttccctgcccttgtgtttgtgaacaccctcggactccttactctccatctcacgtgtccttggaccacagtgttctttctcgtgctcgtgtagctgggttctattacggccttt

SEQ ID NO: 6554 - DNA, 597 bp, Chlorella sorokiniana
  Clone ID: LIB3602-092-Q6-K6-E2
ggcggcggctgcaccctgctgcgcctgtcccaatggtggacgccttcaagccaccctgaccgacgacgagcagaagattggtgccgacattgtcaagcgcgcgctgccctactcgctgaagctgattgccaacaacgcgggcgacaacggcagcgtggtcatgcaggtgcgctgcgctgcgctgcgctgcgctgcgcatgtcacgcattgggatggtgcgctgtgtctgctccagttgaagcaacctttccaactttggctgacaacccaactaaccaaacggttgcgccccttgcgttttgttcaccgcagcgggtgctggaggacggcaaccccaacatttctgggcaccggccctgaaatacccttactaacccttggttccctctcctccgttccgcagcgggtgctggaggacggcaaccccaacttcggctacaacgcggccaccgggcagtacgaggacctgatgcaggccggcatcatcgaccccgccaaggtggtgcgctgcgcgctggagaacgctgcctccgtggccaagaccttcctcacctccgacgtggtggtgacggagatcaaggagcccgaggccgccgc

SEQ ID NO: 6555 - DNA, 308 bp, Chlorella sorokiniana
  Clone ID: LIB3602-092-Q6-K6-E3
gctacggctgatgggcggccccagcagcaatgagtttcagcttgactgtccttgtccatgctgtgtcagtccctgtaaagcccccttgctgccaaaaaaaaaaaaaaaaaaaaaaaaaaaaaaaaaaaaaaaaaaaaaaaaaaaaaaaaaaagaaacggtcaaaaaaaacaaaaggtatccaacttctagcacgcgacgatataaactcttttatagtgtcaccaaaaaaacaataaattagcgccacgttttacaacattcacaactggggaaaaccacgaaagtcccccaacttaaaaaccctagt

SEQ ID NO: 6556 - DNA, 417 bp, Chlorella sorokiniana
  Clone ID: LIB3602-092-Q6-K6-E4
gaaccaggtgtgccaggagaagtggaccgtgggcggcggcaagctggaggtgaccggccagtccgcggccgctctggaggccgccaagctggagtggaagcgccaggaggagaccaccgacgccttcggcaacaccatcaagatcaaggcccccaagaaggagctgtcgcgcaaggagaagaaggccaaggccaaggccaacgccgcccgccgcgcgcgcggcgaagaggtgtctgacgacgaggatgactactgaggcggcgctttgccgctgcaaacctctcggtttctgtagcgccacgaccccaagtcactgctagccctttggaccgccttttgattgacccctccccctttgattgccaaccctgcctcccctgtaactcgaccgcatctgcttgtaagcctacacagagc

SEQ ID NO: 6557 - DNA, 295 bp, Chlorella sorokiniana
  unsure (1)..(295): unsure at all n locations; Clone ID: LIB3602-092-Q6-K6-E5
ggggctacgatgatcgctaccggnggtattgagagtgacgtgtgtgccagcctggcgggcctgcacagctgcacagctcgcttgcgtgtgcacgcccgaccccagctgcacagtcgtgtgtgtttgcctttccgtgccacctgttgctgcactgtctgcatgcgcgtgatgatgccctgtgacgcctcgtgttgatacgcttacccacatgtaacatgaaatcggtcaaaaaaaaaaaaaaaaaaaaaaaaaaaaaaaaaaaaaaaaaaaaaaagacagggtgtgccgatattaa

SEQ ID NO: 6558 - DNA, 523 bp, Chlorella sorokiniana
  unsure (1)..(523): unsure at all n locations; Clone ID: LIB3602-092-Q6-K6-E6
acgacctcaacgccggtgngccgcaacaagcgggtgcaccgcaccgctcccaatagcgagaacccctatgtcaagctgctggtgaagctgtaccgcttcctggtgcgccgcaccgagagcgacttcaacaaggtggtgctcaagcggctgttcatgtccaagaccaaccgcccgcccctctcgctgtccaagctcgccaagttcatggccggcaaggacggcaagattgcggtgctggtcggcaccatcaccgacgacgtgcggctgtttgaggtgcccaagctgcgcgtgtgcgcgctgcgcgtcaccgagaccgctcgcgcccgcatcctcaaggctggcggcgagatcatgaccttcgatcagctggcgctggtggcgcccaccggcagcaactgcgtgctgctgcgcggccccaagaacagccgcgaggccgtcaagcacttcggccccgcacccggtgtgcccggctcccacgccaagccgtacgtgcgcagcaagggccgcaagtttgagcgcgccc

SEQ ID NO: 6559 - DNA, 616 bp, Chlorella sorokiniana
  Clone ID: LIB3602-092-Q6-K6-F10
attccatcgtgcccctgctgttcaccatcctggacgagggcgcctcgccgctgctgcccgacagcatgaaggcggcgggcgtgggcatggcggccaccttcacccccacctggggagagtccaacctcaagcacgtggtcaacggctacctgtattgcaacctgccgggcctggaggcaccccgcggcagcaacgttcgctttgtactcatcggcatgggctccgaagccgacctgcactcccccgcctttgcgggacaggtgctgcgcactaagtcgaccacctaccagaccgcggagctgatgcccacggtggtgcaggaggtggatgtgcagctgcaggcggcgggccgctgggacgtgtactgccaggtgcacgaccactacacggccggcatgcgggcaacgctggtggtcactgatgcttgatgacaggccagccccgcagcagcagcagccgcagcaacagcaacagcagcagtcgcgggccccaccgggctcgcagcctcctagcagcaacccatccccccatgcatttttcctgtgccggtgcctgcacatggtggcttgccgccacacccccaaacccttggcacgtgcttttgctcgctcctttc

SEQ ID NO: 6560 - DNA, 615 bp, Chlorella sorokiniana
  Clone ID: LIB3602-092-Q6-K6-F11
caaaaaaaagaataaaaaaaaagaaagaaaaaaaaaaaaaaaaaatgaaaaataaaaagataagaagaataaaaaaaaaaataaaaaaaaaaaataaatgataaaaacatgctgttttggtgccggggggcgcccgtttttagaggtaccccatttccttgcctgctggtgcgcaagctcttgattgtgttgttgggggccgctaaatgttcttcaagggggccgactttttcaaggtgcagcgcgtgaacaagcctgggcccccaccgcttttttggccttttcatgactaccctttttacccgcgtgtgctgatgcaagagggccctgacctatgtgttcttcaaaaagggccagaccgcctatgcgccccggtccccccccttttgcgcgctttttagcggcgcgggcggggggtgctcccggcatgtcgcctttccttttgcggagcgccttggcgccccttgtttcggttttttgcctgcctttcctgcccgctgtgggcggttttccctgtaataccttttgatcggggggctccttttggggtgtcccaatttaggggtttccggggcctttcatccagaaaaatttttttttggggggggggcctcc

SEQ ID NO: 6561 - DNA, 386 bp, Chlorella sorokiniana
  Clone ID: LIB3602-092-Q6-K6-F12
taccgtggtgccaccttcctggaccccaaggtcgtggcgctgcgactggctatgacactgctgtggccctgcccgccgctggcgacgatgaggagtacctgaaggagaacatcaagtcggccggcgcaatgaagggccaggcagtgttctccattgccaaggtggatgctgccaccggcgagattgctggcgtgtttgagtctgtgcagccttccgacactgacctgggagccaaggcccccaaggacgtcaagatcactggcctctggtatgctcagctttcgtaagcgctgccagcgcccgtcgtttggagaagagaattacagctttgtcgctcgacctgtttgtcagacgtagaactgctcatgtaacataagcgcgcaggc

SEQ ID NO: 6562 - DNA, 602 bp, Chlorella sorokiniana
  Clone ID: LIB3602-092-Q6-K6-F2
gcgtgttcaaccctcggtgggctgccatgcccggagccgaggcggcagccgaggtggcgcgagaagccttcccctggggcaggccgccaaggcgagccggcgcagccggcgtctcattggcagcgactcgccgctggcagatttcgaggcgctgctgttagatgcgggccccgaggaggcttgcgctgcgctggcggaggtgatccctgagctcgtgatgggcagcatgggggagagcaagtttgaccaggctgccgagctgattgagcggctgcgcgaggtgtgcgtcacgcacgaactgcccgctgcgttcaacggtctgctgcgcacgctgcacgccatgttgaaggacgacccggtgaagaagcccttctggcgcaagctggagaaccgaggcgtgcagcccattgacaggacagaggtggaggccagccaggtggagccggaggcggccagtctcttcttctctcagcgccagttcacctactgagcaaagacaacccaaactcacgacagaatgagcgactgacctgcggtgtctgctggaagcgcccagaaccgagagccccacacagcccgagggccggattgagggcagcaac

SEQ ID NO: 6563 - DNA, 460 bp, Chlorella sorokiniana
  Clone ID: LIB3602-092-Q6-K6-F3
ccggttcgacccagcgttctgcattgtgtggcgaattggtacaagacggatggaagaaaactttgtgcttgaaggacggagcggtgttattggggtcaggtaccgcaaagggcttttttggctactactaaggaaaatggttactgtgtactactcttgcactcacaattttagagacgtgtgttttgcaagctaaaaggatctattgctagaatcgaagacatattcccatgtatgtatgtatgcatgatggattgttgcccttttggctgtgaggtagtactgaacttgtgagcctacaaatgtatttgtatgtatgtatgttgtgatgtagtactaaatgtatatctatgtatgtatgatgtgatgtagtactggacttgtgaacctacaaatgtatacctatgtatgtatgcaaacatgatgtattgttgagatatattatgatgaaactttaatt

SEQ ID NO: 6564 - DNA, 614 bp, Chlorella sorokiniana
  Clone ID: LIB3602-092-Q6-K6-F5
tccgtttttttttttcacctcatacatcttcaataactttcacatgcagagcaacttgggtggtccttagtccttgcgctcctcaaggaaggcagaaactaaaggcaatcaagtaatgttcataacagtagtgttcaccggtatccactcaactctagttctatgtaggacacataacccatacaattcagtaagccaagaacctgacaagtaaaaggttttgttgtcccttgaacatatagtagcacaaaaagcgggaacaaaggggcgcccttcaaatttcatgttgaaatatcaacgctgcaaagatgttgatttattcggcggtctgcatcggcgtcgtaccctgtgcatggtacttctccaactcagcatcaagttcttcagcagaccttggctgactacgctctttcccacgacgaccgccagatccactgcctccgccaccaccacgacgacccctcccaccccttgcacgggatctgttctgtggcaaactagctgagacaccccttggtgcactcttagcaacattcctagcataggttccattattggttggtagtgcagctggagcagtaggagtgttggtcccaagtatctctattttcata

SEQ ID NO: 6565 - DNA, 313 bp, Chlorella sorokiniana
  unsure (1)..(313): unsure at all n locations; Clone ID: LIB3602-092-Q6-K6-F6
ctttgccagcctcgncgagtactgcagcatcatgagggcatgttgggctcaggatcctggcgagcggcccacattctcagatgtggcgccccgcctgcgtgccctgcttgatgcgctgccggagtgaccgccgctggccgcatgactgacatgaacatccggcgagcagcagatgccgttttatatgctgtatcaagcagatctgcaagagaaagtcgcaaaaaaaaaaaaaaaaaaaaaaaaaaaaaaaaaaaaaaaaaaaaaaaaaaaaaaaaaaaaaaaaaaaaaaaaaaaaggggcgggccggttttaa

SEQ ID NO: 6566 - DNA, 617 bp, Chlorella sorokiniana
  Clone ID: LIB3602-092-Q6-K6-F7
cgctgccgtcagcaccgcgcagccctctgaggccgcctacggtgatgccgcccgcgtgttcgccggcaacatcaccaacaagtccggcttcatcccctacgccggcgagggcttcgcgctgctgatccccagcaagtggaacccctccaaggagcaggacttccccggcgtggtgctgcgctatgaggacaacggcgacgccgtgaacaacctggtggtgctggtgcagaaggtgggcaagaacaacatcgacgagctgggcagccccgacaagttcctgcaggacaacgcctacctgttcggcgagtccgcggccttcaccggcgagaccctgtctgagggcggcttcctgcccaacaaggtggccgccgccagtgtgctggacgtgcaggaggcgaccgacaagaagggcaagaagtactacaagtacgaggtgctgacccggtccgccgacggcgatgagggcggccgccaccagctgattgccgccaccgtgtccaacggcaacctgtacctgatcaaggtgcagtgcggcgacaagcgctggttcaagggcgccaagcgggaggccattggcgcctgggactccttcaccgtggtgtaagcacttgcaccga

SEQ ID NO: 6567 - DNA, 519 bp, Chlorella sorokiniana
  Clone ID: LIB3602-092-Q6-K6-F8
agttgagagggcgctgccctgtggtttggtgccggctgcgagagggcaacattgccaacgtggccaacaagcgcggtagcagctggggcaccatggtgaatggtactgacggctgcacggcggccaccaacgtggttgcagcaaaggcgcttgccaagatgcgggcagctggggttgcaggcgacgccgccgcctacaaggccgccgctgccgagctggagaaggccgtcgtaactgtgtatatgcaggccactctggcttacgcacaggaggtgggcgaggtcttgacagatgcccctggcaacccgaccgaggaggagcaggccgaaggatacaccttcttcaggaccattgcccctctggtggcaaaggtggaccgcgaaggcgctgctgctgtggacgccgccttcatggaccccaccactggcatcggcatgcaggtcaaggccgcactgcagccagccatggaggcgtacggcatcacggccgatgatatcggcacctttggcgctacccctc

SEQ ID NO: 6568 - DNA, 448 bp, Chlorella sorokiniana
  Clone ID: LIB3602-092-Q6-K6-F9
tggcgagtggctggacttgcggccccgctggccgctgaccgaccgcaaggacccgcgcagcttcacggcgcctcgctccgccaagaagaagcgcatcttcaccagcctcacccaactcatgcaccagcagcagcagggcgaggcggcggcagaggcgggggcagcaggcgaagcagcggcggcagaggcgggagctgcaggcggggcgcacgagcaggagcagcaggcagcggcggcaggcgcgcagcgatgagggcctgcgactctcctactaatggaaagttgctgtgcgcgctttacaaagatgcccttaaagtattgacgagttcgtgggtactaagttgatagtgagaatggagggccgtttaaagcaaaggacatggctacaatagccagagccctagcgcgcgatccttaagatttattcccttcctttatagccaaattg

SEQ ID NO: 6569 - DNA, 621 bp, Chlorella sorokiniana
  unsure (1)..(621): unsure at all n locations; Clone ID: LIB3602-092-Q6-K6-G1
actgcatccccgccaacgacaaccccctcaccgtctgggacgccagggacgcgctggaggtgtgcggcggcctgtggggcgagaagcggcaggactgcctgtctgtgtttggcctggatgcggagcaggtggaccgctactacagcgccgtgatgtcgctggagcagtcgctgacgcacgacacggaccctgaagaggaggcttcccaccgcggccaggagcgctgctgagcaccctgcccttgtggtgctgctgccgggcagcctgccctgtgcggccgctgctgctgagcggcccaccatttcagcccctgctggcaagaatcatcgtcccatgcctgtcacaaagccccgctggcgcgatcaacgccctacttacttatggaccgccgcggggcgccccaacgctcaacacccccttgagaagatgccaaagatgagataatgttgacccacccacaatgatgctgtacagttgccctttttgcaaaacgaaccttttccgccacgctgcctggcccggcctcgcgcgcggtacgatgcctgccgagggctcgccgcccattttgcatgactccctaggctgctggccagccacgcgcccncaagctgcacctgtttt

SEQ ID NO: 6570 - DNA, 163 bp, Chlorella sorokiniana
  Clone ID: LIB3602-092-Q6-K6-G10
tgctcacatgcctaaatatacgacccccctctttcatcgccctacctgcgtcgatctccattctttttgccccgcttgcacctcggatgtctgcaacaggccacgattctcccacccctctttgtttgattgaaccataccgcggtttgtaacagttagcgac

SEQ ID NO: 6571 - DNA, 555 bp, Chlorella sorokiniana
  unsure (1)..(555): unsure at all n locations; Clone ID: LIB3602-092-Q6-K6-G11
cacaggcaacgcacggnatcgagnagtaccacaatgctggtgtgctgtgctggagcggcaacgatgatgaggcacatgctgggcggcatcagcatcatgcgcagggtgtcatcagcgtgaccagcaatgtcatcccgggcctgatgtcaagcctcatgaacgggcgtgacgatgcaacggcagagagcctcaaggagcttattgcctggctgttctgcgagcccaaccctatcccgctgaacaccgcgctggccatgtgtgggcttgttcgcccgattttccggctgccctacgttcctctgtcgcgtgagcagcgcgagcatggtgccaagctgctgcgggcagtgcagcaccacatcccaggctgcaaggaagtccgcgtcatggatgacgaggagttcatcctgatccactctgctggctattgaccgtgtgaccctctttgacagagaaggggaggttgaaagtccaccgccgctgctgctagcactgtcacgctttgccacagtaatgtacagctcataagtgccacatgtaactctggaaggacaaaaa

SEQ ID NO: 6572 - DNA, 386 bp, Chlorella sorokiniana
  unsure (1)..(386): unsure at all n locations; Clone ID: LIB3602-092-Q6-K6-G12
naaaaaaaaaaaaaaaaaaaaaaaaaaaaaaaaaaaaaaaaaaaaaaaaaaaaaaaaaaaaaaaaaaaaaaaaaaaaaaaaaaaaaaaaaaaaaaaaaaaaaaaaaaaaaaaaaaaaaaaaaaagggggggcccgttttaagagaaccaaattttacttccccttccttgcaaacgtaaagtgttttttatttgggggccccctaaaattaaattcactggggcggggtttaaaaccgtggggactgggaaaaacccgggggttccccaattaaatcgctttgaaaaaaatccccttttccccagttgggaaaaaaccaaaaaggcccaacccaatcccctttccaaaaatttgcccaccctaattggcaattggacccccccttt

SEQ ID NO: 6573 - DNA, 605 bp, Chlorella sorokiniana
  unsure (1)..(605): unsure at all n locations; Clone ID: LIB3602-092-Q6-K6-G2
gcgttcgctgnattcgacccaaacaagcatcctcgtgagatctccatttccatctcatctcgccggccgggatctgaagcaagctcggatcttgccagcgaacagccatgtcttcctcgtcggacaaccccaacacggtcaccgaccgcggcctcttcagcaagagcagcaaggacgagaagaagaagcaggaggagaagaaagaggaggaggagggcggcggcgggttcatcgacaaggtcaaggacttcatccacgacatcggcgagaagatcgaggaggcggtggggttcggcaagccgagcgcggacgtggcccggatccacgtgccccacatcggcctccaccgcgccgacctcgtggtggacgtgctcatcaagaaccccaacccggtgcccatcccgctcgtcgacatcgactacctcatcgacagcgacggccggaagctggtggcgggcctcatcccggacgccggcaccatccgcgcgcacggggaggagacggtcaaggtgcccatcacgctcgacttcgacgacatccggagcacctacgcggacatcaagcccgggagcatcatcccctacctgctccgggtcgtcttcctg

SEQ ID NO: 6574 - DNA, 596 bp, Chlorella sorokiniana
  Clone ID: LIB3602-092-Q6-K6-G3
gtcgacccagcgtttcgctcgcttgcccttcaatcaccggggggggggggggggtgcaaaccgccgctgtgcgcgcccccatcgtggcttcggcccagcagcagaaggccgcccccaagcgaccgtggcggccctgccccgtgtggccaaggccctgggtgccggtgtggcctccctggccctggcggggaggggggacgccgccactgttgaagctgggcgctgacaacggcgcgctggtgttcgacccctccaacatcaccatctccaagggcgagtctgtgacctttgtgaacaacgccggcttcccccacaacatcgtgttcgatgaggacgatgtgccctctggcgtgaacgccgaggcgatcagccgcgaggactacctgaacgcccccggcgaggagttcaccgtcaagctggacaccgctggcgagtacggcttctactgcgagccccaccagggcgccggcatggtcggtcgcatcaccgtgaactgagcgcagcatgctcagcgccgtggcgtgcactgacccatttttgaagcacttgctgtctctcttcggttgactggcctgtattcagggtgtaacgctaca

SEQ ID NO: 6575 - DNA, 612 bp, Chlorella sorokiniana
  unsure (1)..(612): unsure at all n locations; Clone ID: LIB3602-092-Q6-K6-G4
gncggcctggcccagcccgcgagaacctggacgtggccaaggcccgcatcaaggagctgagaagcgcatcgacgccgacctggacgcctacatcgccaaggcgtactggactgagggccgcaacgagctgcgccgccaggtgggcaccctgcgcttcgacctgaacgcggtggccgacaccctgcccaaggccgccaagaaggaggcgcaggccgccaagaacgagttcctggccgccgtggaggcgctggacctccagctgcgcaagaagaacggggacaaggccgccgctgccctggctgacaccaaggccaagctggacgccgtgatcgccaagctggcgtaagcacccgccagccaggcggctggccggtaccacccggacggccgccgcggcaccccgcagcagcccccttgccagctggcgccccacgcgccggcgcaacgttttgactccctctcgcaccctggtggggtttgtccaccggcggggcccccgcgccccagcccgcagcagctgcagcagcattcctctgctctacaccagtcccgctagttccctccagctttgattcccggccccgcccgacgcggcgggcgcccccgcactct

SEQ ID NO: 6576 - DNA, 243 bp, Chlorella sorokiniana
  unsure (1)..(243): unsure at all n locations; Clone ID: LIB3602-092-Q6-K6-G5
cgnatgnagagcagccaactatcgcgcacccagcaatgagcagggctggtcaacatgccaataagaacacacaaaactttgccatccggcctccccaaagcgtggagttttggtccgtctttcagtttcggttttcttgcaaaaggcagtagcagtgcttttgctacaggtggatattttgggcaatgtgccggctcaagctgagcacggggcaaagcatcaaactgtgacacgcaacacgtc

SEQ ID NO: 6577 - DNA, 328 bp, Chlorella sorokiniana
  unsure (1)..(328): unsure at all n locations; Clone ID: LIB3602-092-Q6-K6-G6
cagnaggnataccctgnagcctatgtccgcgtcatcggcttcgacaacatgcgccaggtgcaatgcgtcagcttcattgccttcaggccaccaggctgcgaggaatccggcaaggcctaaagtgcaagttgaagtaaccgatatacatgtcatgttagtcacatttgtcggcggctctgctttctcagttttacttctcgttctactcatatgtgaatatatgagcatatgtatgtaagcacttaccaatgtaggtcgaggaggatgcatatgagaattatagcaccggctatacatatacatatatattatatgcaatcaacggatt

SEQ ID NO: 6578 - DNA, 610 bp, Chlorella sorokiniana
  unsure (1)..(610): unsure at all n locations; Clone ID: LIB3602-092-Q6-K6-G7
cgagcgagtggaccgcgcagcagnacaccgaggcctggggggtggcgaaccggctcgacctcgtcgggcccatcgtcgagcagcccgagtacaacctcttctcccgccacaaggttgagtctgagtttgtacctctctacagtacttatggcattgggttgactacatggagccctctagcttcaggtgttctcaccgggaagtatagcaaagggaatatacctgctgaaagtcggtttgccctagataattacaagaacctggccaacaggtctttggttgacgacacgcttagaaaagtgaacgggctcaaacccatcgcttcggagctcggcgtctcgatggcccagctgggcatcgcgtggtgcgcgtcgaaccccaacgtgtcgtccgtgatcactggagccaccaaagagagccagatcgtggagaacatgaaggccctggaggtcgtcccgctgctgaccccggaggtcctggagaagatcgaggcggtcgtccagagcaagccgaagcgcctcgagtcatacagatgaagtagcggcggtcggtttcgtcagctgtgcagcgtgtgcgtgccccgcccgccgcctggtgggatatttttcct

SEQ ID NO: 6579 - DNA, 486 bp, Chlorella sorokiniana
  Clone ID: LIB3602-092-Q6-K6-G8
cggccgcgtgggcgggcggccctccctcccacagagggtgcgggcgcgtctggcatggcagcgcaggccggcccccccgccatctccaccgaagcgcccaagctctcccgcatctctaccgagtatggcgaggtggaggggcagcccttcatctcagggctgggcatgaagcgcggcccgctgtcgccccgcgctcaggccgtcaaggaccgcctggctcgggagctggaggagtccacccgcgtcattggctagccgctcacaagtatgtacaataagcggcaagcagctgcaatatgaaccagctatgagccagtgcgcctgcgcggcaagcccagcagcaccactgcaactgcgccgacggcatgcgacgataaacaagcgacaccaagccccccacggttgatgtatgccctgtatgaacccgtgaacacgtaatgtacccctcagttgccctgatgaactcaacatgtaacaacgcatgcc

SEQ ID NO: 6580 - DNA, 470 bp, Chlorella sorokiniana
  unsure (1)..(470): unsure at all n locations; Clone ID: LIB3602-092-Q6-K6-G9
gctcagccccccatatttagcccggccgcggctgggcagnaattatgacacttgtgagaccctttgtgtggtggcacccattcccatgcatgccttgcctccctgccttctttgcttcctgtatactagcccctttgcgccctccctgcctactcaccggccgccctgtgcggcccaaacccaccgcatccctctatcatccctgtacactgaatgcactggccgccgccggcgcggcgcagcaattgtgcgccgcgctcgcgcgccctcttttgctaccacgcccctcagcccgcccctcttaccttgcctttgctcggcacactccctcccggcagtggccccgccctgacgtttcgggccgcccgcccctcagcgctactctgtagaccttcgatctgatgtcatggccgctgtcgctggccaaccaccaccgccggttgtggcggcacttgtaacgccgccgtcac

SEQ ID NO: 6581 - DNA, 603 bp, Chlorella sorokiniana
  Clone ID: LIB3602-092-Q6-K6-H1
ggctcggcccatcaccttacgggacagcaaagcggacgagcaacatggggcggcggccggcgcggtgctaccgccagatcaagggcaagccctaccccaagtcgcgcttctgccgcggcgtgcccgaccccaagatccgcatttatgatgtgggcgccaagaaggcgggcgtggacttcttccctcactgcgtccacctggtcagctgggagaaggagaacatctcgtccgaggcgctggaggcggcccgcatcgcggccaacaagtacatggtgaagaacgcgggcaaggacgccttccacctgcgcgtccgtgtgcaccccttccacgtgctgcgcatcaacaagatgctttcgtgcgccggcgcagacaggctgcagacaggcatgcgcggtgcgttcggcaagccatttggtgtgtgcgcgcgcgtgggcatcggtcagatcctgctgtccatccgctgcaaggacacgcacgctgcggtggcggaggaggccctccgtcgtgccaagttcaagttccccgggcgccagaagatcgtggctagcaggaactggggcttcactccctacctgcgcgacgattacttggagtggaagcgtg

SEQ ID NO: 6582 - DNA, 620 bp, Chlorella sorokiniana
  unsure (1)..(620): unsure at all n locations; Clone ID: LIB3602-092-Q6-K6-H10
gngccatactgctgcctccgcgcacagccatggctgctggcggcactatcgatgcatatctttatggcgacaaccttgtggattcgggcaccccttcaaacatgttcccaacacgggaccgcgtgcgcttccccttcagggtggttgctgttggcaacggctacatcgacattgaccgcccgctgcccatcgagctgcgccccgcctggacgcccgtcatcgtgccgttctcgagcagcacctcggacagcgggctggagcactttaccgttcgcttcaagtgggacacgtatgatgagcatctggatgccaagggctacaacgcgattgccatgtatgataccatcaactgctgggtccgccatatcagcatcgtggatgcgacctacggcgttgccatgaacggcaacgagtttgcagcaatcagcgacatcgccttcagcatcactgccgcccgcggcaggaacagcatggcgacccgcggtgtgcacggccatcatgcaacctcaatggctcacggttcctacaacctgcagacgaggttgtacttcggcacccgctactaccatgatctgtcggtggatgccctgctgcacctgtccgtctttagcgacagcaga

SEQ ID NO: 6583 - DNA, 595 bp, Chlorella sorokiniana
  Clone ID: LIB3602-092-Q6-K6-H11
ttcgtgcgctcaccacttcaccacatgccgatggccaagctcgaccaaagccgtgacactcctcccccacctcggcccaaaccctagccacccccgccgatcccaatggccgccgcccaccaccggcccctccacgccctcctcgttggcggcgcagtcgccgacctgctcctgtgggggcggaggaacgcctccgcggcggccgtcgcgggcgccacgctcgtctggttcctcttcgagcgcgccgggtacagcctcgcgtcggtcctctccaacgccctcctcctcctcgtcgtcatcctcttcttctgggccaagtccgcctcgctgctcaacagacctcttccaccactgcctaatctagaggtctcagatggggtcgttgagaaagttgtaggtcgggctcttgtatggataaacaaggtgttggctgttgcccatgacattgccatcaagagagaccggacagtttttatacaggttataatggctctatgggtggtttcatgtattgggatgctcttcaacttctttacgctcatttacattggtgtactactcgctctgttggttcccccggtctatgagaggcacc

SEQ ID NO: 6584 - DNA, 349 bp, Chlorella sorokiniana
  Clone ID: LIB3602-092-Q6-K6-H12
cttcaacatacctgaatcctttcggcgcccgttcctcagcgcggcttaagatagccttccattccatttgatgaagtagtggtaatatgccaatgtagtagtggcagtcagtgatgtgtataagctgaccagcaatctcttttgtaacctgtaagctaggaatgatctatgtaggagaacatggctgtaccacttgactacttagctagcatcgatcattgcttggcgaagttatagtttgtttataacggcttccgtcacattatttcttgacggggattgagtatgtatcagagtggcaacatgtgtattaattgagtatgtaacaggaaagtgagctcttttgtcc

SEQ ID NO: 6585 - DNA, 578 bp, Chlorella sorokiniana
  Clone ID: LIB3602-092-Q6-K6-H2
cccgactgggcaagcctgttgggagacttgaaagggcaagaagccagcgccttgggatgaacccaggacgacagccgatattggcgacttggaagtaggtcttggtggcatgttggatgagaaagagggcagagtttcccatgcatccccagatgttagccgagatcaagtttgcccggagcttgtggaaggccgagctggcatgcattcaaggcattcaagctgggatcctagagctgaaacctcggagtcagtgaacagcaattctgtgcaaacagcccctaccgaggaaactaatgggggcggccatgttactacgagcggtgcgcattagcaatcacaaacggaatgctacagatgaacatttgagctctgctttgcagtgcgccatcgatcgtgttctgaatggagcaccatgtatttaccagttgtggcaggataaggtcctggacgtgtgtaattcagaacagacttcccgttgctttcccggtggtgcatcagaccgttcaggcttctgttgttgtgcgtgtttgttgtgataatagctcgagctcccacccttcccgggtttgggttga

SEQ ID NO: 6586 - DNA, 601 bp, Chlorella sorokiniana
  Clone ID: LIB3602-092-Q6-K6-H3
agcgtttgtgcaacacacaactccaggccaccaggggagcacacggcacgatgcaggggcttgcacaccgttccgcgccctgcagccttgcagcgagctgcagtctggcccatccggcatcatgcatgcggcaatggccgggagcgggcagccagcttgcagcggcagcgccagccaggcggcggcggcagcggctggcggtgcaagtggcggcgagcggcggctttggcaagcctgctgagaaaaagctgagcaagcagaaggcttgcccctgcggtagcggtctagcattcaaggagtgctgccagcggtaccatgatggagagctgccgcccactcctgaggctcttatgcgctcgcgttacagcgcctacgtgaagaacaactggcagtatgtgctggacaccacgcaccccgagaacccgctggccaacgacccgcagtcgctgaaagacgacatccagtccacgtgcgacagcctgggattcgagaagctgaagattctcttggtggagcccggcaaggatgagaacgagggctacgtgacattccagacctggttcaagacccaaggccagatggggcagcgcgcgcagggctg

SEQ ID NO: 6587 - DNA, 608 bp, Chlorella sorokiniana
  Clone ID: LIB3602-092-Q6-K6-H4
ggatgcgccccagcctctggcgcgccgcgtgatccgccgcgccgccaagctgcggccgtccatcacccccggcaccgtgctgatcctgctggcgggccgcttcaagggcaagcgcgtggtgttcctgggtcagctgccctctggcctgctgctggtgaccggccccttcaagctcaacggcgtgcccgtgcgccgcgtgaaccaggcgtacgtcatcgccacctccaccaaggtggacgtgagcggcgtggacatctccaagtttgacgacgcctacttcaagagcgccgagaagaagcagaagaagcagagcgaggagggcttctttgccgagaagaccgagaaggcgccgctgcccgctgagtatgtggccaaccagaaggcggtggacgcggcgctgctgggcaagctgagcgacgagctcaagggctacctgtccagccgcttcacgctgcgctctggcgaccggccgcacctcatgaagttctgaggtgccagcctggcagctcgctcgcccagcaagcggcccggcggccgggcttgcttggcggcagcccgcgcggcacgcggcgggtccgtagtgcacggcccgacgagcgctgtgcggc

SEQ ID NO: 6588 - DNA, 598 bp, Chlorella sorokiniana
  Clone ID: LIB3602-092-Q6-K6-H5
acgcgccactccatcgtcgtcaacctgggcgaccagctggaggtgatcaccaacggccggtacaagagcgtgctccaccgcgtggtcgcgcaggccgacggcaaccggatgtccatcgcctccttctacaacccggccagcgacgcggtgatcttcccggcgccggcgctggcggaggcggaggcggccggcggggcgtaccccaggttcgtgttcgaggactacatgaagctgtacgtgcgccacaagttcgaggacaaggagcccaggttcgaggccttcaagtccatggagagccagagcaccaagctcatcgccaccgcttagaagcaacccttgctctgctctccgtacgtggcctcggttaatggttgaggacgatggcacataggatgctccagagttcgtacgtacgtacgtgctagaccactggctactgtttggtgccgaataaacgagcctgtgctggcttgtgtgctacgcctagctaggatctgtagtaagtaggagtgtttgtcattttcgctgtgttgtgctgcttccgaccagcatgagagctgtattgttctgtgtctgttcttattcccaggggcatcgt

SEQ ID NO: 6589 - DNA, 586 bp, Chlorella sorokiniana
  Clone ID: LIB3602-092-Q6-K6-H6
ctggctacgctcggcagccgctgcctgcccaagtccccatccagttcaccaatgggtttgtgcccgacagagcggcccaaaagtatcggcacctgcagcggctgcggacgcgaatgccttgagctcaagttctgcgcacgctgccgcaccgcccagtactgctcccgtgcatgccaggctcagcactggcgggcggggcacaaggctgagtgcgtgccggtggcggtccgcaaggatggtggcagccgcagcagctgagggttagtaacgacggcagcagggcgcctgcagccggcgggccggacagaagcgggtgcgtcaggccgacgcgaaacagacagccggttgcaagcatgtctgctagcagcgggcagccgtgtagtgcaggttggcgcacaacgttggccgttctgcggtcagcctgcccagcaaactgatgtctgtggcagggcacctgcacagctacggcaccctcagtggcattcatttggcttttaagcatgcatgatggcgattgcattctactagtgtcggtgaaaagttgcgtgcaacagacctccaatgtgcatgtgagatccgtcgtggc

SEQ ID NO: 6590 - DNA, 625 bp, Chlorella sorokiniana
  unsure (1)..(625): unsure at all n locations; Clone ID: LIB3602-092-Q6-K6-H7
cacagccctagcaagtctagcagatccanagccgaagatgagcggggtgaagaaggtgacggacgtcgcggccaaggccgggaaggcgatcgattgggacggcctggcgaagatgctcgtctccgacgaggcccgaaaggagtttgccaacctccgccgcaccttcgaggacgtcaaccaccagctccagaccaagttctcccaggaaccaaagccaattgactgggaatactacaaaaaaggaattggatcgaaagttgtggatatgtacaaggaggcttatgatagcattgagatcccaaagtatgttgacactgtcactcctgagtataagccaaagtttgatgctctgttaatcgaaatgaaggaagcagagaagacatctctgaaggaatcagagaggatagagaaggagattgctgaattgaaagagttgaagaaaaagatcagcacaatgacagcagacgagtactttgcgaagcaccctgaactcaagaagaagtttgatgatgagatccgtaacgattactggggatactagataacggcgaaagtccaagttcttttactagaacattcaataatacttctttgtccctctggaatctcatcatccaaacttgaa

SEQ ID NO: 6591 - DNA, 378 bp, Chlorella sorokiniana
  unsure (1)..(378): unsure at all n locations; Clone ID: LIB3602-092-Q6-K6-H8
actagttctagnacgcgggcggccgctcgcgatctagaactagttttttttttttgatattctagctgccataataacattgattgattccgcaaggtactcattaaaccagtaaaaaatagtctcacaatggaaccactaaagcatgacaaaagtttcttcttcagcaagagtagaacaagtgaagatatcacatccattctctcaaatgcatcaggaagcatctagataggagaaactacttcagcagcctcacataacaacctgcccaaagccaagccttcttaagcggggatctccacctcgccgtcgtcgatctccgtctgcagatccttggggtccttgccgtcgacggtgcagactagttctagatcgcga

SEQ ID NO: 6592 - DNA, 62 bp, Chlorella sorokiniana
  unsure (1)..(62): unsure at all n locations; Clone ID: LIB3602-092-Q6-K6-H9
naaaaaaaaaaaaaaaaaaaaaaaaaaaaaaaaaaaaaaaaaaaaaaaaaaaaaaaaaaaaa

SEQ ID NO: 6593 - DNA, 509 bp, Chlorella sorokiniana
  unsure (1)..(509): unsure at all n locations; Clone ID: LIB3602-093-Q6-K6-A10
ctgaccgccacttacaacatcccggncgtgctgttccgcgacgtcgtggtcaggggcttctggctcattccctactggccggcctgcccgctgccgagcgggagcgggtgatgggcaccgtgctgcagctgctggctgacggcgtaattacgccctactcgggcgagcgcttctcgcttgaggacgtggtggcggctgccaaggcctccaaggccgatgcgcgcggcggcaaggtgctgctggagggctgaacaccctctaaaatagcacggtgcggcatgctgggagaggcggcgcagctcggcacagcagcagcatggcagcgacagctgcaagcccctcgcctcccctgcgagcagcagcccggagcacagcgtgagctgggaataacagcgctttgaaattcaccgttgccgaaatgaaatcatgatggctgcccacttcattgcaatcacacattccttctgtcattccattgcctgcatgcaaatttaacaaacatgccctcc

SEQ ID NO: 6594 - DNA, 558 bp, Chlorella sorokiniana
  unsure (1)..(558): unsure at all n locations; Clone ID: LIB3602-093-Q6-K6-A11
gcctcggtcaaggagtggcaaccatggaagaacgacgagggcgagattgtcgatctgtacatcccccgcaagtgctcgtggaccaacaagctgatcacggccaaggaccacggcagcgtgcagatcaacattggccacctggacgagagcggcgtgtacaccaactcgttctccaccttcgcgctctgcggccaggtccgcgtcaagggcgaggctgacagcgctctggaccatctgtgggccaagaagcgggctgagatcggccagtgaagcgctgctgagttctagccgccagccggctgggctacacagctgccagccggcggtgggccagccagccttgggtcggccagtgatgcgctgcgaagcaaagtgctgagcgggcgggcgctccggcgcgccgccgccagccacgcagtgcaagctgtaacgcgcctccttgcnnaanaaaaaaaaaaaaaaaaaaaaaaaaaaaaaaaaaaaaaaaaaaaaaaaaaaaaaaaaaaaaaaaaaaaaaanaaaaaaaaaaaaaaaaaaaaaaaaaaaggggggcccttt

SEQ ID NO: 6595 - DNA, 607 bp, Chlorella sorokiniana
  unsure (1)..(607): unsure at all n locations; Clone ID: LIB3602-093-Q6-K6-A12
gcgttcggctgtgcgtggcggntgctgccaaggccgacaagctgaagcagtcgctgccccccggcctgcacgtccaggagatctgagcggctgccggccggctcagcgcgctggcgggagcagccgcggcgtccccggcagcatcagtgtgatatgccgtgcagcgccgccacccccagtgtaacgggaggcttcgaaaaaaaaaaaaaaaaaaaaaaaaaaaaaaaaaaaaaaaaagaaaaaaaaaaaaaaaaaaaaaaaaaaaaaaaaaaaaaaaaaaaaaaaaaaaaaaaaaaaaaaaaaaaaaaaaggggggagccgnntttaaaggaaccaagattttacttccgncgggcgtggggaggaaaaagctttttttatggggtcccctaaaataaaatcaacgggccgggttttaaaaacgtcgggatgggaaaaaacccgggggttcccaaattaaatcgcttgggagaaaaaccccttttggccagttggggtattttttaaaaaggcccgaaccaatcgcctttccaaaaagttgccccccctgaagggaaaagggaacgcccccttaatgggcccttaaacggcgggggggggggggttt

SEQ ID NO: 6596 - DNA, 439 bp, Chlorella sorokiniana
  unsure (1)..(439): unsure at all n locations; Clone ID: LIB3602-093-Q6-K6-A2
cagactgaaacagaaaaaaaaaaaaaaaaaaaaaaaaaaaaaaaaaaaaaaaaaaaaaaaaaaaaaaaaaaaaaaaaaaaaaaaaaaaaaaaaaaaaaaaaaaagaaaaaaaaaaaaaaaaacttttttttttttttttccgcagcggcaaacccttttttggggggggggggggaaacccaaaacaggacaaaaacgactttcctgacggggggaaggcccccccccccagttttnggtgtgtgccatatgcgggtagcctgggggcggcggccgtgtagctccccccttcgtattgtttttcgcttcgtgtgctggcctcctgttcccgttctacacccgttcccggtggggtggttttctcgcctgtttctgctgctttttccccttcctttctctttctttttttttctttttttccgggcggcccctccccggg

SEQ ID NO: 6597 - DNA, 456 bp, Chlorella sorokiniana
  unsure (1)..(456): unsure at all n locations; Clone ID: LIB3602-093-Q6-K6-A3
cctgnacctggcgtctgacgacagcgagcgcacgcagaagctgcgcgaggcggagatcaagcacgcccgcctggccatggtctccttcctgggctacaccgtgcaggcctggtacaccggcgagggcgccctgggctccctcaacaagttcgccaacggcttctaagcagcccggcatgacgacggcctgggcctagcgcccggccgctttgcagccacttgcagccggcccctttgcggggccacccccacccaacacccctttcatgagaagattaacaccctgccatcgctcccttgctacgcctcccccgcccgtgcgctctctgcatcggtcgttctgtttgcctgcgggcgcgcttgctcccgggcgccccgcagattttgcatctgctcgctcgtgtgctgtcaggagtcagcggttgtatgatttcctgttgtaattcgtaacgttcc

SEQ ID NO: 6598 - DNA, 439 bp, Chlorella sorokiniana
  unsure (1)..(439): unsure at all n locations; Clone ID: LIB3602-093-Q6-K6-A4
gggcaagcgagcagcagacgagtgtgggcggngagacagcaagatcaacttgtgggcgctggcataccgcacagaccggcggccgctgctgccgggctgcacctgctttgcgtgcgccaaccacacgcgcgcatacgtgcaccacctgctgcagacccacgaaatgactgctcaggtgctgctcgaggtgcacaacacgcaccactacctacgcttctttgcggaggttcgcaaggcgattgcagcggggcggtttgcggtgtaccgagactggttcttgcggcgccgccagcggtggctggtgggagagggcagcgggcagtgaggccttttgcagcagggcaccttgtgcagcagccggcctgacgtttagcggcagcgattcagctgaggcccagcatctatgcagcgcaaaggtgtgtaaacctgggcaccggcc

SEQ ID NO: 6599 - DNA, 574 bp, Chlorella sorokiniana
  Clone ID: LIB3602-093-Q6-K6-A5
gcgagcatgagtgcagcggcgcggggtgctcgcaccactcacacaagcacgggcacagccaccagcaccacgacgacgcggtcagcagcgtgagcatcagcatcgagggggacatggaccttgataaggtcaactactggctgggcgggctgatggaggtgaagagcaacgacctgtaccgcatgaagggcgtgctggccatcaaggactttcccgcccgctttgtgttccagggcgtgcacatgctgtttgagggcatgccggaccgggagtggaaggagggggagaagcgggtgtccaagatggtgttcatcggcaaggagctggaccgccagctgattgaggagggcttccgggagtgcctggtcaagtgaccgggctgttttgggctgttttaaaagccgcgcagttgagacttggcaaggctgaaggcgcagcgtgctgaggcccgtagtacggcgcaggggcctgcaccggcgttttggagattgccccagctgacggcgcgcaccgaacgctgttgacgcgcactcacccatatcgactttatgcacactgtaaaaacatgattact

SEQ ID NO: 6600 - DNA, 592 bp, Chlorella sorokiniana
  unsure (1)..(592): unsure at all n locations; Clone ID: LIB3602-093-Q6-K6-A6
ggngttcatcacggccaacaggtggtggcctttatcaagggcactaagcagttcccccagtgcggcttcagcaacactgttgtgcaaatcctcaacacgatgggcgtcccctacgtgaccgtgaatgtgctggaggatgacctgctgcgcagcggcatgaaagagttttcgcagtggccgaccttcccccaggtgttcgtggcgggcgagtttgtgggcggcgccgacatcctcatccagtcgtacaccagcggcgagctgagcgagatgctggaggcggccctgaacagctgaggcaggggccacatcgcgaatttgcaccagcttgaggcagccctggacagctcacgcaggccaagtcgcaaccttgaagaggctgatgtggctgacgcagggcccgagcgtccgacccaaccaatggctcggtgcagcggccgcagcgtgggcatgcagccccccaaaatctttacttaccatgctgacccgaatgaatctgtggcaggccgcgtgctgccctgccccctgtatcctaatgccccctaggcatgtatgcaccctctcctccttcagtccttgcatctgtgctcccgcc

SEQ ID NO: 6601 - DNA, 569 bp, Chlorella sorokiniana
  Clone ID: LIB3602-093-Q6-K6-A7
tggcttcaacacaatttctgacaccttttgtgtttgatgcgttgcacaactgatgggaacaatgagcaggacgcccaggcatgtggagacgggggctaaagggcagttgggggatgccgagctgcagcaggaggcagctggcggacagcaaacagcctgactctgaatgatttttgtgcacagcagggacgaggcgcttgtgcatcgccctgccctggcacacgctcctgacgcccttttggctttgatccgttgcatagcgcaaattcgactagcgttgctgtactgtaatcgtatggacacaaaaaaaaaaaaaaaaaaaaaaaaaaaaaaaaaaaaaaaaaaaaaaaaaaaaaaaaaaaaaaaaaaaaaaaaaaaaaaaaaaaaaaaaaaaaaaaaaggggcggccggttttaaagaatccaagtttacttccccgtgcttgcaacgtaatagtttttttttagggccacctaaattaaattaactggccggggtttaacaacgtggggacgggaaaaaccctggggtacccaaactaaatcgccttgaaaaaaatccccttttgg

SEQ ID NO: 6602 - DNA, 565 bp, Chlorella sorokiniana
  Clone ID: LIB3602-093-Q6-K6-A8
cagcatgtcccccgtccaccagagtgcgccacgccagcccaggcgcccgttgtggtgcgagcaagtcccagcgcggccgagccaagctctccccctcccccgtccgccccgcgctctgcatcagccactgccatccctgtcgaccccttgccatgcacattttgctgaagatgctaactgaaaagatcattaacctctaagtacaatcttaagacaccatccagaatgttaaggccaacattcaagacaatgaaggcattcggcctgatcagaaaagaactcctcttcccaggcaagccgctggatgattgccgaacgctagctgcatataaaattgataacgagtggacgtgtccattacctgcttccactacctgggctgatcaacatgtttgtgaagaccctcaccacagacccatcacgcttgctgagcacgtcgagcgacacattctgccaagtcatgcccaacatgcacgcatacgatgatgtgttggctgaccaacaacgtctaatattacttggcgagcaactgatagacggccgcaccctggtagactactgcatc

SEQ ID NO: 6603 - DNA, 588 bp, Chlorella sorokiniana
  Clone ID: LIB3602-093-Q6-K6-A9
gcggggggaggccgggatcaagggaatggccggtctgggctgcagaggcatgcgaggttgcatgtgctgtgtgccgcactgttttgagcgccgccgcgtggctgcactgcgtggctgccgagtcggtgtgccggacattcgagcgacagctttccatcagctgccacctgcatcccacagccacccatgggacatctatggagcactgcaggtatgtttgcctgcatgttttgtgtatgtgaagtcgctcaccttgaaccaagcatgcaagtttattgtcatactatcactcccaccgcaggcggggttgcaggcttgcgacgtgcagcacgaccctgggcgagctccttccgcgttgtttactgccgcccaactgttctggcctcccaatgttcctgcctgcaggcgggcctgcaggcctgctacgtgcagcgggaccccggggagccgtaccccgctttcctgtcaaagcagccgcagctggtagtgcgcagcttcgaggaaatggcaacccagctggccggcgggtgaacgactggaggtagcagtgggcggctgggggcagcagctgtgaacggacttgcccgc

SEQ ID NO: 6604 - DNA, 531 bp, Chlorella sorokiniana
  unsure (1)..(531): unsure at all n locations; Clone ID: LIB3602-093-Q6-K6-B1
gtcgacccagcgtccggttctagnacgcgggcggccgctcgcgatctaggaactagtggaagccgacacgcgggcggcggtggcggcctgcggccccttcctcatcgccaacgagcgcaccgccctggcctgcgctctagaagcagaggccatcgagacggacgccgccagctgccccgagatctgtgcagacctgctgtcgacactgccggcggactgccaggcggccgtgtcggtgctgctgccgcgcgtcatgcaagtcaaggcgccctcgtttgagctgctcaaccagatgtgcggcaccatgctgagcaagagcagcaagatgcccgctgcgcccagcagcggcagcagcggcggcagcggcagcggcggtgccaccagcagcggcagcagcagggcaaggtgtgtcggctgggcgggcctagctgtcggggcggcgctcgcgacaagtttggctctgtgatagcgcgtggttcaactcgctctttctacattattaatgaacagcgcatgtaatgcacagactgg

SEQ ID NO: 6605 - DNA, 223 bp, Chlorella sorokiniana
  Clone ID: LIB3602-093-Q6-K6-B10
ctcgcatgggtatgttacagcgagcgacgcgcagcaaaaaaaaatcatcgttaaaagaggcgtagcaaagaccagacgggacagaagttaatatctgcagcaggcgggggggcaggccccgccttataggcgctgcggaggtgagggctcaaacacgggtgagttgagtgggtgggcaggggcaagtgacacagagggcgaggcaattcataccgcttgctgg

SEQ ID NO: 6606 - DNA, 517 bp, Chlorella sorokiniana
  unsure (1)..(517): unsure at all n locations; Clone ID: LIB3602-093-Q6-K6-B11
tgcaaccaagnatccagaggtgcaggtgttccgctcctcctggctgggcgctcagggccacgacgagcggaagaagctggcagaggcagccgcacgcatcgaggcgcagcaggcggcgcagcgcagccagatgccctgagcgcagccagatgcgcttgcccaagcgctggccgccccccgcgcggcagagcgcagcagcagcggctgtgctgtcgtagcggcagtcggtgcgggcatgcggtcgccatgaggggcgtggttgcattgactgcaactggcgcttgagggcatttacctgctagttaacctgctgccgtccgcgtccgtgttgggacggttcatactgcactctgcacactctacacaggctttctcttgcgattttccggctcggaccaccagttttgagcatcggacactttttcaccctggctttttgcgcacgccatgccatgtgcgccgactgcgccatgccttgtatgttagtattcatgcatgcctgtaatgcgcgacttac

SEQ ID NO: 6607 - DNA, 592 bp, Chlorella sorokiniana
  Clone ID: LIB3602-093-Q6-K6-B12
tcttccctcactgcgtccacctggtcagctgggagaagagacatctcgtccgaggcgctggaggcggcccgcatcgcggccaacaagtacatggtgaagaacgcgggcaaggacgccttccacctgcgcgtccgtgtgcaccccttccacgtgctgcgcatcaacaagatgctttcgtgcgccggcgcagacaggctgcagacaggcatgcgcggtgcgttcggcaagccatttggtgtgtgcgcgcgcgtgggcatcggtcagatcctgctgtccatccgctgcaaggacacgcacgctgcggtggcggaggaggccctccgtcgtgccaagttcaagttccccgggcgccagaagatcgtggctagcaggaactggggcttcactccctacctgcgcgacgattacttggagtggaagcgtgagggccgccttgtgaacgacggtgtgaatgccaagctgcttggcaaccacggcccgctggacgcacgggagcccggccagattttcgagggtcctgcccgtctgtggcgtgtgccggtgcatgcctaacatgttgcttgggttctaaagatgtaacgaacatctgagc

SEQ ID NO: 6608 - DNA, 255 bp, Chlorella sorokiniana
  unsure (1)..(255): unsure at all n locations; Clone ID: LIB3602-093-Q6-K6-B2
nagcaccccacttgccccgttccttgccatgcgctgctttgttcttcttggactggctgctcctggcattgtaacatgggcaagcaaaaaaaaaaaaaaaaaaaaaaaaaaaaaaaaaaaaaaaaaaaaaaaaaaaaaaaaaaaaaaaaaaaaaaaaaaaaaaaaaaaaaaaaaaaaaaaaaaaaaaaaaaaaaaaaaaaaaaaaaaaaaaaaaaaaaaaaaaaaaaaaaaaaaaaaaaaaaaaggggggagang

SEQ ID NO: 6609 - DNA, 102 bp, Chlorella sorokiniana
  Clone ID: LIB3602-093-Q6-K6-B5
cggccgcgtgggttttgcagttgtaacatgtggcagcgccaaaaaaaaaaaaaaaaaaaaaaaaaaaaaaaaaaaaaaaaaaaaaaaaaaaaaacaacaaac

SEQ ID NO: 6610 - DNA, 526 bp, Chlorella sorokiniana
  unsure (1)..(526): unsure at all n locations; Clone ID: LIB3602-093-Q6-K6-B6
cagnacggcagcctgntggnagacgacgccaagatcaccgtctccccccggtaaattggcagcccttgtagcggcgccgcgcccatttgtgcgcgcgccagcagcagcagcagcagcagcttgtatcatgactgcggccgtgggaggaggccgcggcgggcaaaggcctgagagctaaccaaccaagctccctggttaaggcctggggagcgccggggtcggcgccgcgcagcaccccgccgctcgaacctggcggccgagcagcggagacaaaggggccgccgccccgccgttccctagcaggccctgcctcccttccgggggcggcgggcccggcgcatgtgtgtgtgtcaaacctgtgttacctagttcaaccctgagaagattcaaacacccctcacgaatcacatatgcttttttgtgtgtaaacgcaagccgccnaaaaaaaaaaaaaaaaaaaaaaaannnnnaaaaaaaaaaaaaaaaaaaaaaaaaaaaaaaaaaaaaaaaaaaaaaaaagggggcg

SEQ ID NO: 6611 - DNA, 579 bp, Chlorella sorokiniana
  unsure (1)..(579): unsure at all n locations; Clone ID: LIB3602-093-Q6-K6-B7
ggtgatgtggtgcccaagnatgtcaacgcctccgttgccaccatcaagaccaagcggaccattcagttcgtggactggtgccccaccggcttcaagtgcggcatcaactaccagccgcccaccgtggtgcccggcggcgacctggccaaggtgcagcgcgcggtgtgcatgatctccaactccaccgccatcgccgaggtcttctcccgcctggaccacaagttcgacctgatgtacgccaagcgcgcctttgtgcactggtacgtcggcgagggcatggaggagggcgagttctccgaggcgcgcgaggacctggcggccctggagaaggactacgaggaggtgggcgccgagtccgccgagggcgacgaggacggcgaggacgagtactgagcggcggcgtgatgtggcggcggtgtgggcggcggctgctcagtacggcagccccgagccctgcctttgcagtgcctgcgccgtgtgactggatgaggcggcggaatgaaatgtaacatgaatgaacagtnaaaaaaaaaaaaaaaaaaaaaanannaaannaaaaaaaaaaaaaagggcggccgc

SEQ ID NO: 6612 - DNA, 609 bp, Chlorella sorokiniana
  Clone ID: LIB3602-093-Q6-K6-B8
gaaaaaaaaaaatagaacaaagaacaaaaaaataaaaaaaaacaaaaaaaaaaagaaaaaaaaaaaaaaaaaaaaacgaagaacccacaaaaacgaacctatactacaagcaccttattaggaggcctgagggggtgcctctcaggggccccgtggtggccatcgctctggagggcaaggacgtggtggcccagggccgccagatcatcagtgccaccaaccccctggcctacgaccccggccggtacaccccgcgtacgccatacatattggccgtaacgcgatccaccgtttcgactgtggtggagaacgcgcaaaaggagctggccctctggttttcccaaaggcctggtggacaacatcggcgtgctgcgccgccccttctacgagtgaatcacgcacagcaggctgtgaggtcccccaagcactgcccgcctggcagctagcagccgtaggctcgcgcccttgactttttccggctccatttatcgaatcgtaaaagctgtctcgccacattccattctggggcggttgttttatgctgcatgccttacttggtataggcccccatgaaccaataaacctttttttacaaactgggaacaaaaa

SEQ ID NO: 6613 - DNA, 423 bp, Chlorella sorokiniana
  unsure (1)..(423): unsure at all n locations; Clone ID: LIB3602-093-Q6-K6-B9
gggcgatgtcaagnagctgctggatggtgtgcgngacacggtcaacaccgtggctgccggctggagccgggaggagaaggatgcatgcctggaggcaactccaggcaccttcatgtggggcggccagctggtgtccctgatcaccggcggcaagcccgtgggcccccactgagcacgccagctgcgcctgcgcgttgccgggctcccagcccaggcctcggcgcccaataaacgactcgcttccctgcattacacggcagccgccgcagccacaaccctgccggccggcacgcagtggggcccgccgctcatctggtcattttgtcccctctgccatttcatcggtaccttctgctgcattcttttgtcctgctctctgcattcggccacctgctgtacaccttgcaaagtgctctcgtgccc

SEQ ID NO: 6614 - DNA, 467 bp, Chlorella sorokiniana
  Clone ID: LIB3602-093-Q6-K6-C1
ccgcttgattgcactaaacccaacacagcgcttgctccctacccgccgtttttctacctccctcgggattgcatgcaagcacgcgcttttaccctgcgcgtcccaagtgccgcgtgtcagtttgattgctaagcacccacggctcgaattttagcaccgttctgccacttgcagcctgctatccgctgtgcacacctgaggccctttcattctattgctgtcgctctttcattggtggcggctgcgccacctgactctgtcggtttttgcctgctgctgttcattcagcaccccacctccggaaacacaagccctcggtgcgcctctgctgccagcgccctccgaaccgccatctctgctttttccacccttttgcaccacccctcgcctcatggccgttactacggtgtagcgcaagtcgacgcagccttgtaaagcctatgcaggggaaaaaaaaaataacaaaa

SEQ ID NO: 6615 - DNA, 255 bp, Chlorella sorokiniana
  unsure (1)..(255): unsure at all n locations; Clone ID: LIB3602-093-Q6-K6-C10
ctgntgggnaacaagnagcaggacgcccaggcatgtggagacgggggctaaagggcagttgggggatgccgagctgcagcaggaggcagctggcggacagcaaacagcctgactctgaatgatttttgtgcacagcagggacgaggcgcttgtgcatcgccctgccctggcacacgctcctgacgcccttttggctttgatccgttgcatagcgcaaattcgactagcgttgctgtactgtaatcgtatggacac

SEQ ID NO: 6616 - DNA, 239 bp, Chlorella sorokiniana
  unsure (1)..(239): unsure at all n locations; Clone ID: LIB3602-093-Q6-K6-C11
ctgcgccgctgcaggnagacgacgcggcgcggcacgcggccaagtggagggcaagccgctgccggtgctcaagcgccagcccaaggcccccgcaccgaggccatcatgctggagaacgtgaagatggagaccatcacggccatcccctacgatatcctcaaggagggcgtgctctgagcgtgatcggcggcgacgttccgttgattgcggctgcagcttagtgagatgtaaccccgcag

SEQ ID NO: 6617 - DNA, 435 bp, Chlorella sorokiniana
  Clone ID: LIB3602-093-Q6-K6-C12
cacacgcaaactggctaccatccgcactcgcaagttcatgaccaaccggctgctgggccgcaagcagtttgtgctggatgtgctgcaccccggcaaggcaaacgtgtccaaggccgacctgcgcgagaagctggccaagatgtacgacgtgaaggacctgaactgcgtgttcgtgttcggcatgcgcacccagtttggcggcggcaagagctccggctttggcctgatctacgacaacgttgaggtggccaagaagttcgagcccaagtaccggctcgtgcggaacggcctggcggaggcggtgcagaagtcgcgcaagcagatcaaggagcgcaagaaccgctccaagcctctgcgcggcgtcaagaagtctggcaagaagtaagcagcccgaggagcgcgccacgcgcgcgacctgtaacacattgccttcga

SEQ ID NO: 6618 - DNA, 549 bp, Chlorella sorokiniana
  unsure (1)..(549): unsure at all n locations; Clone ID: LIB3602-093-Q6-K6-C2
gtggccanngcggcgnngcagtccccaccagnnctggcaagggcccctgcagcagnncgggtgcccgcnnagcagnnggggcatnacccacgctggnnnctctggcnnacctttgctgggtcatgcccctgggaacccctactacnntggccatagcggggcgggcgagcgccgnnncgtgccagcnnnccgctgnncgcccnncaagcaccagnncccccgtggcgcccgcaggccctgcnnctgccagnncccatgcccgcaggtnnncggcagtgnngggcattnngccggcagnncccgtcctncgcccaaccgtnngctgcgcagnncggcagcggcatgcccctgggaaagcccgttgattggnnnagcgcggtggcccgggcccagcgggctttctgaatnggtgctgggcgactnnggtgacnncacatcttgaatgnnactgactaacaaagttattgcaaactggntcaggngttnngggcagtaaaggnntagtaatttgnnctttcaaattttaatcgcttgtgaaagnngggccgc

SEQ ID NO: 6619 - DNA, 599 bp, Chlorella sorokiniana
  unsure (1)..(599): unsure at all n locations; Clone ID: LIB3602-093-Q6-K6-C3
cggncgcgtgggcggcggnacaggtggctgtggcggcgcactccctgctgctgcgcctggaccagcagcaggcagtgcagcagcagcagcgaggacagcaccaggcctctgacgaagaggagcagcagcagcaggcacagcagcctgctggggcagcccacagctgggtccccagcacgtttgcagcgcaggttgcggatggcctgatcgctgcggcgctgggcgaggcactgcaggtggcgggagcggcggctgtccgtcttccagctgccagctgggccgaagccgaggtcctgctcacgcagcgtgcagactgggatacagatggctcggcatccgcctcgagcagtgcaggcagcagcgcgggcgaggagggctggccagaccctttccagagggagtggctgctctcctgcggcagccgcgaggcagagccaggggacagcacagcagcagcagcagcagcgggggcggcgggggctgaaccacagccgccacttcgcaagcccagcagcccaggcagcagcagcggcggctggccagcggcctgggagccaggcgttgcggcggggcaccgcctgtacgcccgcgccctgcct

SEQ ID NO: 6620 - DNA, 606 bp, Chlorella sorokiniana
  unsure (1)..(606): unsure at all n locations; Clone ID: LIB3602-093-Q6-K6-C4
gtgttnaaaaaaaaaaaaaaaaaaaaaaaaaaaaaaaaaaaaaaaaaaaaaaaaaaaaaaaaaaaaaaaaaaaaaaaaaaaaaaataaaaaattaaaaaaaaattaaatacaaataagcgtgggcctttctttagtggtcccatgttttcccccgcgtgcacgcgacgtttccgtggtttttcctgggtaacacccggtccattccccggccccgtccttttccaacctcatagactgggaaaacccctgcctgtccccacctttggccccttggggcacatccccttttccctggttggcgctttgtaaagaaggccccacccgcgtggcccttcccagctttggcccatcctgatgggtgattgggccgccccttttacccccttcttaaccctttcgttcccgttgtttccccctattttgccttttttctttgccattcccttaacgcccgccctttttggttttttccctttcatttctggcccgtccctcggctttcccctgccgggttttaactggggggccccttttggggctccattttgatgttttggggcccctccctccccaaaaaccttttttggggttatggtcccctttcc

SEQ ID NO: 6621 - DNA, 448 bp, Chlorella sorokiniana
  unsure (1)..(448): unsure at all n locations; Clone ID: LIB3602-093-Q6-K6-C5
ccttgggtgcgcgccgggcggcccgcctcaaanccaaccctaactcaaaccacagcatcgacttgactcttattacgtggcatgattagccctttgtcgcaagtatttctgtgccctgcagcctgcctgcgccccctgtgtcccctgcaccggccgatttcttcctgttgccttgatgcatgcccaaccagacttgcaacagagtctcccctgcatccactgcacctgtccccctctctgtccccctcaccctgcacccctcgcctatcgccgcctgccggcggctgcaagcctcgcacccaacaaaccctttgcactttgctttcgcttggtctgccctttacttttcattggtcggcgtcgtgggcttgcccccgtcacgtgcacagcggggagccgcccctcacctctgccttgccccttagccagctggtaacgcatctcatac

SEQ ID NO: 6622 - DNA, 596 bp, Chlorella sorokiniana
  unsure (1)..(596): unsure at all n locations; Clone ID: LIB3602-093-Q6-K6-C6
gcccagnacgccaaataatcggcatggtgggggttgtggccctctcagtcagcctcaccgctgtgctctactcagcgacaggttttatgggctacctcgcctttccgcacccacagcccgacatcctgctcagcttcgatcccgaggacaaactgatgcaggtggctcgtgccgcaatcggcctggtcctaatcgcatcctatcccgtggtgcacttccccgctcgggccgcggtgcgcgagctgctgcaacaccttgcctccggcagcagagtcggcgctgcgctggcagacggcggcggcggcaggtttgcagcggtggaagcgctctgcttctttggcgccacgctggcgctggcgctgagctgcacagacctggggagcgtgtttgaggtcgtaggtggcacgtgcggcagcacccttgtgctggccgtgcctggagcgctgctgatcagctatgcttctcagaaggcagcagagtcgaggcagctgctggatggggcgtcgcttgcagggggcgacctgcggcagccactgcttgggtcagcagcggcaggggcaatagcggcagaggatgcagcagaacagggagcaggc

SEQ ID NO: 6623 - DNA, 444 bp, Chlorella sorokiniana
  Clone ID: LIB3602-093-Q6-K6-C7
cagcgaggctgaggctggccgccgcctggcgcaggtggtgagcgaccctgcgctgaacaagagcggcgtgtactggagctgggacaacgacaagtcctctctctggtttgactcggtggacggcgcgctggagaaccgcgtgtctgaggaggtcagcgacgacaagaagggtgccaagctgtgggacgtctccgccaagctggttggcctggcgcagtagacgactggccgcagcatttcatgttgatatttaatgcacccgacatccgcccgcaccagcaatgattacgccacatgctgtccatcgccagccattgcagcgccacagccacgcccccaacctgacccttctgtttgatcttttgcttgagcgcccgtgcgccaatcagtttctttcgttttcctgagctcttagcagaatgacaatgtatgaacatactggtg

SEQ ID NO: 6624 - DNA, 586 bp, Chlorella sorokiniana
  unsure (1)..(586): unsure at all n locations; Clone ID: LIB3602-093-Q6-K6-C8
cggncgcgtgggtgcagtacggcggcggcatctacaaaattgcagattggtcggacatcaccaacgcgcatctggtgcccggccctggcatcatcgatggcctcaagcaggttgggctgcccaagggccgcgggctgctgctgctggcggagatgagcagcaagggcacgctggcgcggggagactacaccgaggaggtggtgaaggccgcgctggagcaccaggactttgtcatgggcttcatctcggtgtcgccatcctcctggaagagcagccccaccccgcccggcctcatccacatgacgcccggcgtgcagctggcggcaggcggcgatgcgctggggcagcagtacaacacccccgccagcgtcatcggcgagcgcggcagcgacatcatcattgtggggcgcggcgtgatcaaggctgcggaccctgctgcggccgctgctgagtaccgccaggcgggctggcaggcgtacgaggcggctctgcaggcgtgaggcagcctgttggccccttgctcaggcctttcttggaccgcccgccgcgtgactcgcacccctgacaccgacccacctgtttttcg

SEQ ID NO: 6625 - DNA, 553 bp, Chlorella sorokiniana
  unsure (1)..(553): unsure at all n locations; Clone ID: LIB3602-093-Q6-K6-C9
gcggcttcagcagaaggcttcatcccgctgtccacctacctgaccaactacaagctgggtgactatgtggacatcaaggtcaacgccgcggtgcacaagggcatgccccacagttctaccacggaaagactggctgcgtgtggaatgtagaccaagcgcgccgtgggcgtggagctgctcaagcaggtcaacgggcggtacatcaagaagcgcatccacgtgcgcatcgagcacgtgacccccagacgctgccacgaggagttcctgcgccgctgcaaggagaacgacgcggcgcggcacgcggtcaaggtggagggcaagccgctgccggtgctcaagcgccagcccaagggcccccgcaccgaggccatcatgctggagaacgtgaagatggagaccatcacggccatcccctacgatatcctcaaggagggcgtgctctgagcgtgatcggcggccacgttccgttgattgccgctgcagcttaatgagatgtaaccccgccncagagatcagcagcgggcacggggtcggcagcgggccccatcgcccg

SEQ ID NO: 6626 - DNA, 307 bp, Chlorella sorokiniana
  Clone ID: LIB3602-093-Q6-K6-D1
ccgggttgacccagcgttctttgccggcgaccgcatggccattgggggggcggtcaaggccgccagcgacatcatctcgcccgtgtctggcgagatgtggctgccaacgaggagctgtccagcgactcatccaagatcaacaccgacccctacggcgagggctggtggtcaagtgaagctgccaccccgagagctgaggagctgatgagcgccaaggagtacgatgagttctgcgcatgagcggcatcatcctttttgccccccggaaggcatcctggtggcagtctttctctgtagttttgtaggt

SEQ ID NO: 6627 - DNA, 238 bp, Chlorella sorokiniana
  Clone ID: LIB3602-093-Q6-K6-D10
ccggctcagcaagccttccgcaacctgcccggcgtggaggttgcctccgtggagcgcctgaacctgctgcagctggcgcccggcggccacctgggccgcttctgcatctggaccaagtctgctgtggagaagctggacaagatcttcggcaccaccgagaccgcgtccgagcagaagaagggctacaagctgccgcgccacatcatggccaacggcgacctggcccgcctcatcaact

SEQ ID NO: 6628 - DNA, 699 bp, Chlorella sorokiniana
  unsure (1)..(699): unsure at all n locations; Clone ID: LIB3602-093-Q6-K6-D2
gctgcctccgcgccacaggcgcatggcgtgctggcggacacatatcgnatnngcatatctnnttatggcgaccannaccttgtggnatgtcgggccaccncnncttcaaaccatgttcnnnccaacacgggnnaccgnncgtgcgcttnnnccccttcaggggtgggttgtctgtnntggcaacggctaccatcgacatgtgaccggggcggtggcccatnncgagctgcnngccccgcctggnacnngcccgtcatgcggtgcgcgtgtctcgagccagcacnnctcggacaagcggnngctggagnncactttaccgtnntcgcttcaaagtgggacccacgtatgatgaagcnnatctggatgccaagnnggctacaacnngcgattgnnncatgtatgatnaccanntcaactgnnctgggtccccgccattatcaagcnnatcgtggatgccgaaacctacggcgtntnngccatgaacccggcaacgagnntttgcagcaatcaagcgacccatcgccnnttcagcatcacttgcncnngcccgcggcaggaaaacaagcatggcgaacccnngcggtgtgcacgnngccatcatgccnnaacctcaatggctcaacggttccctacaacnnnctgcagacgaaggttgtacccttcggcaccccgcttacctaccatgnatnnctgtcggtg

SEQ ID NO: 6629 - DNA, 702 bp, Chlorella sorokiniana
  unsure (1)..(702): unsure at all n locations; Clone ID: LIB3602-093-Q6-K6-D3
tgcacacgnacacnngcggcnatgcgnngctgggtgcaggcggnagnnatcgatgccatgnagccaagggggctggcncnntctgggcgaacggcnnatcgcgcctctnnttgggctgnnggttcgcaccgtagnngcggcagcnnacctctgcgnnggcggcaagggcgcggctnnncgcaggcagnaacctgnagnncgtggnagnnctgnaacgncnncagctgcgcaaggcgcgagcngngnncaggcngnngtgcangnngcagcnntcaaagcagcccaaagcacctcnnaacggccagcnnnattgtttnnggcagtnnggggcggnnctggggnncggcgaagtgagnngcggggcgnntgccagcccacnnccagcannaggcggcgcnttgatgcgnnggagaanngtatgcgaacnncgcagctcaaaagaagccttnngccgggcccagcggcntttggggggtcaatcaagcagnncgcctgcnngcccgctccgnngcccccgacccggcagnncagcggcagcagcnnagttggagccacgaacgaggcgnngcggtggaaggcgctnngttcgctggnnggtggaggcnnngcggcccaagccccggcagcagnncaggcgccgccctttgctggnnacgacncagnnncacaccgnactncnnggcgggcnnggcggctttacct

SEQ ID NO: 6630 - DNA, 288 bp, Chlorella sorokiniana
  Clone ID: LIB3602-093-Q6-K6-D4
atgcaatcccattttttcgtgcgcccccagcatccccaccgcgcacggaccgcggcactgcaaatcactttaccctgcccctacccacgtgtgcatccgtccacatgatccctgcccctttgcttgcgctctcaccccacccccacctgtaccgagcccctgctatgccccttgcatgacttaagccgccgccttgtcggcggcgtgtccttgttatcctgtcgctgccgcacaggccgcgtgtgtttgctctattctgaacgggtatgccccctttctatgctagct

SEQ ID NO: 6631 - DNA, 597 bp, Chlorella sorokiniana
  Clone ID: LIB3602-093-Q6-K6-D5
cgctgtccctggtaaaactcaacttcgccaagctgctgcacctgtgggaggtggtggacaagcacggcgacccgtagctgacgcagtacgtcgaggacatgctgcaggacaggctgaggcacatcaagaagtggccgactatgtgagccagctgcgtcgcgtgggcaagggccacggcgtgtgggcctttgatcacgagctgtacgaggaagagatccgggcccgcgccacgcccaacgcatgatcgctcatagtgccagagttgggcatggcgcagccaggagcagcctgagggcgagccgcgcccgctgctgcgcccagcacagactcggtctctggatcgcagcccagccctccggaagtggcttgacaagcgcgcacatgcccagtgccaaagcgcggcttgtgccaattttctggagcagaagcagcgggcaggcagatggccgcagctggagtggtttgtggctgcttgcatgctgcgcacggagtgcagcagcgcttgtgatgacagggtttgcagcaccttgagcgctggattgtttgcctccctgctgctgtgcgcatccgtgtttcttacagctgtgcacagtgtgt

SEQ ID NO: 6632 - DNA, 100 bp, Chlorella sorokiniana
  Clone ID: LIB3602-093-Q6-K6-D6
cggccgcgtgggcaacattacaagggattaattcgcacaggtggtgcggcgtttaatgcacaaaccttactaccccttatcaatgctttgatgtggtgtg

SEQ ID NO: 6633 - DNA, 287 bp, Chlorella sorokiniana
  unsure (1)..(287): unsure at all n locations; Clone ID: LIB3602-093-Q6-K6-D7
ccaaggtcgtggcgctgcgactggctatgacactgctgtggccctgcccgccgctggcgacgatgaggagtacctgaaggagaacatcaagtcggccggcgcaatgaagggccaggcagtgttctccattgccaaggtggatgctgccaccggcgagattgctggcgtgtttgagtctgtgcagccttccgacactgacctgggnagccaaggcccccaaggacgtcaagatcactggcctctggtatgctcagctttcgtaagcgctgccagcgcccgtcgtttgg

SEQ ID NO: 6634 - DNA, 549 bp, Chlorella sorokiniana
  Clone ID: LIB3602-093-Q6-K6-E1
cgggttcgaccagcgtcctttcctacgacctgctggcataagcggtgcccgtgtcgtctgtgttcacccaaaacgagagatcgacgccatcgccatcaccaagggccacggcactgagggcgtggtgacccgctggggtgtgtcccggctgccccggaagacccatcgcggtctgcactaaggtggcctgcatcggcgcgtggcacccggcgcgcgtgggctggaccgtggcccgctccagtgccatgggcttcaaccaccgcactgagatgaacaagaaggtgtaccgcatccgagtgaaagtcgaggccaggcacaccgccaccaccgagcacaacttgacggtgaaggacattacccccatgggcagattcccccactacagcgtggtcaacgatgactactgtgatgatcaagggcgcctgccccggcgttaagcgccgagtaatcaccctgagcaagagcctgttcccccagaccagcctcaaggcgctggaagatatccgtctgaaattcatcgatacgtccagcaagttctgcaacggccgc

SEQ ID NO: 6635 - DNA, 455 bp, Chlorella sorokiniana
  unsure (1)..(455): unsure at all n locations; Clone ID: LIB3602-093-Q6-K6-E10
nnggtagcgaccagccccttttaaagcccattagcacaaaaaaaaaaaaaaaaaaaaaaaaaaaaaaaaaaaaaaaaaaaaaaaaaaaaaaaaaaaagaaaaaacaaatataaaaaatcaaaaaattaaaaaacacaataatggggggggccgtttttgaggttccaagctttcttccccttgcttgcgacgtcttttttcttctttggggccccctaaatccatttcattgcccgcctttttccactttcgggactggaaaatccctgcgtttccccaatttattagctttgcagcacttcccctttttcccagttggcgtattacctaaaaggcccataccattcgcctttccaaacatttttacaccctgattgggaattggtaccccccttttagcccccttttattcccggcggttttgggggttcccctcagggtgacctttctttttt

SEQ ID NO: 6636 - DNA, 259 bp, Chlorella sorokiniana
  Clone ID: LIB3602-093-Q6-K6-E11
cgtcgccgctccctgcgaaggtggccaagcccgggccgtgatgccgcacgcatgtacacacccgcggcactcgcgtgcggtccccagccgtactcagtgcctctcccattagtcggtttgattttttccatgatactgccgctgttctgctaccccacactgtccaccccgtcagattcatccctcccagcaaacccctgagttttgtgccgcacgatgccccacatgactcgccctcacagcccttgtgctgcgtgct

SEQ ID NO: 6637 - DNA, 388 bp, Chlorella sorokiniana
  Clone ID: LIB3602-093-Q6-K6-E12
gcctgggcgaggtgggcaaggccacgggcgaggcgtggaaggagctgtcggacaaggagaaagccccctacgtcaagaaggccgaggccgacaagaagcggtacgaggcagagaaggccaagtacgagtccagcaagtgagcgcggcaaccgacatgcagccgactcacccaccgattcccacacccgccctcggcggcacctcttaccgcggctcggcagcgcgccgtgccgcctgacctcttgaccctcatctctgtacgccaccactaagcccgcagctgcaaaacctgccctcgcctcggatttttgcacacccacggacgccctcctctccccaacacatatacttggaccacactgcctctggccatgttaaatcgctgtgt

SEQ ID NO: 6638 - DNA, 597 bp, Chlorella sorokiniana
  unsure (1)..(597): unsure at all n locations; Clone ID: LIB3602-093-Q6-K6-E2
ggcggnctctcctttgtgggcgatttggtggggcacngaagcatgctgcgggagctcaagttcgacctgccggacgcgccgcacctgctgcactcatgcggcgctgatggcactgtttgcggctgggacacacgcagcggccagcaggtggagtgctaccgcgtgccgcgcctcgagctgctgtcctgcagcaccaacggcacgcttgtggcagcgggcggcggcgacaaagtcctgttttgggacaggcgcacgcagcgaccggtgacgtcgtttgacgacacgcacgcgcaggacgtggcgcaggtggccttccacccggcgcaccgctccatcctggtgtcgggcagcgaggacggcctgattgcggtgtttgacaccgccccgcagctggacgaggacgagggcttcaaggcggcgctgaacatcgacacgtcggtggccaagctgggcttctacgggcagcagggcgagcggctgtgggcgcgcagcggcgtggagagcctgcacctctgggagtgggctgcagcctgcaatgacgaggcggcgggcggcaacggtgcgctgggagaggcgcttaatgcccgcgagcagcta

SEQ ID NO: 6639 - DNA, 387 bp, Chlorella sorokiniana
  unsure (1)..(387): unsure at all n locations; Clone ID: LIB3602-093-Q6-K6-E3
tcgcgctggntcaaggnnatgtgtnnggcatggctnatctcggcgcgtgnnccccacacccgcccctnngaacgacaaaggcatnncacgcggtcggtgnnnggccacctcacnncctcacacgctgggnatccccagnatagcctgccactgtggacaatctggnntcctgttgacnnccacgccgaggcggacgaccatcgaccaggctgcaaagcttgngacgcgctgcggcagcagngagccagagctgtgcgcacgagtcgaggcgacgctggctcgtgccaagcgtgacttttggtggcgcatctagcccgccgcagagcatttttgccagcactggacatttgatttgtatttcatttgtaatggcactggcttgcnnac

SEQ ID NO: 6640 - DNA, 522 bp, Chlorella sorokiniana
  Clone ID: LIB3602-093-Q6-K6-E4
agctgatggcggccagcattgtcaagcacgcgtttgacattgtcaacctgctgaccgaccagaacccggtccaggtgctcgtggacgccatcatcaacggcggcccgcgtgaggatgccacccgcattggcagcgccggtgtggtgcgccgacaggctgtggatgtgtcgccggtgcgccgcgtgaaccaagccatctggctgatcaccaccggcgcgcgcgagagcgcgttccgcaacatcaagaccattgctgagtgcctggcggacgagctgatcaacgcggccaagggcagctccaacagctacgccatcacagaagaaggacgagatcgagcgcgtggccaaggccaacctgtaaacggatgttgcgcacccaccaaaacagcagcccgccacagccggcacccctgggcaggatgccagaccgccagtgcagcatcacggcgtggttcagctgctgttatcgtggcaggctttccaattaggcgcgggtgttaggattgtgtaacacagcgcaccc

SEQ ID NO: 6641 - DNA, 568 bp, Chlorella sorokiniana
  unsure (1)..(568): unsure at all n locations; Clone ID: LIB3602-093-Q6-K6-E5
gggnagnaggcagnaagtgctcaggtggactgccactttggcaagcgcaagagcctggcgtccatccgcacctgcacctcgcacgtgcagaacatgatcaccggcgtgaccaagggctacgagtacaagatgcgcctggtgtacgcccatttccccatcaacatcaacatcgagaacaagggcggcaaggtggagatccgcaacttcctgggcgagaagattgtgcgcgtggtggacatgctgccgggcgtgacctgcgagcgcagcgccgccgtcaaggacgagctgatcctgaccggcaacgacatcgagctggtgtcccgcagcagcgcgctgatccaccagaagtgcctggtgaagaagaaggacatccgcaagttcctggacggcatctacctcagcgagcgcggcaccctggtgaagcccgagtaagcggagcccgcacgttgcagtagaggtggcggcacgagcgcagcagtgcgcagcgctcacgcccgcgccggcggagcatcggcggcggcagccggccccagctgcggcgctgcacgccatgtaacgcacacgttag

SEQ ID NO: 6642 - DNA, 329 bp, Chlorella sorokiniana
  unsure (1)..(329): unsure at all n locations; Clone ID: LIB3602-093-Q6-K6-E6
gntcctgctgtccatccgctgcaagnacacgcacgctgcggtggcggaggaggccctccgtcgtgccaagttcaagttccccgggcgccagaagatcgtggctagcaggaactggggcttcactccctacctgcgcgacgattacttggagtggaagcgtgagggccgccttgtgaacgacggtgtgaatgccaagctgcttggcaaccacggcccgctggacgcacgggagcccggccagattttcgagggtcctgcccgtctgtggcgtgtgccggtgcatgcctaacatgttgcttgggttctaaagatgtaacgaacatctgagc

SEQ ID NO: 6643 - DNA, 619 bp, Chlorella sorokiniana
  unsure (1)..(619): unsure at all n locations; Clone ID: LIB3602-093-Q6-K6-E7
ccgggcccgccgctcagcctcagctgccagcagtttctggcgcgcgtgcgtgcggcgccacaggcctttgccatgaacttggctgacgatttgacccagcacaagctggccttcctgacccaggtgggcggcgtgcccctggagcgcgccctgtcggccagccacctcaattacctcaagtctggcgtgaccgcattggcaggccgctacttcctgttgaccgagcacggcgtgccgctgccgcggcacaaggacggcggcattgggctgagctatgcaattaagggccgccatgccctgctgcgcctcttgcgccggcacgacagcgggcagcgcttgccgaccaatgatgatgccgcgctggcctacattgagcagtggctgaaggcctggccggagacggagagcggacagcggtggcacctgggggagtgactgccatgatgctttccctctgggctgcccaatatcgttgcagtccaatgatttctttgaatgtgcaggtcacacgctttgattttaccagtgcttacctacatgctatctgtctcaacctacattgcctgcgctcgcatgcccctgctnttagctgcgcacaacgttacagttgttccacact

SEQ ID NO: 6644 - DNA, 595 bp, Chlorella sorokiniana
  Clone ID: LIB3602-093-Q6-K6-E8
gtggcttcacgcagtttgccgctgtttgccaaaagtgctgcggcagcagccagcccctctggcccctctggccatctgcttttcacaatgaatgaagctgtcctgtacctgctgcagctgcggcagtatgcgtaccttcttaccaattgacaccttccacaagtgatgcctccctccattactcttcccttgcagctctccctctgcgcatgcgaatgcaccctcctgcccaccaccaaacgagcgctcgtgcgccgctccctactcctccccacaacactcccactcatcctgctcatgccatctgcatgggtgaatgcatgtttgtgaagtgagtttgccgcgctgcaaatgccttggcacctcaagtttttctgaaacgttcccatgagcgcctgttgtgcctgcccgtccttccgttccgtgtgtgcacccgcgatgccttgccgtgtccactctcctgttcaagagcgcctgttgcgcgtgcctgcatgcccttcctgcctcctcattgcacatgcctcctccataccaccttgagtgtgtgtgtcgacacattacaatacgcataccatagccagacgtgatgaatcgc

SEQ ID NO: 6645 - DNA, 411 bp, Chlorella sorokiniana
  Clone ID: LIB3602-093-Q6-K6-E9
gccgccgcggcagggctctacgtggcagccgtcgtgcccgagactcggggcaagacgctacaagagattcaatccctgctggcgcttcgagtggcgcctggcagccggggccggcggccggcggcacagcccagcgaccggcacggcttgctgccgccaggtgcacccctgagtgatgcctagcacaagccatgtgtacttgtgcagatcagtgagagattcagtctgccccgcttgttttcagcctgcttgttttcagcctgcttgttgtcaggtccggttgagcgcgcgttgtgcagtgcaccccttccctcggtagtgtgaaagtgagagagcaaaaaaaaaaaaaaaaaaaaaaaaaaaataaaataaaaaaataaaaaaaaaacaaaaggggcggctcggtttaaa

SEQ ID NO: 6646 - DNA, 495 bp, Chlorella sorokiniana
  Clone ID: LIB3602-093-Q6-K6-F1
gcgccatggctaccgcgggggggggcggggggcggacaagaacgacaaggcggtcataaatgagctccttctaagagacgaaggaagcacccgctaacagcgtggtgttgcaccggcccaagacctcgttcgcagccggaaaccctttttttcctcgcgtcagcgcgccccgtctggggggggggggtgagcactccgtgatcaagtaccccctgtccactgggtgcgtcctgacgaagattgaggacaactgcatcctggtcttcatcgtggacgcgcgcgccgactagaaggcgatcaacaaggctgtggcccgcctgtactacatccaatcctttatgatgatcatcctgatgcggtccgatggtgaggaagaaggcgtacgtgcggctgaccgccgactacgatgcgctgtatggggccaacaagattggcgttatctaaagcgcccggctgaagcttagtgggtccggaaccttcaatcccacccttggc

SEQ ID NO: 6647 - DNA, 623 bp, Chlorella sorokiniana
  unsure (1)..(623): unsure at all n locations; Clone ID: LIB3602-093-Q6-K6-F10
gcaacggcgacggccgcatcacactggatgagctgcgagagggcctgacccgccacaacaagctggctgactcagagattgagcagatcctgaaggacatagacgtggacggaaatggcgtgatcgattacgaggagttcctggcatccacggtcaacctgtcgctgctggagcgggaggaggtgtgcatgaaggcctttgccaagctggacaaggatggcagcggcacgctgaccgctgatgaggtggctgaagccatgggctgcacggggcgcatgtctgagcaggaggtgcgggatgtgatagcgcggtacgatgtcaacggtgatggcatcatcgattattcagagttcctcaagatgctgcgggagaacgactcgcagctacggcgtgcgagcgactctctgaagcgcggggagctggcgctggacccggtggtgcacaagtagcggcaatttgactgcagcaaagcggtgctcaagcagccgaagcaaggggagctggcgccgcacaagtagcagtgtaacaggcacatagatggcagttgagtggtgcacgtgcagcggcaaagcggcgcagacccgccggccctgcagccgncccggctttttgcttctcgccat

SEQ ID NO: 6648 - DNA, 263 bp, Chlorella sorokiniana
  Clone ID: LIB3602-093-Q6-K6-F4
cgcttcgccatcaagaagaactggccaagaaggccaagcagaaccggcccatccctccttggatccggttccgcaccaacaacaccatccgctacaacgccaagcgccgccactggcgccgcaccaagctgggcatctaagcgcctcccacgaggagcagctgacggcagcagccccggcacggcaggcagtgcgctggccgcgcttgcaaggcagcccgtcagtggcatgatgacagcttaagcttgtaacgatggcctagc

SEQ ID NO: 6649 - DNA, 619 bp, Chlorella sorokiniana
  unsure (1)..(619): unsure at all n locations; Clone ID: LIB3602-093-Q6-K6-F7
ggggggccaagtcgcttcccgcgcctcagatgcctattcgtttggcgttgtcatgtgggagctgctgatgctgcgcgtgccgtgggccagcatcactgctgcgcagcagtggcaggtgcgtgctgcgcctctctttgtcacaatccctgctattggggccctgtcagactgcggccaggcggcagtattgggaattcaaacccctgcttgcaattgctgtaccatgcaccgcctgcctgctgccggtgcgccactccccacacacttcatgtggattttttcttcaaatcacccgcaatagtgctgcacgctgcacgcagctgccgcttgaagtgatggcgggcaagcgacctgaggtgccagcgcatgaggacgtcccgggggatgacacgccagcgttctctggtctagactcgtacgttcatctgatgcagcgctgctgggcccaggagcccgccgagcgcccaaccttcgaccaaatcgtgccagagctgcgcagcatcctgcagcagcacacggcagcccaccagccttcaaaagcgcagccgtcgtccgcgccgtcatcgtccactccaggcacgccgccagccctgccgncagcaccagcggtggcggcggg

SEQ ID NO: 6650 - DNA, 274 bp, Chlorella sorokiniana
  unsure (1)..(274): unsure at all n locations; Clone ID: LIB3602-093-Q6-K6-F9
caataacatgccaatgcccacgccctcgcggttgaccaacttcaccttgctcctaactcaatgcatcttttgcccaacacctccttgaccgccctgccgctgtcctgcgccctgcaacctggaccccagtccctcacttcttttcctaaaccttccaaaatcagtttacaacagtgctttcactgtctaacacattagatgctgccagtctgcattcgagtttcttctgggcagccgcatacttgccgtatctgccttgcaagcagagctgntg

SEQ ID NO: 6651 - DNA, 611 bp, Chlorella sorokiniana
  unsure (1)..(611): unsure at all n locations; Clone ID: LIB3602-093-Q6-K6-G1
cgaccccaanaccgctttatgagtgggcgccaagaagcgggcgtggacttcttccctcactgcgtccacctggtcagctgggagaaggagaacatctcgtccgaggcgctggaggcggcccgcatcgcggccaacaagtacatggtgaagaacgcgggcaaggacgccttccacctgcgcgtccgtgtgcaccccttccacgtgctgcgcatcaacaagatgctttcgtgcgccggcgcagacaggctgcagacaggcatgcgcggtgcgttcggcaagccatttggtgtgtgcgcgcgcgtgggcatcggtcagatcctgctgtccatccgctgcaaggacacgcacgctgcggtggcggaggaggccctccgtcgtgccaagttcaagttccccgggcgccagaagatcgtggctagcaggaactggggcttcactccctacctgcgcgacgattacttggagtggaagcgtgagggccgccttgtgaacgacggtgtgaatgccaagctgcttggcaaccacggcccgctggacgcacgggagcccggccagattttcgagggtcctgcccgtctgtggcgtgtgccggtgcatgcctaacatgttga

SEQ ID NO: 6652 - DNA, 253 bp, Chlorella sorokiniana
  unsure (1)..(253): unsure at all n locations; Clone ID: LIB3602-093-Q6-K6-G10
gcgggggcgggtggaggctgagnaanacgccgagcagaaggaggacgaggagctgcgcaaggcgcgcgagtgggacgagttcaaggacgacaacccgcgcggctggggcaactcaaagctgcggccctgcgcttgaaccgcgcgccaaccaggcgtgcccgctgcctctcgaccccttgatgcttacagcaattgtgtatgcaacagtgtacagcttcgtgtaagcatgggaaaaaaaaaaaaaaannaaana

SEQ ID NO: 6653 - DNA, 606 bp, Chlorella sorokiniana
  Clone ID: LIB3602-093-Q6-K6-G11
gcgttcgggcggcatgccctccagccccagcgcaacgcacagcgggcgcagcagcggcggcagcagcaccaccagcagcggcggcggcggcggcggcggcggcgggccactgcggggtgtgacggtggggggccgggcgctgcaccagcagagctttggcggcggcgctggtggcggcggcggcggccaggactggcaggcagggctgttgcagtacagcgatggggactccccgggaggtcgcgcgcagcagccggcggcagcggcgcacgcggatgaagggcaggagctggcgcctcagcagcacattgcggcgcacgtggctggggagcaggaggacgaagtgatagaaatccacagcgatccaggcggcgacgcgccgagcggcggcggtgcctgaggcaacaggaggcagcttgccgttcagcggctggcacctcctgagctcttttataggctgagctcccatttagcttggcaccctcagtactctaggcggcagaggcgcggtatgcgctcatgccctgttcagtccttctgatctgtcgcagcctgatgtctgccactgtatatcacgtgtacctacctgtgcaacggttacgcatg

SEQ ID NO: 6654 - DNA, 611 bp, Chlorella sorokiniana
  Clone ID: LIB3602-093-Q6-K6-G3
ggtcgacccagcgttcgcaagctctcactgagcagcagcaagcagggctccagcacggcgtccttcaagcgccgtcggcagccgccaagccgctgcaggcagccttccgccgcgtgccgctgcgcattcaggcggcgagcatcggcggtgtggaggtgcccaaccagaagtacgtggagttcagcctgcagtgcatgggggggcatcggccacaccaccgccaaggccatcctggcgtccacgggcgtggagaacaagcgcacgaaggacctgactgaggaggagctgaccacgctgcgtgaggaggtggacaagtacaccgtggagggcgacctgcgccgcttcaactcgctcaacatcaagcggctgaaagagattggctgctaccgcggccgccgccactacaacaacctgccggtccgtggccagaggacgaagaacaacgcgcgcacaaggaagggaaaggctaagcccattgccggcaagaagattggccgcaagtgagcgcggcgctgcggcggcgcatgacgcgtcacgggtgcatgccattgcagccccctccagccccactccctgcctttcttcctttcatgtgttcagtttagcatgca

SEQ ID NO: 6655 - DNA, 354 bp, Chlorella sorokiniana
  unsure (1)..(354): unsure at all n locations; Clone ID: LIB3602-093-Q6-K6-G4
tccgactgctgtacctgnaaaacgtgctgctcaagtttctggatgcgcatgtcagcggacggacgcaggagtgcgaggttctgctgccggcggtggccacgctgctgcgtgcatcgccaggggaataccgcctgctgcgagaccacctgcaacgtggtggggccagctggctgcccgccctgccctcgttgatgggcggggcttcgtgacaacgagtgcgcaggcaggcaatgtgtggctgcactaggcaggcttctgagggcagcgtgacggcagttcacggcgccacagccggcagggttgtgccggcagagagccctgttctgatttttgcgacatgtaacagacagggtt

SEQ ID NO: 6656 - DNA, 444 bp, Chlorella sorokiniana
  Clone ID: LIB3602-093-Q6-K6-G5
gcggcggcaagcaggcggcggcggcggcggcaagggcaacagcgcgcccaatatcgcagcttcgctgtccaggtggactgatgacacgctgtccaacgatggctggctcatgatgtcctttgtcgtcgccttgtttgcagcccccggcgtggcgctgctcctgtggccctatgtggtggacacggctgtgagcattgctgacgtggccaaggcctgcaagcccagcaaggcgggcgcctgaaaccctccctgcatggcagcaactgcagctacaacggcggcagcgcctggcttgtaatgcaccaatgcaccacacctgctctacactgcgcgctggcagggtaaacccatcagtggctgtgccttcattactcgtttcacatttttcagtaccccttcgctacccgtcactcctttcatttataccgggtaaaacactgctgc

SEQ ID NO: 6657 - DNA, 547 bp, Chlorella sorokiniana
  unsure (1)..(547): unsure at all n locations; Clone ID: LIB3602-093-Q6-K6-G6
gcggtggctgtggcctatgtgaagcgcggcaagggcgagatccgcctcacggcgccccgctggagctggtgcagcccgagacgctgcgctggaaggcgtttgagccggtgctgctgctgggcaagcagcgcttctccaacgtggacatccgcatccgcgtcaagggcggcggccaggtgtcccagatctacgccatccgccaggccatctccaagggcattgtggccttctaccagaagtacgtggatgagcagagcaagaacgagatcaaggacatcctgctgacctacgaccgcacgctgctggtggccgaccctcgccgctgcgagcccaagaagttcggtggccacggtgcccgcgcgcggtttcagaaatcttacaggtgaaggctgccccgtgggacggttgggcgcctctggaggcttcttctgcgccgctggcgtggcggcagcggcgtctgcggcctaggcagctgccctggagcagcatgccctcagcgaaagcaccatgagtacaccttgcgtgtgtaacaaaacgccacacnnna

SEQ ID NO: 6658 - DNA, 614 bp, Chlorella sorokiniana
  unsure (1)..(614): unsure at all n locations; Clone ID: LIB3602-093-Q6-K6-G7
ccctggctggncagccgcccgccgccgtgctggacggccccgccctgcaggggagggaggcggtgagcccagcaaggcccagattgctgccgagcggcgcgcccgcctgcaggccaccgctgcacagctgaccatgacgctggcaggtgtgatggacggagcggcaccgggcgccgacgctgcactgaaggcactgatgggcggcatgtgagcgacagcccggccctcgccttttgagacagaggccttggcgcccttgcgaatcccaagtgtacctacaccctacagcagcagtgcagcaccgccccaagctgctgaggcgactatgcggttgccagccacgaggccacaccgcccattccagtgtcgcaagtttgctgccgcggctctgctgtaccatgcccccttgatgccagctcagcagatgctggcctttgttttcataacccagccaactgcccgatgatactccacggcggcccttgccatctttcagccatgcaaaccggccgccttttcttctgcccgtgcgttgcttccgtgcatttgaatacttccctccaatcgccgccttcctcagcgtccgttctgtactgatcagcgcctttcacccc

SEQ ID NO: 6659 - DNA, 340 bp, Chlorella sorokiniana
  Clone ID: LIB3602-093-Q6-K6-G8
tgctctctatgctagcgcgctgggcgcctcgactcgttcacggtatacacccctgactcgtgaatgcttcacctgccccatctgtacatcacaccctacatcccctttgcgctgaaactaaatagtggtaaaaaaaaaaaaaaaaaaaaaaaaaaaaaaaaaaaaaaaaaaaaaaaaaaaaaaaaaaaaaatgcggtctcggggggggcgggccttaaagaaaaaccaaattctaaatccccgggcatagggaaattaaaagtttttttttaagggaacccaaaatttaattccttggccgcgcgttttaaaaaacgaaaaccttgggaaaaccccgggt

SEQ ID NO: 6660 - DNA, 594 bp, Chlorella sorokiniana
  Clone ID: LIB3602-093-Q6-K6-G9
gcgccacacgctgtacaaggcgtacctgggcgactttgcggcgtttgtgcaccgcgtgggcggcaccacgggggaggtcatgggcgagctgctgtcgttcgaggccgaccgccgcgcgctcaacatcacccttaacagcatcggcacggagctgacgcgggacgaccgccgcaagctgtacgccaactttggcctgctgtacccgcacggacaggccgagctggcggtggcggaggactttgaccagatacgggcggccatggagaagtgcccgccttaccaggccatcttctcgcggctggggctgggagagacgcagatgctggacaagattctgtacgaggaggaggtgcggcagctgatcaacacgtacgatcagcagttccactacggcgtcttctacgcctacatgcggctgcgggagcaggagatccgcaacatcatgtggattgcggagtgcgtggcgcacgatcagaagagccgtgtgcaggacggcattgtgtttaccttctagatagtcccgcacagtggctgccacattcacccagctgcgccgctcagatacaacagctgcagttttgcttgtgctcgccg

SEQ ID NO: 6661 - DNA, 459 bp, Chlorella sorokiniana
  Clone ID: LIB3602-093-Q6-K6-H1
ggttgttggggtggctgaaccaaccgatgcattggaagcaaagcaaacaagaggggcgggaaggaaaaagaactgaacggggcgcggggggagaggaagggggggggcggcgggacggacggcatgcaggcaaaaccaaaaaaaacctgagcgaggtgggaaagaaaaaaaaaaggaaaataaaaaaaacaaaaattcaggctagagggaggataggccagcccggcccccgccaggcaagggaaggggcaggcttccctaaggcaaaccaggcaggctgcgcaccctggtgccgggcgtgccctgccctacccgaggcagcgggctggccaggtgagggggcgggcacaggaaatacaaccccgaccttcgctaaatggggggcaaccacaaaaaccaccacttgggctagggggcagcccgccccgccggcctggcagccctgaatttaatcaatcc

SEQ ID NO: 6662 - DNA, 615 bp, Chlorella sorokiniana
  unsure (1)..(615): unsure at all n locations; Clone ID: LIB3602-093-Q6-K6-H10
gcgttcggcagcgacaacttcacgcacattctgcgtgtgctngacaccaacgtcgatggcaagcagaagatcatgtatgcgctgaccgccatcaagggtatcggccgccgcttctccaacatctgctgcaagaaggctgaggtggacctgagcaagcgcgccggcgagctgtctgccgaggagctggagagcatcatgaccatcgtggccaacccccgcgcctacaagatccccgactggttcctgaacaggcagaaggacgtcaaggacggccgctactcgcaggtgacctcctccgcgctggacaccaagctgcgcgatgacctggagcgcctgaagaagatccggaaccaccgcggtctgcgccactactggggcctcaccgtgcgcggccagcacaccaagaccactggccgccgcggcaagaccgtgggcgtggctggcaagaagaagtaagcagcttcttgcgggcgcggcctgcggcacgggcggatgctggcggctgggtgacggcggctggcgccgcccgcgcagcaaccccactggcagagccggcggcagcaggtggatccacaccagtcgttgcagtgctgccgtcgtgtaatgcacccttcg

SEQ ID NO: 6663 - DNA, 163 bp, Chlorella sorokiniana
  Clone ID: LIB3602-093-Q6-K6-H11
aaaaaaaaaaaaaaaaaaaaaacaaagggggggggggggggaaaaaaaaaaaaaaaaaaaaaaaaaaaaaaaaaaaaaaaaaaaaaaaaaaaaaaaaaaaaaaaaaaaaaaaaaaaaaaaaaaaaaaaaaaaaaaaaaaaaagaaaaaaaaatttattttttt

SEQ ID NO: 6664 - DNA, 398 bp, Chlorella sorokiniana
  unsure (1)..(398): unsure at all n locations; Clone ID: LIB3602-093-Q6-K6-H2
gcgtttcggcagcacaggnaaactgccagggctgcgcgccatccacccgcacgtggccatcttcacttcggtgcccatcgccggaggtgctgcccgttgtgccggccccggacagctggctggcgcatggcaggcggcagcaatccttggcggcgggcgaaccaagggcggcgtgcgcacacgagagctcatccaggcctccctgacggctgcggttgagaaggcgaggatggagctgcgggcgcagcgggcggagagaggcgtggtgctcgtgtgcggcagcctgcatgcagtgggggcggcgctggcgcagctgccgctggtgccctgctgagactctcagtgactgctttgcagtgcgtgttgtacgaaacgcacagttggcattgccttctagt

SEQ ID NO: 6665 - DNA, 447 bp, Chlorella sorokiniana
  unsure (1)..(447): unsure at all n locations; Clone ID: LIB3602-093-Q6-K6-H3
tgggcgnnttggtgggccttgtcgacagccaccgctgtggnccgcaggatgccaattggcactggncctgctgcacttgcntcccgcctgacgcactgttgctgcactcctgaccctctgtgccatacccctgtgccctctgttccgcctgttttccaagcttttcagctcctgctagccgctgccgctctcgctcgctcccattttcagctgctcccgcccctgcccctgtcccccaattttgcaacggttcagccgggtgcaccggcttgcttgcactgtgttcgcaccgcattcattcaggtggcccgcgctcttcggcccagcagccacctgtaactcccctgctgtgaaaaaaaaaaaaaaaaaaaaaaaaaaaaaaaaaaaaaaaaaaaaaaaaaaaaaaaaaaaaaaaaagggtggaacgatttaaaagganccaagctt

SEQ ID NO: 6666 - DNA, 592 bp, Chlorella sorokiniana
  unsure (1)..(592): unsure at all n locations; Clone ID: LIB3602-093-Q6-K6-H4
nagtcatcttcatgcccacccacaccgccgccaacaagtgcgagggcaaggtgttcaccgtggagatgcaccacaagcgcgtggacaaggccggccccggcgacaacgtgggcatgaacatcaagggcctggacaagggcaacatgccccgcaccggcgatgtcatgatcctcaagtcggacgccaccctgaagcaggtgaaggacttcaccgcccagatccagaccctggacatccccggcgaggtcaaggcgggctactcccccatcggctttgtgcgctgcggccgctccgcctgccgcatcaccggcatcgactggaaggtgggcaaggagaccggcggcaagaagctggaggccccccacagcctcaaggccaacgagatggctgaggtggtgttcgagccctgccagccgctggtggtggactccttcaagaactgcgagggcctgtcccgcatcgccttcctggacggcaacaccgccgtcatgctcggcaaggtggtgaagaccacccccaaggcgtgagcaccctccgcctgagacggcggtgcacgccggtgcggcagcggcggcttaagctgcctgctgcc

SEQ ID NO: 6667 - DNA, 583 bp, Chlorella sorokiniana
  Clone ID: LIB3602-093-Q6-K6-H5
gctggcaagggggaagcgaccagcagcaggccgtgcccttgttgcccgccgcagctgcgcaggcggcggcagaggaggcagaggttgcagctgctgctgctgccgcggccgcagcagcggccagggccccagtatcgtctggaacctggtggcagcgggctgtgagagggcacgacctgtcgccagcagcagagcaggcgtctttgcaagcggtgcccgtggctgtggccaccccaccagccctgcgcccggccgcaagcaggagcctcccggatctgtcgccgctcacggcagcccccttggtagaaggcccggccgtgcagcaggaggcagctgggcggcagcagctggggcaggagcagggggagcagctggaggggcagcagcagcaggcggggccggcatccaggcccggttcggctgccgccatgtccagcggcagctcagcaggcacagcgggcacagcagggcgctctcccagccgcagcaagcagccgcgctggcgcctgctgccccgcccgcccagccggcctagcgagtaagcgccctttgcgacttgtggttggtggtcagcattggcatt

SEQ ID NO: 6668 - DNA, 547 bp, Chlorella sorokiniana
  unsure (1)..(547): unsure at all n locations; Clone ID: LIB3602-093-Q6-K6-H6
gctctactggggctgacagctgctgcgagcacggcctacttgcgtctgtantgtccaagtccaaggactgaccgtggaacgtgaggtgtgctcaccagcgattgctaccgcacaaataagagaccacctactgctaggtaccctccttgtgccactacttggtgtggaccgagtgccccgtgctactccacctggacctgcaacctgggaacctagtcttgactgctctggctgtcttggagttgttacgctggagcacagtgagcaccacacacgctaggctgtatgtggtacatgccatacgctttcgactgtgccgatggatgttgggactgcaacatccacccatgtcctaccatacacgcacaatgacataaagcacatgggcaaggcacctttcctgatggaacatgcaccctacctgacgaacggcttgcctgacactagctactaaaaccgtcagaagcaaactgctattcctttgaggtagcccctttacatgacttgcagtcctctgatgcaccatgcgttaattacggcctacggg

SEQ ID NO: 6669 - DNA, 499 bp, Chlorella sorokiniana
  unsure (1)..(499): unsure at all n locations; Clone ID: LIB3602-093-Q6-K6-H8
cgcagtcgcgggtagtgaccgccatnacgctgctngaaaagccacctgttcaggtaccagggccacgtcagcgctgcgctggtgctgggcggcgtggacttccgcggcccccacctcttcacggtgtacccgcacggctccaccgactcgctgccctactgcaccatgggctctggctcgctcaacgccatggcggtgttcgaggcggggtacaaggacgacctaaccaaggaggaggcgatggagctggtggcccgcgctatcaggtcgggcgtgttcaacgacctgggttcgggcagcaacgtggacctgtgcgtgatcaccaaggagggcgtggagtacaagcgcaactacgagctgctgcagggcaagacgtaccagcggcagttcccgcagcggtttgcggcggggtcagtgccggtggtgcgggagcgcgtgtacgacattcggcgggtggtcactgtcaccgagggcgagccgatggagatggagagctagc

SEQ ID NO: 6670 - DNA, 595 bp, Chlorella sorokiniana
  Clone ID: LIB3602-093-Q6-K6-H9
gtgccctccctgctgtgccacgtgttgtgctgtgatattgatacactgcgccggtcagtctgtattactatgcccctgccctcccatgcaccgcatgggagcgggtggcttgctcagcgggcagcgcctgcctcccttggaggtcccttcaaagaaggtccaggcctgccgcctcagtccgtactaaacaaatcagcacctttcgttcgtcgcctttcattccgctctcgtcctccctgcctacctggtctgcctgccctagtgtgctggactggtagcaccctttgctgccccagcgtctgtctgcctctgcctccttgtgctttcatgcagctttcatgcagcttatgcagcatcgttgcggctgtcccgctgttcacccctttgcctcacctccctgcccctgctagctccttcccctccccacaaatgaacccaacagctggcctcgctcggctgtgaaccagcccctaaccttgccagaacaattcgttcgcttcgcgcgcttgcaccctccatactgcaccgctgccgaccctccttcccttccctcctgcacaccaaaacaccctgctgcacacgtccctgccactcg

SEQ ID NO: 6671 - DNA, 412 bp, Chlorella sorokiniana
  Clone ID: LIB3602-094-Q6-K6-A1
ccgtccgaaaaaaaaaaaaaaaaaaaaaaaaaagggagaaaaaaaaaaaaaaaaaaaaaaaaaaaaaaaaaaaaaaaaaaaaaaaaaaaaagggcggccaaatttaaaggataccaaggttccgtccgctttcttgaaaccaactttccttctcgctttggggccccactaatttcatttctcttggcctgtcgttttacttcggttggcccgtgggaaacccctgcgcgttccccaccttttttggccttgccgctcttccccctttggcccgttggcttccctcccccttgggcccgccccgttcgcctttcccaacgtttgcccggcctgattggccaatgggacgccccctgtggcggggcattagccccccccgttgtggggttttctccccggggggccggtccct

SEQ ID NO: 6672 - DNA, 552 bp, Chlorella sorokiniana
  Clone ID: LIB3602-094-Q6-K6-A10
gctctgtagcaacttgtcccagcgcctgcaattctctcttgaccccattcctttgttcagcccgcttgtttgtgctgctcctatcttcctcgcatcacatgggtgtactgtcccacgtgtcatggcccatgcccatgacaccttgcctatccgcccgagcgcactaaccctgctatccagacacgcacattgatggtggactgaacgtacctgcaccatggccatttgtccaagccttgacccatattaaataacgctgcgcccatggtgcgatttttcctcacccaacattctagtgcctccacattcgaaggccgcacgttctcttcacaatgagacctgccattcatgactgtatctacgcctcacctaacgccaagccactgctcgctccttttggatcgcccatttgggtgggtggctgtccatgttccaatcttacccacctgggactgatcctcattacgtccgctatatggctgcacctactcaagtgcattccacttgtgctcacaaccgttgtattgtgacaaccgtgacattaccgacttc

SEQ ID NO: 6673 - DNA, 565 bp, Chlorella sorokiniana
  Clone ID: LIB3602-094-Q6-K6-A11
tcgtaccgagcgctggcggcggcccgcatcgcggccaacaagtacatggtgaagaacgcgggcgaaggacgccttccacctgcgcgtccgtgtgcaccccttccacgtgctgcgcatcaacaagatgctttcgtgcgccggcgcagacaggctgcagacaggcatgcgcggtgcgttcggcaagccatttggtgtgtgcgcgcgcgtgggcatcggtcagatcctgctgtccatccgctgcaaggacacgcacgctgcggtggcggaggaggccctccgtcgtgccaagttcaagttccccgggcgccagaagatcgtggctagcaggaactggggcttcactccctacctgcgcgacgattacttggagtggaagcgtgagggccgccttgtgaacgacggtgtgaatgccaagctgtttggcaaccacggcccgctggacgcacgggagcccggccagattttcgagggtcctgcccgtctgtggcgtgtgccggtgcatgcctaacatgttgcttgggttctaaagatgtaacgaacatctgagcaagacaaagaaaacaac

SEQ ID NO: 6674 - DNA, 528 bp, Chlorella sorokiniana
  Clone ID: LIB3602-094-Q6-K6-A12
gcccttgcttgccggctcagttttccagacttgcctgtaccttttcttaagttaccagctctggcattcgccagccatcaccctgcgggccttctgccactagtgcgtcggtcattccccgccccaccctctctccttccagctttcttccaggcgcaaccttccgactcggtgacatttggggttggtgtgccccccgctgtgttctgctctgcttccactgcaataaatgcaaaccaaagttgcctcgttcctgctccatccctgaccactgcgaactgaccctcctgacagtgttttagcgccttgttacgtgtgcgtgtgacctgccaactctccatctagcgtgatgtcgcctgtgctgtgtaccggcccctgccaatcagggccgcctgagccaccaacgcacaccaccccaccccaaccaaatccgcccctcacaacagcgggccatcttgagacacagatggtttaacattctttccccacatgaagccatgcatgcgtatgtgtaaccgagccaacatg

SEQ ID NO: 6675 - DNA, 578 bp, Chlorella sorokiniana
  Clone ID: LIB3602-094-Q6-K6-A2
gtcctttggcgtcatctgctggggggactacaacggcgtgcgcgcgtatttgggcctgcgcatgcccaacatcgtctacctggtcacctctggcaagcacaggctcacgctgccccctggcgtgcccaagggctatgcggagctgatggagtcgtgcctcaaccgcgaccacacccagggccccagctttgaggacctgattgtcaccatcgacgccctgctggtggagggagaggagccttctatggctcccccgccgcccctcatctcagccggcccctgcaaggaggccgctgacatggcggcggcagccgccgcgctgaacagcgtagcccccgtcacccccaactaaccagctaggttgggttacgcttgaccggtgggactgcgcctgccgcgccgcggcgtgcaaccgcgtgcatgagcgcaacccgtgcgctgggcgcaacgcatgcgctgggcgctgcgtgtttctaatacccaagcctcaaacacaacaccccggggattgcctggcacaactgctatgacactgtaccgctagctaacccaaccctgagcccacccccgactgctgc

SEQ ID NO: 6676 - DNA, 436 bp, Chlorella sorokiniana
  unsure (1)..(436): unsure at all n locations; Clone ID: LIB3602-094-Q6-K6-A3
gtgcgcgcgtgtgcagctggtcagaggaacggcagcaanatgcggcgttcgtgcccaacgacggctgcctcaacttcatcgaggagaacgacgaggtgctcatcgccggtttcggccgccgcggccacgccgtgggtgatatccccggcgtgcgcttcaaggttggtgaaggtgtccggtgtgtccctgctggcgctcttccccggcacgatggagaagccccggaactaaacggcccgcgcccagcagcggcagcagcggcgcgcctcggcaacggggggcgccgtgtccgccagcactgcacctgcctggcggcggcttgggagggcgtgcagcgcatgcagcgtgcaccgccgcggcccttccgatagtgtcggaccccacaaccaggtccctctgctcccactactggtgtaacacgcaattgccttttttt

SEQ ID NO: 6677 - DNA, 622 bp, Chlorella sorokiniana
  unsure (1)..(622): unsure at all n locations; Clone ID: LIB3602-094-Q6-K6-A4
gcggnanaggggcactacgacgagcccgacttttgtgccaggctggactccctgctggcgacactggatggtactgctgagggcgggcggtacactgatgtcgccatgcgggaggtgtggcgggcccgttgcgaaggggcgcccctggggacaggcagccggatggagcaacacaagcgaggcagcacaacggtcggtcctgctggcggccaggtatgcttcagacctgggcgaggcggcacggctgtccatggccaacatccgcctgacgcaccaggacgcgaccacagcaggacaatccatgtcctttgcgatcatcgttgctgctctgatccaggggcacaggcttgatgatgagctggcatgggggcggctgtggccggcggccaaggcaggggagctgccaattgcgcacgcagtgctggctggagaggagcggcaggtgccggttgactccacagccaccatgccgcggccagacagcctgttccaggcggcctgagtggcggcggcggcgcgcagctctcggataaccatccccccagagctcgtgggtctggtgtatggcatgggatgcaacctggactttttgctgccggcatctttctacctggccactctg

SEQ ID NO: 6678 - DNA, 568 bp, Chlorella sorokiniana
  unsure (1)..(568): unsure at all n locations; Clone ID: LIB3602-094-Q6-K6-A5
cccgatccttcagtagtaccgcaccaatcgagtcatccacgcccgctgggccatgcttggcgccctgggctgcatcttccccgaggtgctgngagaagtacagcggcgtgcagttcggcgaggccgtgtggttcaaggctggcgcccagatcttcgctgacggcggcctgaactacctgggcaactccggcctggtgcacgcccagtccatcgtggccaccctggtggtccaggtgttgctgatgggcgccgtggagatctaccgcgccaacggcgagggccccaacggcttcggcgagggccaggacaccctgtaccccggcggcgccttcgaccccctgggcctggctgacgaccccgacaccttggctgagctgaaggtcaaggagatcaagaacggccgcctggccatgctctccatgctgggcttcttcgtgcaggccatcgtgaccggcaagggccccctggacaaccttctgcagcatttggaggagcccgngggagttcaacttctacgccctgtacgccaactccctggcgtaagcagcttgtttggagcacctgcggc

SEQ ID NO: 6679 - DNA, 583 bp, Chlorella sorokiniana
  Clone ID: LIB3602-094-Q6-K6-A6
tctcgccaccggccggcggccaacccccaatgctcaaccgcttcatttactttggcctggagacagcctcgcactactgctggtgcccggccaaccaggacggcaagctggtcgccatttttgacctggcaggcctgcagctgaagaacctggacgccataggcctgcgggcctccttccacatgctggctgagcactttccagagcgcatcgccaccgtgtggatgctggatgcgccggccatctttggaggcctgtggaaggtcgtctcgcccttcattgacagcaacacgcgaaagaagatcaagtttgtgagcggccgagcggggcaggcggcactgctggaggagctgggacctgagatactgccagtcgagtatggcggccgggccgccgagattccaatcgagctggccgtgcagcagctgcccggctggcggcagcgccagctggcagcacagcaggcgcagcagggcggtgcagcgggcgcagcggcggtgcaggcagctggggagcgcgaagcggcagcagaggagggcagcgaaaggaaggcggctgctgagctggcaggaccgctgcacct

SEQ ID NO: 6680 - DNA, 625 bp, Chlorella sorokiniana
  unsure (1)..(625): unsure at all n locations; Clone ID: LIB3602-094-Q6-K6-A7
gggctatgcggngctgatggagtcgtgcctcaaccgcgaccacacccagcgccccagctttgaggacctgattgtcaccatcgacgccctgctggtggagggagaggagccttctatggctcccccgccgcccctcatctcagccggcccctgcaaggaggccgctgacatggcggcggcagccgccgcgctgaacagcgtagcccccgtcacccccaactaaccagctaggttgggttacgcttgaccggtgggactgcgcctgccgcgccgcggcgtgcaaccgcgtgcatgagcgcaacccgtgcgctgggcgcaacgcatgcgctgggcgctgcgtgtttctaatacccaagcctcaaacacaacaccccggggattgcctggcacaactgctatgacactgtaccgctagctaacccaaccctgagcccacccccgactgctgcgccccttccaatcatgtgtgcgccctccacagccgtgcgtctctgccccttggtctgtccctgcttgcactggttctgtgctcccgattttcattacccccgagcgagagtccccgtgtgtgtgtgccagtgattcctgcctgtgccttgaaagtgtgttgctatgctcttgacct

SEQ ID NO: 6681 - DNA, 583 bp, Chlorella sorokiniana
  Clone ID: LIB3602-094-Q6-K6-A8
agcaggcagcagctttgcagcagtccagctacgattccgatgaagaggagctgcgggtgctgggcggcagcggtgctggcaacggcaacggaatgcaccaatccagcagcatggctgatgtcgtgtccaacctggggcagcccctgctggtccggccggccgtctgctcccatgcgctggacgcgaagctggcagaggcggcgcaggcggagcacatctgtctggacaatcacattctgaactgctcaaacctgctgaacgaagtggcgtaccagaacgtgcggcggcagtgcagcgaggtgtgggacgccatggagcgcttcattgagcagccggcagccagggagctgctgatggtgcaggccatgtacagcctggagaccggggaggtggactggtttggcctgctggcctgaggctctgttcaacagagcagagcacggacggcagtttccatcttctttgcagttcgcaaccttccttgtcccaataccttccatcgcattctggcccagcccgttccaccgccaccccacccgcatttgtaccagtaggcacaacaggcagcagcaatgttgccgaa

SEQ ID NO: 6682 - DNA, 515 bp, Chlorella sorokiniana
  unsure (1)..(515): unsure at all n locations; Clone ID: LIB3602-094-Q6-K6-A9
ccaaactgccccccaacgcacgtccgccgctgcaccacctgccgccccctcacccgcacccatcttccacccgccacctttcctgccgctcaccgccgcacatcctacctcccacacctcactccatgtccacccttcacccgcgcttcacacagcggctgctgccatgcaaagctgctgccaaacccatccatcatgctcgcacacccactcacccacacgtccaacgtatccagacccattttcaaggcccgactgtacagtgcctttttgcgtccttatgccgatctggtaccaggacttaatgtgtaacaaatggtatgtnaaaaaaaaaaaaaaaaaaaaaaaaaaaaaaaaaaaaaaaaaaaaaaaaaaaaaaaaaaaaaaaaaaaaaaaaaaaaaaaaaaaaaaaaaaaaaaaaaaggggggggcccgttttaggagaacccaagtttacgtccggggtgcttgccaacggtaataagtctttttttgggtgccccctaaaattaaat

SEQ ID NO: 6683 - DNA, 65 bp, Chlorella sorokiniana
  unsure (1)..(65): unsure at all n locations; Clone ID: LIB3602-094-Q6-K6-B1
tgacgcgcctttgtagtcggcgctttaagtcggggcggggttgtggnggctacttttttttttgt

SEQ ID NO: 6684 - DNA, 599 bp, Chlorella sorokiniana
  unsure (1)..(599): unsure at all n locations; Clone ID: LIB3602-094-Q6-K6-B10
cccggngtcgacccacgccgtccgnaaaaaaaaaaaaaaaaaaaaaaaaaaaaaaaaaaaaaaaaaaaaaaaaaaaaaaaaaaaaaaaaaaaaaaaaaaaaaaaaaaaaaaaaaaaaaaaaaaaaaaaaaaaaaaaaaaaaaaaaaaaaaaaaaggggggccctttttaagggtcccaattttccttccccttccttccaactttttattttttttttggggccccctaatttaatttcctggcccgggtttttacaccgtgggacttggaaaacccttgggtttcccaattttattccctttgaaaaaattccccttttccccggttgggttattaccaaaaagcccccccccgttcccctttccaaaaatttgcccaccttaattggcaattggacccccccttttaccggccttttaaccccgggggttttggggtttccccccaggtgaccctttacttttgcaagccccttagcccccgtttttttcgtttttttcctttcttttttccccactttcgcggtttttccccgtaaagttttaaatgggggcctccttttagggttccatttaagggttttacggcccttgacccc

SEQ ID NO: 6685 - DNA, 560 bp, Chlorella sorokiniana
  Clone ID: LIB3602-094-Q6-K6-B11
gcgacaccttgggccgactgcacaccaactggagcgctgaggaccaactggccaagtgcaagcgcagcatcaccatagcggctgcccgaggcaccgcacgaggtgctgctggtgctggacggaaccacgggcctcaacatgctcaaccaggcgaaggagttcaacgagacactgcagctgagcgggatcatcctcaccaagctcgacggcacggcgcgcggcggctccgtggcgtccgcggttgactagctgggcgtgcccgtcaagtttgtgggcgtgggccaaggtatctaggacctgcagccctttgaccccctcagctttgtggacgcgctcttacaggagggcggtgctgctgctgaaatcgaggatgcgtaagcaaggcagtgccacagtacgctcagcaagggcaggcatggctggacaatctgtactcttgtgccctgcacattcgcactgaactggatcctgcccgttcgacttatgcacattagcattttagttgtgacaacaccacagttttgtttttgcacacacaatgtcaactaacatacatggac

SEQ ID NO: 6686 - DNA, 567 bp, Chlorella sorokiniana
  unsure (1)..(567): unsure at all n locations; Clone ID: LIB3602-094-Q6-K6-B12
aaccgcccgccggggggggggcgcctctcacctggaaccctgcccgcggcctctcgctaggaactcgctgaaggggccaggctgagcagccatggcggtgccgccgttccacctagcgtttcctgttcttttattgaggcggcacgggactttgacatgggggagctaggctgcagcgaggggcgcagcgcggagcgctggggggacttcaacatgtttggccaccagatcgtggcgcacctagtcgacggctactcggcagcagccagccacaacaaggtggatggagaccccgtgcctgtgccccactatggcgtggccctcggggtgcagcagttccagcagctggccgagcgctgccggcagcagggcgtggcgtttgtgatagagccgcacctgcggttccagggccagccgggggagcagtggaccatgttctttctcgatccttncggcaatgcgctggagttcaaggcgatgaccaacccggacaacctgttcgccaagtaccgggtcgactgaggaggcagtacgaacacacgcactgcagttgcgatgcccaacttg

SEQ ID NO: 6687 - DNA, 607 bp, Chlorella sorokiniana
  unsure (1)..(607): unsure at all n locations; Clone ID: LIB3602-094-Q6-K6-B2
ccgggtcgacccagcgttcggnaaaaaaaaaaaaaaaaaaaaaaaaaaaaaaaaaaaaaaaaaaaaaaaaaaaaaaaaaaaaaaaaaaaaaaaaaaaaaaaaaaaaaaaaaaaaaaaaaaaaaaaaaaaaaaaaggggcggcccgttttaaaaggatccaagtttacttccccgtgcttgcaacgtaatactttttttttggggccccctaatttaatttcattgcccgggttttaaaaacgtcggaattggaaaaaccctggctttcccaaatttaatccctttgaaaaaaatccccttttccccagttgggttaatagcaaaaaggcccgacccaatcgcctttccaaaaatttgcccaccctaattggcaaatggaaccccccttttaccggccctttaaccccgggggttgtggggtttccccccagggtaacctttacatttgccagccccttagcccccgttcttttcgtttttttcctttcttttttccccactttccccgtttttccccgtaaagttttaaatggggggctccttttagggttccaattaagtgttttacggcccctggccccaaaaaaatttgtttagggggatggtt

SEQ ID NO: 6688 - DNA, 603 bp, Chlorella sorokiniana
  Clone ID: LIB3602-094-Q6-K6-B3
caaccaatcgcctccctttcatgcgagacttgctctccctgcactctccctttgccctgcccccccaagccaaactcaagcacctgctcaagccaacccacatccgccctttaccaagcaaacccaaacttctcatgcaacagttttctcccccttttcattccagtaccagtgtttgactaccaatcgtcctcccaagcggggctgccaagcctttttgtccagctgccggctgtcatgagctgttgccgctgctttcccccatccggcttgcgctgcaccgccgatcctctctactcccttctctgtacagctggctcagcagatgtaacatgcgagcttgaaaaaaaaaaaaaaaaaaaaaaaaaaaaaaaaaaaaaaaaaaaaaaaaaaaaaaaaaaaaaaaaaaaaaaaaaaaaaaaaaaaaaaaaaaaaaaaaaaaaaaaaaaaaaaaaaaaaaaaggggggggccccttttaaaagacccaaattttataaccccgtggtttggaaaaaaaaaattttttttttgggggccccccaaaattaaatttccggggccccggtgtttttaaaacggggggggcgggggaaaaacccggg

SEQ ID NO: 6689 - DNA, 606 bp, Chlorella sorokiniana
  Clone ID: LIB3602-094-Q6-K6-B4
tccgtgtagcctgaaaaaaaaaaaaaaaaaaaaaaaataaaaaaaaaaaaaaaaaaaaaaaaaaaaaaaaaaaaaaaaaaaaaaaaaaaaaaaaaaaaaaaaaaaaaaaaataaaaaaaaaaaaaaaaaaaaaaaaaaaaaatgggggggcccgttttaggggttcaaattttacttccccgtgcttgcaaggttatattttttttttggggccccttaatttaatttaatgggccggtttttaaaaacgtggggatgggaaaaaccttgggtttcccaaatttattcgctttgaaaaaattccccttttcgccggttgggttattaggaaaagggcccgcccggttcgcttttccaaaaatttgcccaccttaattggaaattggacccccccttttaggggccttttaaccgggggggttgtggggtttccccccagggtgccctttatttttgcaaggcccttagcccccgttcttttggtttttttcctttcttttctgcccactttggcggtttttcccggtaaatttttaaatggggggctccttttggggtcccattttagtgtttaagggcccttcaccccaaaaaaatttttttggg

SEQ ID NO: 6690 - DNA, 597 bp, Chlorella sorokiniana
  Clone ID: LIB3602-094-Q6-K6-B5
gcaggccaccttcgccggctctaagctgcagcttggcgcgcgcgtcagccgcaagagcgtgaaccccaccgtggtggcctccagcggcaagaagatcgacatcagcaagcagggcctgaactccatccagaatgagaccgtgaagctcaacctgatgggcaagtccaagaccatggagagcaaggactgggtggacccccagggccgcaagggcaagggctacggcgtgtaccgcttcgccaacaagtacggcgccaacgtggacggctacagcccgatctacacccccgacacctggtccgagtctggcgactcttacaagctgggcaccaagggccttattgcttgggccggcctgattgtggtgctgctgggcgtgggcatcaacctggtgatctccacctctgccctgggccagtaaatggcgacgccccccgcgtcggcagcagcagcagcagccagcagcattcccttgcagctaccccccgagaagacaaaccctcaccctaccctagctggcggcgtcaccatgcgccgctcccttgctttccgtttcactgtccctttcgttcctgcgttcgtttagtggaggaggcc

SEQ ID NO: 6691 - DNA, 594 bp, Chlorella sorokiniana
  Clone ID: LIB3602-094-Q6-K6-B6
gcggtgagggctgacatagcgccaccatgcggcagctcatttcttctcggaccctcgtcatccccgatgaggtgtctatcgaggtcaaggcgcggcgggttcgcgtgaagggccctcgcggcacgctgcagcgcgacttcaagcacctggctgtggacatgttcctgactgaggaggagggcaagaaggtgctcaaggtggactgccactttggcaagcgcaagagcctggcgtccatccgcacctgcacctcgcacgtgcagaacatgatcaccggcgtgaccaagggctacgagtacaagatgcgcctggtgtacgcccatttccccatcaacatcaacatcgagaacaagggcggcaaggtggagatccgcaacttcctgggcgagaagattgtgcgcgtggtggacatgctgccgggcgtgacctgcgagcgcagcgccgccgtcaaggacgagctgatcctgaccggcaacgacatcgagctggtgtcccgcagcagcgcgctgatccaccagaagtgcctggtgaagaagaaggacatccgcaagttcctggacggcatctacctcagcgagcgcggcaccctggtga

SEQ ID NO: 6692 - DNA, 59 bp, Chlorella sorokiniana; identical to SEQ ID NO: 4918
  Clone ID: LIB3602-094-Q6-K6-B7

SEQ ID NO: 6693 - DNA, 294 bp, Chlorella sorokiniana
  unsure (1)..(294): unsure at all n locations; Clone ID: LIB3602-094-Q6-K6-B8
cccggngtcgacccacgccgtccgcggacgcaacacaccggttgatatcagctcgcaagaccttgaaccctgcgctgcgcagccggcctccccagcctgcggctgctgcgcctggaccttcacaggcagcggccccctcgtgctctgttcgatgctgtggttcggccggaccgtaccaaccccctgcatgtttgtatcgaatagcgtttgacagttgtgaagtgcgttggcagccctgcctcgcaatccaggttctgtgcctctttgtctctgcagctgtaaatcacctccttc

SEQ ID NO: 6694 - DNA, 548 bp, Chlorella sorokiniana
  unsure (1)..(548): unsure at all n locations; Clone ID: LIB3602-094-Q6-K6-B9
ggcgggcgcggtgcagcaggagtgcgggctgcccatcacccccgaaggtttgtgaccagcaccctcaatttgggctgaccgaggtggtgtaccagtgggcgcgcggcacgcccttcaaggacatttgcgggctgacagacgtgatggagggcagcattgtgcgggccatggtgcgcctggacgagacgtgcagggagttccgggatgctgcgcgcgtcatgggcaacactgccctgttccagcagatggagaaggcgtcttccgccatcaagcgggacgtcatcttcgccgcctccctctacgtggcgtgagtgtggcagaaagtgcagcggcagctttgagcattagcagaggtatcctgttcatgtctgctgcggaacattgtaaaacaacttangaaaaaaaaaaaaaaaaaaaaaaaaaaaaaaaaaaaaaaaaaaaaaaaaaaaaaaaaaaaaaaaaaaaaaaaaaaaaaaaaaaaggggcgccccgttttaaaaggatccaagtttacttcacccgtgcttgcaaacgtaataagttttttt

SEQ ID NO: 6695 - DNA, 494 bp, Chlorella sorokiniana
  Clone ID: LIB3602-094-Q6-K6-C10
gctgcgccggcggcaggccgcctaccgcaccaccattgagcaggacgatgccatcattgctgacccaaccaccggcccccgtcagaccgtggccgcgcgtctgctgcgcatcgaaaagcagatcctggcgggcgccacccaggcggcgctggcgctgccgggggcggcagaggccgccgctctggggccgctgcctacggcagtcaatatggagtaacagtcttccttgctgtggtgcgtaaatcatgcacaaggtttggttacctgtcagtgccgcgtgccgcgtcacccgatgtgcgggctttagcctgcccaacccagccccgtttcctttttcactgccgggctccccctgcccaccggttttattgtatcatagcagcatgcgcccttttcccccggctagtatttcgtggcgctatcaggactctcaccccacagaacccccaccccttctctgcgataccctcaacacttgcaacgcactgcagctt

SEQ ID NO: 6696 - DNA, 603 bp, Chlorella sorokiniana
  unsure (1)..(603): unsure at all n locations; Clone ID: LIB3602-094-Q6-K6-C11
gcgttcgggnaaaacggttccagnagctgtgcgagccgcgagcggcgctcatggccgagattgccacgctgcgcaaggaggtggaggcgtgaggcacccgggactgcgcctgggcatgtgcaccacctgaggccgcactgccggtgctgtcgagcggctagctggcatggcagcaagcgcaaggcagcacggtcacgaggctgggaacgcctcgtggccgtcggctacattgccgcctgcgcttggcggcacccatgtgtggcagcccgccatgcagctgcctagcgctcatgcccagcaacgtccaggcagcacagccatcccctcgcagcagcagcagcagccgcacttgcaccccgcatgactgatcatcagacgccccaaactaacgacccatgcagcgccgggggtggttgcccccgcggcgggcccgcggcgcgactgtctgtcgcccacgcttgaccttgcttgctccctctctgctccctccctacttactgcttcaaacctgacactcgctctttgattccccggactgcctcctcctttgctccctcctgcttgctcgctccgtttgcacggcgccggcgcgactgccagtgc

SEQ ID NO: 6697 - DNA, 313 bp, Chlorella sorokiniana
  Clone ID: LIB3602-094-Q6-K6-C12
caatcggcgcccccggccgcgcgccccccgtctgtgcgcggccggccgccctgcactgcaccgcctttgatgcaattgcccagcgaatttcgctgcccgcacacacacacacttgcgtttcatgcctgatgagtagaacgccctcgagccacgcacccacctaccaccccaaccacaccaacctgcaccccggtttctcatctttgattcagccgcccggttgaggctgccggaggctccatccccttcttttccgctttcattcgtcactacactttgagttttgcggctgtggttgtaacgcaattattgt

SEQ ID NO: 6698 - DNA, 510 bp, Chlorella sorokiniana
  Clone ID: LIB3602-094-Q6-K6-C2
tgcccgccgctgccagccaggccatcttcaagaggcgttccgggttctgcgccccggtggcgcgctggcggtcatggagatgaaccccgcctcccccatcttccagcgcatcttcagcaaccccttcccttacgtcgccttcaagtccacggagccgtggcttctgggaggacctttccctggacatgcccagcgcgatgaccgccgccggcttcctgccgccccgccagctcgagaactcgccacgccacaaaaccgtggttgcagtcaagccgcagcagtgagtatgaatgcggcggctgtgtgccatcaagccatgccatttttgctggagaacacagcgggcattgagcctgctctagctgcaacggctctgtcctgagctgaccctatgaactgtttgatgtgccttgatatccttctcgcttgctgcattccagcacttgtgatttatatcccatgccatagctgctcaagcaaccctgacctgctgtaatgctactgtacgcc

SEQ ID NO: 6699 - DNA, 303 bp, Chlorella sorokiniana
  Clone ID: LIB3602-094-Q6-K6-C3
ccggttcgacccagcgtttgctcgcatgtcggcacctccagcggggcttgggccgtgccatcagccagtgcagcaggtggcggcggtcacgaagcagagtgaccagatggcttttccttctgaccaactcacacccaccatcacactgtgtttgtttatctgccatcatatcattatttgtgccctgcccacagactggcctgtttgttgcttcgcttgctccagtatctgcattttgctagcctcaatgtatggatttatacagttacatccaaagtgaaatgacaatgcattggtgcactc

SEQ ID NO: 6700 - DNA, 591 bp, Chlorella sorokiniana
  unsure (1)..(591): unsure at all n locations; Clone ID: LIB3602-094-Q6-K6-C4
naaaaaaaaaaaaaaaaaaaaaaaaaaaaaaaaaaaaaaaaaaaaaaaaaaaaaaaaaaaaaaaaaaaaaaaaaaaaaaaaaaaaaaaaaaaaaaaaaaaaaaaaaaaaaaaaagggggggccgtttttgagagagaaccaaagtttacttccccgttccttgcgaacgtattagctttttttttggggccccctaaattaatttaatgggccgggtttttaaaacgtggggactggaaaaaccctggggttcccaaatttaatcgctttgaagaaaatccccttttccccagttgggttaataccaaaaaggccccccccaatcgcctttccaaaaagttgcccaccctaaatggaaaatggaaccccccttttagcggccctttaagcccggggggtgtggggtttacccccagggggaccgttacatttgccaggcccttagcccccgttcttttcgtttttttcctttcttttttcgccactttcgccggttttccccgtaaagttttaaatggggggctccttttagggttccaattaagggttttacggaccctggccccaaaaaaacttgtttggggggatggt

SEQ ID NO: 6701 - DNA, 190 bp, Chlorella sorokiniana; identical to SEQ ID NO: 6464
  Clone ID: LIB3602-094-Q6-K6-C5

SEQ ID NO: 6702 - DNA, 499 bp, Chlorella sorokiniana
  unsure (1)..(499): unsure at all n locations; Clone ID: LIB3602-094-Q6-K6-C6
acctggcggnagcgggcagcagcttcgacaaggtggtcaagaccaccatcctgctggcggacatgagcgactttgccgcggtgaacgccgtctacggcaagtacttccctgagaacccgcctgcccgcgccacctttgccgtcaagggcctgccgctgggtgccaaggtggagattgaggccaccgccctgctgtgagcagccatctgctagcaagttgtgtgtgccagtggaaccctgctctgaatccccatgcctcccaaggtcctgccgctttcacctgttgcccctccgctctgagctgcacatttcagcacacccatctgttcattgtttcatgagagtccgaacggcacacatcaaaccgcaacacttggctatcacaccgtgtaaagaaacatgagcaaaaaaaaaaaaaaaaaaaaaaaaaaaaaaaaaaaaaaaaaaaaaaaaaaaaaaaaaaaaaaaaaaaaaaaaaaaaaggggcggcccgttttaaa

SEQ ID NO: 6703 - DNA, 493 bp, Chlorella sorokiniana
  Clone ID: LIB3602-094-Q6-K6-C8
gttctagatcgcgagggccgccctttttttttttttttttttttttttttttttaccaacaaatgttacaaccgacgcccgcacatggccaatgagagcaaacaagagcgtagagcagggatgtggcagcctccagctgattaggacggttgcgtgtctaattgctgcgctgctgctcccccagcagccgcaggatgtacaggaacaggttgataacgtccagatacaaattgacactagcccagatataatcgtccaaatcaaatcgtgcgatgagcagctgggtgtcaaagaccaggtaggcactgaacaggaaggctcccagcagcgcaaaaatggtgctgccgatgggtccaggcgggaagaagagctggatgacggaccagacaatcatggccagcaggcagccccacagcattggacccatgaacgagaagtccacgcctcgcttggtggcatggaacgcgtacgccgtcctagttctagatcgcga

SEQ ID NO: 6704 - DNA, 626 bp, Chlorella sorokiniana
  Clone ID: LIB3602-094-Q6-K6-D1
gtcgacccagcgtccgcagcaggcggctgcttctacggcgtggtggtgcagtcgcggcggcacacgggcgtggagggctgctacctgctcaagacggtgcgcaacgtgagccccggcaccggctgctgctgcacccacttctccctcacccgcatcacctcgggagagcacctggagaagcagtttgtgcagtcctggctgctgtgagccgctgctgtagcctgctggcgggcaacggcagctgcgctgcgcggctctgccgccccgcctgccgccccggcccccggccaaccaccgcccccaccaccacctgtcacccgccctgtatggcctctagactttgagcgtgagctgcccctgccacttctgcttcctgtgtgcaccccgcgtgtggcatgatgatactatggatcccctccaaatcgacttgcgaatgcactcgccccgctcttgttcactgccaccccttggcagcatccccttgtaccctcctccctgttctccggtttgaaccaactcgcctgcctgtgccaaacgaccccctcggccggatctttattcgcccccacctttttgcgctcactttcctgcccccaacctgttgctgctgcctctctgcctgccga

SEQ ID NO: 6705 - DNA, 608 bp, Chlorella sorokiniana
  unsure (1)..(608): unsure at all n locations; Clone ID: LIB3602-094-Q6-K6-D10
cgcagnaaaacgagtgggaggaggtgccttgcccagnagggaagggcagccgcaagatgctgggctacgctcagtaagctgcaggggctgccgctcccctggccccctttcctctgcattagcttagcaagccagccccaagctgcgcccgcaataaagcgcccgtccgtgccgcgatctgtgcgcgcccccagtcagcgccaacccctttcagttcctttttcctttcatttgcccccgccccaatgcatgcctgtctcctcctcgctacccgcccacccgcccacagagtgctgctctgactagtttgctgctgctacggggtaggccccgcgcagccctctgctagctttgctcgtatccgccccgccatcactgattccctgcctgcactgctatcaagcaacgcgcccctgctgccactgctgtatagcgtcgcacctctgccatcccctgatccctgcccatgcctccactccccatccgatactgccatacgtgacgtgttactgccacagcaccatgcatactgcccatcccctacctctattctgttcatcctgcaccctttctgcatccaccctttcgttccatccctctatacttgc

SEQ ID NO: 6706 - DNA, 535 bp, Chlorella sorokiniana
  unsure (1)..(535): unsure at all n locations; Clone ID: LIB3602-094-Q6-K6-D11
gcgtttctatacatcaccctcgnagtggagtcttcgggcaccatcgagatgtgaaggccaagatccaggacaaggagggcatcccccctgaccagcagcgcctgatcttcgccggcaagcagctggaggacggccgcaccctggcagactacaacatccagaaggagtcgacgctgcacctggtgctgcgcctgcgcggcggcatcattgagccgtccctgcagatcctggcccgcaagtacaaccaggacaagatgatctgccgcaagtgctacgcccgcctgcacccccgcgctgtgaactgccgcaagaagaagtgcggccacacctcgcagctgcgccccaagaagaaactcaagtaaactactcgcttcggcacgagcggaagcggcatgagcggcagcaaccgctgccccccccccgccccgccagccgggatgccatgacagcaccggctgctcagctgctgatgtgctgcatgtcaattgctgctgcggaaatgtaacggtggtagcgataaanaaaaaaanaaaaa

SEQ ID NO: 6707 - DNA, 567 bp, Chlorella sorokiniana
  unsure (1)..(567): unsure at all n locations; Clone ID: LIB3602-094-Q6-K6-D12
cgcgncatctggnaatcggaggcgtgcgtggtgcccactccaagagtgagcccgccgcagcagcaggagttgacgtgcggccctgcaccgcacgttgcacaggaatgatggcacgccgcccatgcccgggcactgcccctaaatgctcgatacccaaatgcctcctcttagcgccaattccttcagctgtagcctgcctgcgctccctgtgtccgcctctgcccagcgcggctatgcaacactgcagccctgccctgcctcccaagctacctcttcttttttgcgtcttgttttgccaacggacgaccgaattggacatactcgtgcaggacagttgcctgctgtaacattgactgttaaaaaaaaaaaaaaaaaaaaaaaaaaaaaaaaaaaaaaaaaaaaaaaaaaaaaaaaaaaaaaaaaaaaaaaaaaaaaaaaaaaaaaaaaaaaaaaaaaaaaaaaaaaaaaaaaaaanaggggggggccgttttaaaaggaacaaagatttaacttacccgtgcttgcaaaagcaaaaggttttttttataagggccacccaaaataaaa

SEQ ID NO: 6708 - DNA, 591 bp, Chlorella sorokiniana
  unsure (1)..(591): unsure at all n locations; Clone ID: LIB3602-094-Q6-K6-D3
tattgntacactgcgccggtcagtctgtattactatgcccctgccctcccatgcaccgcatgggagcgggtggcttgctcagcgggcagcgcctgcctcccttggaggtcccttcaaagaaggtccaggcctgccgcctcagtccgtactaaacaaatcagcacctttcgttcgtcgcctttcattccgctctcgtcctccctgcctacctggtctgcctgccctagtgtgctggactggtagcaccctttgctgccccagcgtctgtctgcctctgcctccttgtgctttcatgcagctttcatgcagcttatgcagcatcgttgcggctgtcccgctgttcacccctttgcctcacctccctgcccctgctagctccttcccctccccacaaatgaacccaacagctggcctcgctcggctgtgaaccagcccctaaccttgccagaacaattcgttcgcttcgcgcgcttgcaccctccatactgcaccgctgccgaccctccttcccttccctcctgcacaccaaaacaccctgctgcacacgtccctgccactcgcccggcgattgatcccgggagggttgaaccc

SEQ ID NO: 6709 - DNA, 575 bp, Chlorella sorokiniana
  unsure (1)..(575): unsure at all n locations; Clone ID: LIB3602-094-Q6-K6-D4
cggaagatgcgagcgtgtgaaagaagggtgtgtaagaccaggtgccggccatcaataacgccgctgaggaagctgatgggcaagctggagcacagggcctgaagacctgcccccatccatcagtagctgtagctgggctgagtgtctcgggtggactgtgtgttctgcggtatcctgcagaagggcatgagtccaggacggcncaggctgggncttgcgaccaagcgtgctgacatcgagtgatacatagactgatctgaacaacctggcacgacagcgcggatgacatccccggtgacatgaacaccatacatgtgcagttggagggatacaggcacgaccagaaggcgatgatgcgtaaccagtgtatgcaacaatagctgggagccatgcaggacaagctggatgccatcttacgacgagcgcacggtgcatgcacgaatgtttgcacaccagccgtaagagcagcagccttacgcacgccaggatgcgagctctgacctgctcaatcactgctaccaactgcaatacaatgtgatggcctacctaacatcgggacaggcaaaagcctcaca

SEQ ID NO: 6710 - DNA, 582 bp, Chlorella sorokiniana
  Clone ID: LIB3602-094-Q6-K6-D5
ttcaccccaaccgccacatggctctgtccctcaagtgaccgccactttcggcggcaagaccaaggctggcaccaaggccggcaccaagaagggcacccagaagcaggccaccaccaagaaggctgcccccaagaagtcttcctctggcgccagccagtggtacggccccgaccgccccaagttcctgggcccctacagcacgaacttcgtgcccagctacctgaccggcgagttccccggtgactacggctgggatacctctggcctgtcggccgaccccgccaccttcgctcgctaccgcgagatcgaggtcatccatgcccgctgggccatgctcggcgccctgggctgcgtcgtgcccgagctgctggacggcaccaaccacattgcctggttcaaggccggcgccgagatcttcggcgacgacggcatccagtacctgggcatccccggcctgatcaacgccaagtccatcgtggcgaccctgatcgtgcaggtggtgctcatgtcgtatgttgagggctaccgcgtcaacggcggcccggccggcaccggcctggacgctgtctaccccggcggcaa

SEQ ID NO: 6711 - DNA, 616 bp, Chlorella sorokiniana
  unsure (1)..(616): unsure at all n locations; Clone ID: LIB3602-094-Q6-K6-D7
ccggnaagaactgccgtccatcctggtgngacgagacacggtgcagaagatcagcttgctcacgcccaacatcggtatgacgtacagcggcatgggccccgactcgcgcgtcctggtgcgcaaggcgcgcaagagcgggcaggtgtactatcggcagtaccacgagcagataccggtggcgcagctgtgcagagagacggcggcggtgatgcaggagttcacacaaagcggcggcgtgcggccttttggcgtgagcctgctgatggctgggtatgacgaccacggcccgcagctgtaccagatcgacccctccggctcctattttgcctggaaggccagcgccatcggcaagaacatggtgaacgccaagacgttcctggagaagcggtacgccgaggacatggagctggaggacgcgatccacaccgcgctgctcacgctcaaggagggcttcgagggcgagctgtcgggggacaacatcgaggtggctgtggtgggtgaggaccgcaagttccgggtgctcacccccgctgaggtggccgactacctggccgaggtggagtgagggaggcgccttcctgcctctgcaaagagcancagcggcggcggcggcggt

SEQ ID NO: 6712 - DNA, 476 bp, Chlorella sorokiniana
  unsure (1)..(476): unsure at all n locations; Clone ID: LIB3602-094-Q6-K6-D8
tccgnaaaaaaaaaaaaaaaaaaaaaaaaaaaaaaaaaaaaaaaaagggcggacagatctaagaggcgtgccaagtttacgggcacccagcctgacgacgcgcatagcatgtcgaatagatggcaccttaatattagaagtcacctgaactgtcaatttaactaggcgcggcgactgacaaaaaccctgactgggaaaaaccttgaatggcactcgaactaaatccccttgtagcacaattggcgttttaccagatagggcaataccgaacaggccttcccaacatcggcctacccaagatggggacatggcacaatgccctaatgggacgcatcatgcacgggggcattagtggctacgcgcgatggtgaccactccaattgcgaccgctatactggccagtgctttagctccctttcctttctttttcttcacttccttcggcttcacccgccaaggtttaaatcgggaacttc

SEQ ID NO: 6713 - DNA, 637 bp, Chlorella sorokiniana
  Clone ID: LIB3602-094-Q6-K6-E1
gtcgacccagcgttcggtcaaggcggcgcgcgcatgacgggctggtacgacattgcagacctggaccgcattggcagcgagtcgcaggacgcggcggccatgcatgagagccggaggtacattgatgagctggtggcagaaggaggtggcgggcggcatccccgccagctccatcgttgtgggcggcttcagccagggcggagccatggcgctgatgagcttgcggtcaaagcacaagctagcgggcatcatcgggctcagctgctacctgccgctgttggaggagaagcccattgtgtctggtgcgtcgcaagcatctttgtgcactgccacgctttccatgcacgctgcttttgccgtgatccattggcactggtaagcaggccatggcctgtgctactgaagaggtcgcagcagtgcgcctggccgcctgtgcagaggagaacaagggcacgccggtgctgatgtgccacggcgactgcgaccaggtggtcaacttcgactttggcaagcgcagctacgaggagctgaagaaggcgggcgtgaatgtcgacttcaagacgtaccaatacatgggccacgaggcgtgcggcgaggagctgatggagatgcgcgactttctttagtcatgcttctc

SEQ ID NO: 6714 - DNA, 642 bp, Chlorella sorokiniana
  unsure (1)..(642): unsure at all n locations; Clone ID: LIB3602-094-Q6-K6-E10
ggnaggcacgttagtgctgagagcgccgtgaaaatggtgttcgtgcggacggaccgcacgcatgtgctggacctcgcgtccacggccaccgtggccgatgtgaaggccgccatcgaggcgcgccagggcatccccgccgaggagcagcgggtgatgttcggcggcaagcagctggaggacggcctgtccctggaggcttgcggcatcagcgatgactcccagatgtacatcctgatgcgcctgctgggtggtgccaagaagcgcaagaagaagacctacaccaagccgaagaagcagaagcacaagcacaagaaggtgaagctgcgggtgctcaagttctacaaggtggacgacagcggcaaggtgcagcgcctgcgcaaggtgtgcccccagtgcggccccggcatcttcatggccacccacttcaaccgcgtgtactgcggcaagtgccacctgacgtacgtgtacgacaaggagggccagaccgcctaagcgccccgctcccccctgcggatgcacgcttagcagcagcacacgcggcgggtgcgcccggcatgccggcacaccagccacggagcggcggggcgtccctggcagcggcgcagcgcctgcaagcccttctgttgtgttctgtgccgctgt

SEQ ID NO: 6715 - DNA, 532 bp, Chlorella sorokiniana
  Clone ID: LIB3602-094-Q6-K6-E11
caggcccgacgtccgaccaccaaggctcggtgcagcggccgcagcgtgggcatgcagccccccaaaatctttacttaccatgctgacccgaatgaatctgtggcaggccgcgtgctgccctgccccctgtatcctaatgccccctaggcatgtatgcaccctctcctccttcagtccttgcatctgtgctcccgccgcaactcaggacgttttccagagcactgctccccttcccattctgctgagttggccagatcgatgccttgtaacacctgccgtgaaaaaaaaaaaaaaaaaaaaaaaaaaaaaaaacaaataaaaaagaaccaaaataaaagaaaaaaaaaatgcaaaaaaaataaataatactataaagaaacctgggtggacttccttggggatccaatttaaacgccggggacctggcaaaaccctggctttacacaactgaaccgaaaagcaaaacattcgcctttcgtcaacaaacgtaataacgaaaaaaaccgtaccgaatccccacttaaaaacagtt

SEQ ID NO: 6716 - DNA, 443 bp, Chlorella sorokiniana
  unsure (1)..(443): unsure at all n locations; Clone ID: LIB3602-094-Q6-K6-E12
gccccttcagctcaaggcgtgcccgtgcgccgcgtgaanaggcgtcgtcatcgcccctccacaagtggacgtgagcggcgtggacatctccaagtttgacgacgcctacttcaagagcgccgagaagaagcagaagaagcagagcgaggagggcttctttgccgagaagaccgagaaggcgccgctgcccgctgagtatgtggccaaccagaaggcggtggacgcggcgctgctgggcaagctgagcgacgagctcaagggctacctgtccagccgcttcacgctgcgctctggcgaccggccgcacctcatgaagttctgaggtgccagcctggcagctcgctcgcccagcaagcggcccggcggccgggcttgcttggcggcagcccgcgcggcacgcggcgggtccgtagtgcacggcccgacgagcgctgtgcggcggc

SEQ ID NO: 6717 - DNA, 564 bp, Chlorella sorokiniana
  unsure (1)..(564): unsure at all n locations; Clone ID: LIB3602-094-Q6-K6-E2
ttcgcacgccctggcagcacggcacagcacagccaatttgagaggcgctgaggggcccggccgcaggccagctgacgcagccagtcacgtgggcgggccatgctggcctgcccaacccagcccacagctcgattcggtgaggagcaccaacgttgatgccgaaaatgccatattaagccaggggggcgcagaacgcgcatgccctgcgccccgcagcttgccagcacaaccagaaagcctgttttccctctttgtttctgctgtttcactacacgcacgctgtatctgcgctgtacactcctttgcgcccgttctctctgcatgcaattttcagttggaagcatgaggcacccctgttgttccacctttgtttgtttctgccgcccgggtgcgctgctgtacccctgagcatgccggccgcccttgctgcccgcctgccccttccctcggccctcagcccgcccattcacgcgacattcttcatctcaaagctcatcctcaccgctctgcaagcattataattgtaagctctggcatggcaaannaaaaaaaaaaaaanaaaaa

SEQ ID NO: 6718 - DNA, 412 bp, Chlorella sorokiniana
  unsure (1)..(412): unsure at all n locations; Clone ID: LIB3602-094-Q6-K6-E4
cccggngtcgacccaacgcgtccgnaaaaaaaaaaaaaaaaaaaaaaaaaaaaaaaaaaaaaaaaaaaaaaaaaaaaaaaaaaaaaaaaaaggggcgggccgcttcttaaaggaatccaagctttacgtaacgcgtggcatgccgaacgtcataagcttctttcttatagtggtccacctaaaattacatattcactgggcccgtccggttttacaaacgttcgggaactggggaaaaaacctctggcggttcacccaactttatatcgccttggcagcaacaatcccccttttccgccagcttggcgtaaatagccgaagaaggccccgccaccgaatcccgccctttccacaacaagttgcggcaagcctgaaagtggcgaatgggaacgcgcccttgtacgcggcccat

SEQ ID NO: 6719 - DNA, 472 bp, Chlorella sorokiniana
  unsure (1)..(472): unsure at all n locations; Clone ID: LIB3602-094-Q6-K6-E5
gctgactgcggcgccagcagcagcggcaggcatgtgctgaacgcacggagcgcaagcgcgtcccgcgcacagccgccaccgaagcggcctgccagcgtcgacggcagcgaggcagcaaggcgcggcctggcatgctagcagcgcgtactgcgcgccacggcgctagcagccgcaccctggaacagcatcagcagtaattcagcagcccacctgcatgccgaacgctccgctgtaacaggttctcaggaaaaaaaaaaaaaaaaaaaaaaaaaaaaaaaaaaaaaaaaaaaaaaaaaaaaaaaaaaagaaaaaaaattataaaaagataaaatgttaagtaatattaaagtgtaaagtgttaatgtattttaaattgaaaggtaaatttatttaattggagggaatttaaaaagattggagtgggaaaattatgaagttggaaaattaaaaaantttggagtaaatacatttt

SEQ ID NO: 6720 - DNA, 595 bp, Chlorella sorokiniana
  unsure (1)..(595): unsure at all n locations; Clone ID: LIB3602-094-Q6-K6-E6
gcaacccacagnaggtgtgaagctgcgcctgtcgctgcggcaggatgaccctgcctatggatggaaggcagccgccctggcccgccacggctttgcgtccagccagctcttcccgctgcgcatgcaagcagccccttgggagctcctgcattatgcggggctgtgtgtggcggaggtgggcaacgctgcagaggcagacagcttggccgagcggctgttcaagcaggacgatttcccgcgcgagctgcagccggcggcgctggaggctgtcatccgagcgtgccaggcagcgcagcaggcctatgcttcctctctggatgcggatcgagcagagctcgaggcattggagcagcagcagcaggtggcgggcagcagcagcagcggtgcagcacccagcaggcgacagcaggtgctgcaggtcctggtttacgagcggcaggtgctggccaggaccattttcatccttcagcaggagctgcgggatgtgaagcgcctggcgcgcacatgaacatggcgtgcacatggcggcgcacatgcttggcacatgcttggccagcccagacgcttgcacagcggcaaagtgcatgtttgccgc

SEQ ID NO: 6721 - DNA, 477 bp, Chlorella sorokiniana
  Clone ID: LIB3602-094-Q6-K6-E7
cccgtgcacggcgaccccttcatcggcatgctggtgacccccgtgacctcctgccgcgccataggttggtacctgtccaacctccccgcctaccgcaccggcgaggcccccctgctgcgccgagtgggagattggcctggcgcacgggttcctgctggtgggccccttcataaagctgggccccctgcgcaacctgtagaacagtgcctgacattgcgggctgcataaaccgggccgccactgtgctgatcctgaccctgtgcctgggtgcctacggatcgaacacagtgtccaggagagggccctgaggcggtcgtgaagaccctgcctggtgcaaggattccccgccaccccttacaccctgctgagggctggaacaagttgaccgacggcttcgctggagacggacagagcacagcggcctggcgctacctatgcacccacatcctgctctactacaggtgaacaccctattcc

SEQ ID NO: 6722 - DNA, 481 bp, Chlorella sorokiniana
  unsure (1)..(481): unsure at all n locations; Clone ID: LIB3602-094-Q6-K6-E8
gnggtggcgggccaggcgccctatgagaagcgcatcatggagctgctcaaggttggcaaggacaagcgcgccctngaggtggccaagcggaagctgggcacccacaagcgcggcaaggccaagcgcgaggagatggccggcctgctgcgcaagatggctgccaaggcgcacaagtaaacgcctgtgcagccacagcagcagcccgcagcagcccccatcgtggcggggcggccgcagcgcagcacggcacagcacagcgcagcgcgcggcgccgcccgccttgcagcagcagcatcactgtgcctagcacctgtgatgtaacacagcacccggcaaaaaaaaaaaaaaaaaaaaaaaaaaaaaaaaaaaaaaaaaaaaaaaaaaaaaaaaaaaaaaaaaaaaaaggggcggcgggttttaaaaggaatccaagctttacgttaccgcggtgctatgcaacagtaataagttttttttatag

SEQ ID NO: 6723 - DNA, 605 bp, Chlorella sorokiniana
  Clone ID: LIB3602-094-Q6-K6-E9
aattaaccatactttggctgccaagtcggattggggcggcgccgcagcatgcatgttggcgtgttgcccccgcccgtctgccggaccccatctgcctcagaacatcaccaaccccgcttgcatctcatcacctcaatgcagctgtatcctagcgggtgctccttcaaaggaggctggcacccgcggtccaagctgcttgaagccttcacaaaaattcggtcaagctgactggttcaattgcaaatgacttggcgaaacagcacacacccaacagtgcgcacatgcagttaacttgtcgtgcatgcatgaaggcgccatctaagcttttggccaagtgaccgccacatgaacacgtgctgcacaaggttcactagctccctgttttagtccaccctttttgtttgtgaccctttgcttgtgcagagcaggaggcggccaagcggcggcgggaggcggagcgcgtggcaaagtcgaaaccatagcgtcaaccaagcatgccgcgggcacggggtcggcagcgggcacggggtcggcagcgggccccatcgcccgggtgcggtgtagcctgtaggccgcttgcagatagcagcatggcagcggcactc

SEQ ID NO: 6724 - DNA, 462 bp, Chlorella sorokiniana
  unsure (1)..(462): unsure at all n locations; Clone ID: LIB3602-094-Q6-K6-F1
gtcgacccagcgttcgctgagcccganagcgcgtctacgcggggggcgccttcgaccccagggcatgtccaagggcaacctggatgagctgaagaccaaggagatcaagaacggccgcctcgccatgctggcctgcctgggcttcgctgcccagcacgccgccaccggcgccagcccgctggaggccctggcctcccacctggccaaccccatggccgtcaactttgccaccaacggcgtgtccctgcccctggcgtaagcgcgcccctgtagcagcggctgtacccagcacccgcggcgcagcagcagacgggtggcccatgtgtggcctggttgtctctgcccgtgtggtctgtacgcttgttcctatttgctctcctgttgctcattgctcctgactgcacacccgagaagattcaatcaacccctcctgctaccatgtggctgtaaggcacagctnac

SEQ ID NO: 6725 - DNA, 539 bp, Chlorella sorokiniana
  Clone ID: LIB3602-094-Q6-K6-F10
ccacgcccgtccgaaaaaaaaaaaaaaaaaaaaaaaaaaaaaaaaaaaaaaaaaaaaaaaaaagaaaaaaaaaaaaaaaaaaaaaaaaaaaaaaaaagcaacgaacatacaaaaggaggggcggcttgttttgggggacccaggtttacttccccggccttgcggtgtacaacgtttttattgggggagaaccctgagtttaacccactgggccgcgggttaaaacccggtggggccttggaaaaaacctggggtttcacccaattaagcctgcttgcgcagcgcatttccctttctgacaaggctgggcttaaataggcgaagtgggcacgcacccttgtcgccctttcttaacagttgggccacccgtaattggttaaagggcatccccccccgttgcgggttgctttaagccctggcgggggggtgcgtttcacttgcatagggacctttcccctggccatcgccttatcgccccttccttttgttaattgccggccctttttcgcgcgtttgctttagttttccccggaaccttt

SEQ ID NO: 6726 - DNA, 601 bp, Chlorella sorokiniana
  unsure (1)..(601): unsure at all n locations; Clone ID: LIB3602-094-Q6-K6-F11
ggctcctgtgacgcgctgcagccatgaggcgcatcttcggcaccaanaaggccacggagccgccgcccacgatggatcaggcggtggacaagctgaacacgcgcggcgacggcctggatgagaagatccgcaagctggatgagcagctggcgcagcacaagcagaagatcaagaccacacgggggccggcacaagaggcggccaagcggcgcgcgctggtggtgctgcggcagaagcggctgtatgaggggcagcgggaccagctgtaccagcagcagttcaacgtggagcagacggcatttgccatgaccagcatgcaggacacgcagcacatggtatcggccatgaaggcggcgggcaaggagatgaagacgttcatgaaggacaacaacatgaagatcgagaacattgagaagctgcatgacgacatgagcgacatgctggactaccaccaggagatccaggacgtcatgggcaccgcgtttggcgtgccggaagacatcgacgaggaggacctgatgggcgagctggatgcgctggaggacgacctggccatggagacggctggcggcggctcggtgccagcctacctgcaggacgt

SEQ ID NO: 6727 - DNA, 385 bp, Chlorella sorokiniana
  unsure (1)..(385): unsure at all n locations; Clone ID: LIB3602-094-Q6-K6-F12
cggcaacctgtacctgatcaagtgcagtgcggcgacaagcgctggttcaagggcgccaagcgggaggccattggcgcctgggactccttcaccgtggtgtaagcacttgcaccgtggtgaccccgccgcagtagccgccgcagcagcagcacagcacacgagaagaaacaccccccccccacactttcccttgcttgtacgttcctccgctcttgttggccgtcccgcgggcgccagccacaatctgatttttcgctcagcgtgtgtgccacaccatgtgtaacgacttgcccgcanaaaaaaaaaaaaaaaaaaaaaaaaaaaaaaaaaaaaaaaaaaaaaaaaaaaaaaaaaaaaaaaaaaaaaaaggggcgggcggttttaa

SEQ ID NO: 6728 - DNA, 525 bp, Chlorella sorokiniana
  Clone ID: LIB3602-094-Q6-K6-F2
gccagagcttcttctgcggcgacatggcggggcggccgggggacaagggcgacggccaggccagcgaccagcagtttgcggagaacatcgggctcaagttctacacgccagaggagcagttcggggagagccagctgggcgacaagctggcgcccagcaccgacagcacgggcctgaacaccgagctggccactgtctttcgcaagctggccgagaaagtcgcaggcgagcccttcaaggcagccgccttcaagaaggtcgccgacatcatcgatgccttcccagaaaagatcacctccgcctcccagctcaaggactccaagggcgtcggcaagagctcgcttgccaaggtcacagagtggcttacaaccggcaccctggcaatccttgaggaggctggcgctggggtgaacgcgccggaggacaagtcagcggaggtggccctcaagttcctgtgaggggctctggagtcgccccgctgccctggtgtgcggccatgcttcagccagcgcgccagtcttgtcc

SEQ ID NO: 6729 - DNA, 603 bp, Chlorella sorokiniana
  unsure (1)..(603): unsure at all n locations; Clone ID: LIB3602-094-Q6-K6-F3
cgagnacttcgcgcgctaccgcgagnatgaggtcatccacgcccgctgggccatgctcggcgccctgggctgcctgacccccgagctgctgcagaacaacggcgccgctgacttcggcgaggcggccgtctggttcaaagccggcgcttcgatcttcaacgaggacggcctgaactacctgggcaacccctccctgatccacgcccagtccatcgtggctgtgctgctgacccagctggtgatcatgggcgccgccgaggcgtaccgctacagcggcgagggccccgtggagaccagcggcgactccctgtaccccggcggcttcttcgaccccctgggtctggctgacgaccccgacaccctggctgagctgaaggtgaaggagatcaagaacggccgcctcgccatgttctccatgttcggcttcttcgtgcagggcctggtgaccggcaagtcccccctggaaaacctggctgaccaccttgctgagccgtctgtgaacaacggcttcgcgtccgccaccaagttcctgcccctggcctgaacgccgtcgtcaacctggagcgacctgggcatcccatattaacggcggccagccggttt

SEQ ID NO: 6730 - DNA, 122 bp, Chlorella sorokiniana
  Clone ID: LIB3602-094-Q6-K6-F4
ccgtccgaaaaaaaaaaaaaaaaaaaaaaaaaaaaaaaaaaaaaaaaaaaaaaaaaaaaaaaaaaaaaaaaaaaaaaaaaaaaaaaaaaaaaaaaaaaggggcgggccgttttaggaggaac

SEQ ID NO: 6731 - DNA, 598 bp, Chlorella sorokiniana
  unsure (1)..(598): unsure at all n locations; Clone ID: LIB3602-094-Q6-K6-F5
gcgctgctgttcctgctgggccatgagnagggccatggcctggcccgccacacggaggagaaggcggtgcactacagcctgcagatgcttgggtttgcgtggcgctacaccgcagcggagtggcggcaccgcctgcggcgctggcgcggcagcagcagcagggccggcgagagcacatggcaagcggagagcgcggcactcaagctgcggctggcggccagcctgcaatggatcagctggcagcatgagcacgaggcagatgcattggcatgcagcatgatgtgccgtgctggcgtgccgcggcagcagtggccggcccgcctgcagctgctgcaacgggtggcagagcaggaagcgggtggcgcccaacagccggcatgcagcagcagcagtgatgacagtggctgctgcagcaggcaggacgctgccgctcatgaggtgaagcttgccagggccgaggagcaggaagctgcagcccacctggaagcagcaggcatccttgcagccgatatcagcgaccagctggctgcagggcagcccagcgcagcgcagcgcatgctggactcgtgccagcggtggcccgtgccggccggctggc

SEQ ID NO: 6732 - DNA, 505 bp, Chlorella sorokiniana
  Clone ID: LIB3602-094-Q6-K6-F6
gcaggctgcggctgcagcggcacaggcggcggcgcaggtgctggtgcaggcggcagagcaggcggcagcggcgggcgtgccggcggccaacaacgtgcagcaagcccctcgcatcctgccaaagagcttgagttccctcctgccaacaacgacaacgacagctgactgcatgcagagctgcctgcccgatggtccgcctgctccctggcgtccaaattcccatcatgcgttgccttgtatgctcatcatgtacagcccagttatccgcccgtgcatcatgcctgcaccatgttcaaatcccctgcttccctacaatgttctaggtatcctacatgcattgtgtgctccccatcatgttcatctgcccattgtacatgccttccgccttctgccattgcattccagccacatgccgcgttgcaccaatgctgccacctgccagccccaaaatgcgactagcgcttgcatgcgcgcctccaaacaggagccatgttacacgcgagag

SEQ ID NO: 6733 - DNA, 602 bp, Chlorella sorokiniana
  unsure (1)..(602): unsure at all n locations; Clone ID: LIB3602-094-Q6-K6-F8
ngagcgcttcttcccgtactacaccttcaatctgtgcgcggggctggatgaggaggggcggggcgcagtgtacacatatgatgccatcggctcatacgagcgagtgggctacggctgccagggcagcggcaaggagctgatccagccggtgctggacaaccagctcaaggcggcgtccccgctggtgctgccgcagcagcaatggctgagctcgctgccgctggagcaggctgtggacctggtgaagggcgcctttgtttcggcaggcgagcgcgacatttacacgggcgacgacgtggagatcttggtcatcaccaaggagggcgtgcgcaccgaccgactggagctgaagcgcgactgagcccagctaaactgcttagagctgacgcgcgactgagcccggcccaactgctgacagctgaagcgcggtggaggggctgctgcacagcgcgcgcacggcacagcacatggcacacaaagcacatgtcgcactcacagcggacagcaccaccattgcgtaagcattcacccgcccggttgcctgctcctcgcccgccacccagctctgcccacccttgctggctgtgcaaaggcggcagtta

SEQ ID NO: 6734 - DNA, 66 bp, Chlorella sorokiniana
  unsure (1)..(66): unsure at all n locations; Clone ID: LIB3602-094-Q6-K6-F9
naaaaaaaaaaaaaaaaaaaaaaaaaaaaaaaaaaaaaaaaaaaaaaaaaaaaaaaaaaaaaaaat

SEQ ID NO: 6735 - DNA, 567 bp, Chlorella sorokiniana
  Clone ID: LIB3602-094-Q6-K6-G1
gcgttcgggacagcgcctggctcccgcagcaagacaggccgccaagccgccaagcggtcaagaagagctccttcaagaagacgaagaagccccgctacagcgtggtgttccaccgccccaagaccctcgttcgcagccgggaccccaagttcccccgcgtcagcgcgccccgccaggcccgcctggatgagcactccgtgatcaagtaccccctgaccactgagtccgccatgaagaagattgaggacaacaacaccctggtcttcatcgtggacgtgcgcgccgacaagaaggcgatcaagaaggctgtggcccgcctgtacgacatccagaccaagaagatcaacaccctcatccggcccgacggccagaagaaggcgtacgtgcggctgaccgccgactacgatgcgctggatgtggccaacaagattggcgtgatctaaagcgtgcggctggagcggggcggctcccgcccctcccaacccacccttggcctggtgccaaggcgccggcagcctgcacggacaccccacgcggtccggcggcgccggcgcagcaacggcagcg

SEQ ID NO: 6736 - DNA, 388 bp, Chlorella sorokiniana
  Clone ID: LIB3602-094-Q6-K6-G10
cgcccgcatgatgcgcgtctaggcagtcgagacgcgtctaggcctggaggcagccccccgcctctgtgccacaccatgccaatgttaattgaaccccgccaacatacagcaacttcgagcgagccactcacaacaagacggcagcagctggagcgcgccctgttaggaagccgccgtgcccagctgcatccaactactggcgagatgatgccacaaacgcatcagccgtgtgcttcatgtgaagtgctcccttaatgaatgacacgcacccagtgccccccccctgccacctatgcatggcctttctatgcttcacgtgagcacgttacattgagtagtctatcaacaaagcgagcgcgcctctatgtggaaaaaagcgcactacaca

SEQ ID NO: 6737 - DNA, 592 bp, Chlorella sorokiniana
  Clone ID: LIB3602-094-Q6-K6-G11
gcaggcggacgctatgacgaggaggtggcggagatgaagaagtggcgcagatggtccacgaccaggagctgagtgtggaggagcgcaacctgctgtcggtggcctacaagaacgtcatcggcgcgcgccgcgcctcctggcgcatcatctctagcattgagcagaaggaggaggccaagggcaacgaggagcacgtcaagcgcatcaaggcgtaccgcgaagtggtggagaaggagctgcaggagatttgcagcagcatcctgcagctgctggacgaccacctgatccccaccgcctccaccggcgagtccaaggtcttctacctcaagatgaagggcgactaccaccgctacctggccgagttcaagacgggcgcggagcgcaaggaggcggcggagcacacgctgctggcgtacaaggcggcgcaggacattgcgctggtggacctgccgcccacccaccccatccgcctgggcctggccctcaacttctccgtgttctactacgagatcctcaactcgccagagcgcgcgtgccacctggccaagcaggcgtttgacgaggcgattgctgagctggacacgctgggcga

SEQ ID NO: 6738 - DNA, 488 bp, Chlorella sorokiniana
  Clone ID: LIB3602-094-Q6-K6-G12
gtggttcggccgtcgtagaggccgcgagggcgggggccaaaatcaaggcccatgagctgcgcggcaagggcaaggaggagctgctgcagcagctcaaggagctgaagcaggagctgagcggcctgcgcgtggccaaggtcaccggttgtgcccccaacaagctgtccaagatcaagggggggggcaggggcattgcccgcgtgctgaccgtggtcaaccagaagacccgggacgctctgaaggaggcgtacaagggcaagaagtacgtgcccctggacctgcgcgtcaagaagacccgcgccatccgccgccgcctcaccaaggcgcaggccaacgccaagactgagaaggctgccaagaaggcgcgcgccttcccgcagcggaagtacgcgctcaaggcgtgaaggccttggaagcagcccgctgcagccgtgcaggcacacctctaggcagcggccgctccggccccatgtaacttgacgcccgac

SEQ ID NO: 6739 - DNA, 476 bp, Chlorella sorokiniana
  Clone ID: LIB3602-094-Q6-K6-G3
ggccaccattgccagctgcggccgagtggtggtgatggaagcggggcaggtactggagcagcagaagcagccacagcaggagggcgagccggtgcagcagtaagtctcgcagtagcgtggcagccttcagcgcggcagccttagaaggaactcacagccggcatacgacagcagccgcagccacaagtgaatgccgctgcggttgcagccatgcagccatgcacggcctggcctgccctgtctatcatgccagcaccatccaacccggtctatgttacaagatgactgcaaaaaaaaaaaaaaaaaaaaaaaaaaaacaaaaaaaaaaaaaaaaaaaaaaaaaaaaaaaaaagcggatatagcttgtattgaatctcaagttaacctgctctgctatatcatgtcgtatcttttttctgtgaccaccaatatccatcgcactgcccacgtatgctcaatgtcagggcttgaaaaac

SEQ ID NO: 6740 - DNA, 456 bp, Chlorella sorokiniana
  unsure (1)..(456): unsure at all n locations; Clone ID: LIB3602-094-Q6-K6-G4
gcggcatcagcgatgactcccanagtacatcctgatgcgcctgctgggtggtgccaagaagcgcaagaagaagacctacaccaagccgaagaagcagaagcacaagcacaagaaggtgaagctgcgggtgctcaagttctacaaggtggacgacagcggcaaggtgcagcgcctgcgcaaggtgtgcccccagtgcggccccggcatcttcatggccacccacttcaaccgcgtgtactgcggcaagtgccacctgacgtacgtgtacgacaaggagggccagaccgcctaagcgccccgctcccccctgcggatgcacgcttagcagcagcacacgcggcgggtgcgcccggcatgccggcacaccagccacggagcggcggggcgtccctggcagcggcgcagcgcctgcaagcccttctgttgtgttctgtgccgctgtaatacccctgctgc

SEQ ID NO: 6741 - DNA, 596 bp, Chlorella sorokiniana
  Clone ID: LIB3602-094-Q6-K6-G5
cttgctcttgcccagcccgtccagcagcagttagcagccatgcaggccaccttcgccggctctaagctgcagcttggcgcgcgcgtcagccgcaagagcgtgaacaccaccgtggtggcctccagcggcaagaagatcgacatcagcaagcagggcctgaactccatccagaatgagaccgtgaagctcaacctgatgggcaagtccaagaccatggagagcaaggactgggtggacccccagggccgcaagggcaagggctacggcgtgtaccgcttcgccaacaagtacggcgccaacgtggacggctacagcccgatctacacccccgacacctggtccgagtctggcgactcttacaagctgggcaccaagggccttattgcttgggccggcctgattgtggtgctgctgggcgtgggcatcaacctggtgatctccacctctgccctgggccagtaaatggcgacgccccccgcgtcggcagcagcagcagcagccagcagcattcccttgcagctaccccccgagaagacaaaccctcaccctaccctagctggcggcgtcaccatgcgccgctcccttgctttccgttt

SEQ ID NO: 6742 - DNA, 596 bp, Chlorella sorokiniana
  Clone ID: LIB3602-094-Q6-K6-G6
cccgctgttatgaattgctctcttccatagaggctgtcgtgcgcgctgcggacgctgtggtctgcccacactcacccttacccacttgctgccacgctccctttcacaggaggctgtcgtgcgcgctgcggacgctgtggtggccgccattgaccaggcggccctggccatcttcctggcccaaaatgcggggaggagggtccgggagccgcggcacgcaagaaagagatggaggagcggaaggcagccctaattgaggccctggccgccaagtgcggagctctgctggagctgcagactgccggcggcaaggccagcaccgcagctggtgctgacaagcccagcaccgcagccggtgccctggctgccgcgagtggtggcgaggcgccaccggcgagcggcgctgccactgcagctggggacgcgggcaccggcgcgagcgcggcgggtgatgcggcgggggccagcgcttttgaggctgcattccgcgagctgcgcaagtgggtggacaccgccgctgatgagaagtacgtgctgctgcatgccaagcgcgaggcgctggctgggcggctggcctctgccttccgcgccctgga

SEQ ID NO: 6743 - DNA, 529 bp, Chlorella sorokiniana
  unsure (1)..(529): unsure at all n locations; Clone ID: LIB3602-094-Q6-K6-G7
cggccgcgtggggtgagcgccggcctgtactacattcagcgcggcatctggcccctgggccgcaccctgaacaacgagtggtttgcggccagcgagagcctgatgagcgccatgccccgccagggcagcgccacgccggtgcgcatgaaccccatgtcggagaagatcaacatgaagagcgtcacgtactgagcgcctcgctggcagcccccatggtctgaggcggcccgctggcagcggcaggggcctgaggccccacaccccgcagccgcgtgcgcctcggctgggcgggccagaatcgctgcccctcttactacactgagttttcgactcaaatttatgtcctatgcactcacccctttggttaaccctgtagcgcttgcctcgcacccccgcccgccggggaagcccgctctgtacctctgtgccatgtctgtatacacgcttttgctggcgcgtctggggtgtgttaagctgcgcaccananaaaaaaaaaaaaaaaaaaaaaaaannnaaaaaaaaaaanaaa

SEQ ID NO: 6744 - DNA, 263 bp, Chlorella sorokiniana
  Clone ID: LIB3602-094-Q6-K6-G8
gtgaactgctcgccggcgcgcggttgccagccctgttttgaccggcctgagcgtgtgtgggccccgtatgcacagccaattcattttctgctgcatcccttgttttcctctacccctcactgcccgctttcatgaaggcgcgcggcggcgcccccgcctgtgcacagcactgcatatcgttgctccgacgccgccatgccgccatgtccatatcctgagcgcatattgcagcgcccacaccgttgctgtaactgttatccagc

SEQ ID NO: 6745 - DNA, 477 bp, Chlorella sorokiniana; identical to SEQ ID NO: 6500
  Clone ID: LIB3602-094-Q6-K6-G9

SEQ ID NO: 6746 - DNA, 619 bp, Chlorella sorokiniana
  Clone ID: LIB3602-094-Q6-K6-H1
ttctggaagtgcgctgcatggatacgttctggcaggcgtgcggcggcgtgcatgcgccctgatgactctcagtacaactgctaccgctggcatgctgtgacgccaggatgctgccttatgtgctggccctcggttgccacgggaggcgctggctcagcggcgactggcagctgccgctcgtggccgtggggcgtgcgctgcagggcatggctgtatactatgcgggctgccaagcggaggccgctgtgctggcacgctgggccgcgctgtcgccgccgctggcggtgctggcgactgcagcggcggtcacagtcaaatacgttggcgcgcttgtggagtgggtcaacctgtcgctgctgctgctgtttggcggcatggggctgggcttcgtgcgggggctggccagagcggcggttgcgcccttccactgggcagccaaggcggcagcggccttgggccaagcagcactggccgctggcagcttgctggctgggcgcaggctgcgcaaagccagcaagtgtggtgggcagggcaagcaggcggaaggcgagcaggcggccgggaagcacggagcacatcagcaccggcaacggcagcggcgaggcgatcggcagccggc

SEQ ID NO: 6747 - DNA, 101 bp, Chlorella sorokiniana
  unsure (1)..(101): unsure at all n locations; Clone ID: LIB3602-094-Q6-K6-H12
naaaaaaaaaaaaaaaaaaaaaaaaaaaaaaaaaaaaaaaaaaaaaaaaaaaaaaaaaaaaaaaaaaaaaaaaaaaaaaaaaaaaaaaaaaaaaaaaaaaa

SEQ ID NO: 6748 - DNA, 585 bp, Chlorella sorokiniana
  unsure (1)..(585): unsure at all n locations; Clone ID: LIB3602-094-Q6-K6-H2
cggncgcgtggggtcgcagccaggtcccacctggctgaccagaccgagagggcgttccagcggcagctgagcgtgcagcgcggctacaacaagacggcgaagaagatgtgggcaagggcggccagcggtggtacaagaacatcggcctgggcttccgcacccccaaggaggccattgagggcaactacattgaccacaagtgccccttcaccggcaatgtcagcatccgcggccgcatcctgtcgggcaaggtgaagagcaccaagatgaaccgcacgattgtggtgcgccgcgactacctgcactacatcaagaagtaccagcggtacgagaagcgccacaccaacatctcggcgcacatctcgccctgcttccgctgccacgagggcgacaccgtggtcatcggccagtgccggcccctgtccaagacggtgcgcttcaacgtgctgcgcgtcatccccgcgggctctggcgccaagaagggcttcggctccttctaagcaggctggactaagggcctcttgccttgctggctgaagccctcgacagcagcagcagcagccccagcacggcatgcaagcgctg

SEQ ID NO: 6749 - DNA, 397 bp, Chlorella sorokiniana
  unsure (1)..(397): unsure at all n locations; Clone ID: LIB3602-094-Q6-K6-H3
tcgggagcacgtgcagcgccgcttccgcaacggcttccgcgagggctctgctgccaanaagatcgctgcctaaacagctggtgtctgcagctacgcggcagcacgttgagccagctgtgtagcaggatagtaacaccgcgacgcagactatccagaaaatcaaaaaaacacaaccctgcggggggggggggggggcatcctcacaacccccaatgccatcaatcgttgcggcgggggtcgacccaacacaacacaaaaaaaaaaggggggcccttttttgggccccccggtttccgcccgcggcctcgcccgcctttggcttttttctgggccgccccaacttcgtcttcggggcccgggttttccccctcgggttctgcctaaccccggggtgccc

SEQ ID NO: 6750 - DNA, 388 bp, Chlorella sorokiniana
  unsure (1)..(388): unsure at all n locations; Clone ID: LIB3602-094-Q6-K6-H4
ggcggcgctgcgggcgcggcagctggcgtgctggcacatgtcgccacaatgccgaagccagaggagtgaactgatggagggatagtgcccctactaaggggcctactgatcgaaatgacgccagaggctgcgactggctgcccagcaccagcttttcacccgttttcatgctgtcacatgtattatggccaagcttcccaccctcacgtgtatgcaagcatatgcctcacggctgcatgctatgccatccatcaagccaagtccgccaattgttcttctgccggcagtatgcctgccgttgcctgcccgcaaggactcggggtcctgagcctggatgcagtttatgttactattagttcgcctgtacagcatagtaatgacatgcntg

SEQ ID NO: 6751 - DNA, 616 bp, Chlorella sorokiniana
  Clone ID: LIB3602-094-Q6-K6-H6
gaaaaaaaaaaaaaaaaaaaaaaaaaaaaaaaaaaaaaaaaaaaaaaaaaaaaaaaaaaaaaaataacaaacaaaaaaaatgaaagcatagtggcagcttctttagagatacctgagtcttattttacgtggggcgtcgctttttcatcgtctgggcctgggtggaaccctgatgtttacctagctgaacccgcgttgttacctcagtcggcctctgggtcagccccccgtgtttacccaataggcccgctctcgatcgcccttccccttctgcctgtggggccttaatgcccgaatggggccgcgccctgtagcgttggtccaacctcgtggggcgtggtggttacccgcgacgcgcccgttgcacttggcagcgccccggggtccgtcgctttcaccccttccgttcctttttcgcttggcaggccggttttccccgttcatttctttttttttcgctcctttttgggtttttgccctagtgttttccggaaccttgtcccccttaccttgctttttgggatggtttacggcctttgggggccccctgaccgactgggctttgcccttggacgatggactttagggcgttaatagccggattctaggttcttac

SEQ ID NO: 6752 - DNA, 602 bp, Chlorella sorokiniana
  Clone ID: LIB3602-094-Q6-K6-H7
gctgtgggcgccaacaagcgggcgtggacttcttccctcactgcgtccacctggtcagctgggagaaggagaacatctcgtccgaggcgctggaggcggcccgcatcgcggccaacaagtacatggctgaagaacgcgggcaaggacgccttccacctgcgcgtccgtgtgcaccccttccacgtgctgcgcatcaacaagatgctttcgtgcgccggcgcaaacaggctgcagacaggcatgcgcggtgcgttcggcaagccatttggtgtgtgcgcgcgcgtgggcatcggtcagatcctgctgtccatccgctgcaaggacacgcacgctgcggtggcggaggaggccctccgtcgtgccaagttcaagttccccgggcgccagaagatcgtggctagcaggaactggggcttcactccctacctgcgcgacgattacttggagtggaagcgtgagggccgccttgtgaacgacggtgtgaatgccaagctgattggcaaccacggcccgctggacgcacgggagcccggccagattttcgagggtcctgcccgtctgtggcgtgtgccggtgcatgcctaacatgttgcttgggttct

SEQ ID NO: 6753 - DNA, 575 bp, Chlorella sorokiniana
  unsure (1)..(575): unsure at all n locations; Clone ID: LIB3602-094-Q6-K6-H8
gnaaggagccggnacccaccatctaccgcatgaagctgtgggccaccgacgccgtgcgcgccaagtccaagttctggtacttcctgcgcaagctgcgcaaggtgaagaaggccaacggccagatcctggccatcaacgagatctttgagcgcataccccaccaccgtgaagaactacggcatctgggtgcgctaccagtctcgtaccggctaccacaacgcctacaaggagtaccgcaacaccaccctgaacggcgctgtggagcagatgtaccaggagatgggcagccgccaccgcgtgcgctccccctgcatccagatcatcaagaccgccacgctcacggcgtcccagtgcaagcgcgcggccacgcagcagctgcacgacagcaagatcagcttcccgctggcgcgcaaggtgctgcgcccctcgtcccgcaagttccgcaccaccttcaaggcggtgcgccccaacgtggccatctactgagcgcctcgccccaaggcggctcgcggccacactggcggcagcagcggcggcggcggcgacccagcttgtgctctggagcggcgccgctg

SEQ ID NO: 6754 - DNA, 613 bp, Chlorella sorokiniana
  unsure (1)..(613): unsure at all n locations; Clone ID: LIB3602-094-Q6-K6-H9
ngacgcctgnaggtgccccctgccctcaaccgcttcacccgcacgctggacaagaacatggccgagagcctgttcaagctgctgatgaagtaccggcccgaggacaaggcggccaagaaggagcggctgctgaaggaggcggaggcgcgcgaggctggccaggaggttgagaagaagaagcctgtggtggtcaagtacggcatcaaccacatcacgcagctggtggagagcggcaaggcgcagtgcgtggtgattgcgcacgacgtggaccccattgagattgtggtgtggctgcccgcgctgtgcaagaagatgggcgtgccctactgcatcgtcaagggcaaggcgcggctgggcaccgtggtgcacaagaagacggccaccgcgctggcgctgacggcggtgaagaacgaggaccagcgcgagttcgccaagctggtcgagtccttcaagaccatgtacaacgacggcccccgcgtcagctggggcggcggcatcatgggccccaagagccaggcggcgcagaagaagaaggagcgggctctggccaaggacgccggcctccgcgtgtaagcgggcagcacccacctgccgctcaccgcgcgccgggccg

SEQ ID NO: 6755 - DNA, 303 bp, Chlorella sorokiniana
  unsure (1)..(303): unsure at all n locations; Clone ID: LIB3602-095-Q6-K6-A1
tgccgccgccgcgcctgctggnngcaagcccctgaccgccaanaacgtgngaggagatgctgggcaacctgggcctgcccgccgagtttgccacccactcccagatccgcggcctgtcnggcggccatgaagtgaatctgttgctgggtgccgccatgtggcatcatccccacatcctggtgctggatgagcccaccaactacctgnaccgcnagtccctgggcgccatggcctccnccatcaaggagtactgctgctgtgtggtgattgtntcncatataccacnattttgttaaccatttg

SEQ ID NO: 6756 - DNA, 415 bp, Chlorella sorokiniana
  Clone ID: LIB3602-095-Q6-K6-A10
cacagctcgattcggtgaggagcaccaacgttatgccgaaatgccatattaagccagcggcgcgcagaacgcgcatgccctgcgccccgcagcttgccagcacaaccagaaagcctgttttccctctttgtttctgctgtttcactacacgcacgctgtatctgcgctgtacactcctttgcgcccgttctctctgcatgcaattttcagttggaagcatgaggcacccctgttgttccacctttgtttgtttctgccgcccgggtgcgctgctgtacccctgagcatgccggccgcccttgctgcccgcctgccccttccctcggccctcagcccgcccattcacgcgacattcttcatctcaaagctcatcctcaccgctctgcaagcattataattgtaagctctggcatgg

SEQ ID NO: 6757 - DNA, 619 bp, Chlorella sorokiniana
  unsure (1)..(619): unsure at all n locations; Clone ID: LIB3602-095-Q6-K6-A11
gggngnaagagacatctcgtccgaggcgctggaggcggcccgcatcgcggccaacaagtacatgngtgaagaacgcgggcaaggacgccttccacctgcgcgtccgtgtgcaccccttccacgtgctgcgcatcaacaagatgctttcgtgcgccggcgcagacaggctgcagacaggcatgcgcggtgcgttcggcaagccatttggtgtgtgcgcgcgcgtgggcatcggtcagatcctgctgtccatccgctgcaaggacacgcacgctgcggtggcggaggaggccctccgtcgtgccaagttcaagttccccgggcgccagaagatcgtggctagcaggaactggggcttcactccctacctgcgcgacgattacttggagtggaagcgtgagggccgccttgtgaacgacggtgtgaatgccaagctgtttggcaaccacggcccgctggacgcacgggagcccggccagattttcgagggtcctgcccgtctgtggcgtgtgccggtgcatgcctaacatgttgcttgggttctaaagatgtaacgaacatctgagcaagacaaagaaaacaacaagagctggattggattgttttctgcatcatcagtttg

SEQ ID NO: 6758 - DNA, 587 bp, Chlorella sorokiniana
  Clone ID: LIB3602-095-Q6-K6-A12
gcgccgccgcccactgtttggcgattccagggccggcaagcaagccgccctgctggacatgtcccctccaaccggcggctctccgctctactcctaccagatgctggggacctggtggctggccgtggccgcggtctcggcgctgggcctcagcaacccactcaagttcagcccggtctttctgatccagatttgctacaagctcgtcttcctgttcactgtcgttgcgcctctcgtcctgaagggtcgctgggccgccctcccggctgtgcagaccatcattttcgaagccttcctggtcccgctgtttgcgctcactccctggacctacctgctgggctcgagcgccactgctggtgccaacggagacaagtggagcgcagccaaagccgagtgaggcagcaaggtgcacacaagactaagacattatgcaaagttcacagaccaagcccttcttgcagctgccatatcccaccgaatacattggcacagcaagccgcatctgcatgtcgactgtcacgattcttgaacagcaactacttacaggaataatagcggaagatagtacaaattgcaacatggcgcat

SEQ ID NO: 6759 - DNA, 310 bp, Chlorella sorokiniana
  unsure (1)..(310): unsure at all n locations; Clone ID: LIB3602-095-Q6-K6-A2
gtggccttctaccagnagtacgtggatgagcagagcaagaacgagatcaaggacatcctgctgacctacgaccgcacgctgctggtggccgaccctcgccgctgcgagcccaagaagttcggtggccacggtgcccgcgcgcggtttcagaaatcttacaggtgaaggctgccccgtgggacggttgggcgcctctggaggcttcttctgcgccgctggcgtggcggcagcggcgtctgcggcctaggcagctgccctggagcagcatgccctcagcgaaagcaccatgagtacaccttgcgtgtgtaac

SEQ ID NO: 6760 - DNA, 588 bp, Chlorella sorokiniana
  Clone ID: LIB3602-095-Q6-K6-A3
gtgcgcgcgtgtgcagctgatcaatacggcaagaagatgcggcgttcgtgcccaacgacggctgcctcaacttcatcgaggagaacgacgaggtgctcatcgccggtttcggccgccgcggccacgccgtgggtgatatccccggcgtgcgcttcaaggtggtgaaggtgtccggtgtgtccctgctggcgctcttccgcggcaagaaggagaagccccggaactaaacggcccgcgcccagcagcggcagcagcggcgcgcctcggcaacggggggcgccgcgtccgccagcactgcacctgcctggcggcggcttgggagggcgtgcagcgcatgcagcgtgcaccgccgcggccctcccgatagtttaggaccccacaaccagctccctctgctcccactactgatgtaacacgcaactgccaaaaaaaaaaaaaaaaaaaaaaaaaaaaaaaaaaaaaaaaaaaaaaaaaaaaaaaaaaaaaaaaaaaaaaaaaaaaaaaaaaaaaaaaaaaaaggggcgggccgttttaaaaggatccaagtttacttccccttgcttgcgaacgtaatagcttttttttggg

SEQ ID NO: 6761 - DNA, 602 bp, Chlorella sorokiniana
  Clone ID: LIB3602-095-Q6-K6-A4
tgctctgctagcagccctgctgtccagctttgtgcctcgactggcagagctgctgggcggcatggggcaggaggtgggagaggcggtggcgggcgcctttggagaagcggcagaggagctggacggggcgggagcggcgctgatgggtgcggtggcggacagcctggtggacaaaagcgtggtggtgctgaagcagctgcgcggcattgtggccacgttccgcatgacggcacgcgcgcagcccacccgcccctcgcactacgtgtccattatcctggcgccgctgcaccagttcctccaggccgaggctgcagcgggcctcagcaccgaggcgcggcagcagctggcggcggcggtggtggcgggcgtcagctcgcgctacctgcatttggcggacgacaccctcagcacggtgcgcaagaccgagtccagcctgaagcggctcaaggcgcggcagcagggcggcgagggcggcgcagcccctgacaccgacaagatgatcgagctgcagctgttcctggacgtccaggagtttgggcggcaggccaggcaggctggagtggatgccgcggcgctggacagctaccgccagctgtggcggc

SEQ ID NO: 6762 - DNA, 619 bp, Chlorella sorokiniana
  unsure (1)..(619): unsure at all n locations; Clone ID: LIB3602-095-Q6-K6-A5
gttaanaagccagcagctgccatggcgacgtttgcggaggcaccggcgggcgatgccgccaaggcgccaagatcttcaagaccaagtgcgcgcagtgccacaccgcggcgtctggcgagggccacaagcagggccccaacctgggcggcctgttcggccggcagtcgggccaggcggagggcttcagctacagcaaggccaacaaggagaaggcggtgatgtggagcgaggagacgctgtatgagtacctgctcaaccccaagaagtacatccccggcaccaagatggtgttcgctggcctgaagaagcctgaggagcgcgccgacctgattgcttacatgaaggaggcctgcaagtaaacgggcccgccagcccacccgccgcacggcccaccccagcccactgaaccaagatggtgtttgctgggctgaagaagccggacgagcgtgctgacctgattgccttcctcaagcaagaaaccgccaagtagacggccggctcctttgcaaaagagaagcagccaggatggcgctctcagcggcggcgcccatttttgctgccaggagcggcgcggcggcggccaccacgggcgctgcattggcgcccctggctgcccccg

SEQ ID NO: 6763 - DNA, 389 bp, Chlorella sorokiniana
  unsure (1)..(389): unsure at all n locations; Clone ID: LIB3602-095-Q6-K6-A6
gnaacccccttgccagtaaagtagccaccaatgaatgattgagttgatgccagcagacgattgacagccgcggcgcgagccgccggcacctgcaagttttcccctttcatgcacttcacactggcagatgaacgccgacgctttgattgctttgcttgtcgatacgaacatgtatgagcactgatccatgctgttgcactgcccaacgctgtacatttttcaccccgctgtcacaaggaagttttgccctcgctcaccccacactttttgttcaccccgctgccctgccttgcccctttgcatggttttgatgcatcatgccttggctgtacattcccacaccccttgcacccttgtacctttcctaaattgcaagaccctggctgcac

SEQ ID NO: 6764 - DNA, 616 bp, Chlorella sorokiniana
  Clone ID: LIB3602-095-Q6-K6-A7
gggctatgcggagctgatggagtcgtgcctcaaccgcgaccacacccagcgccccagctttgaggacctgattgtcaccatcgacgccctgctggtggagggagaggagccttctatggctcccccgccgcccctcatctcagccggcccctgcaaggaggccgctgacatggcggcggcagccgccgcgctgaacagcgtagcccccgtcacccccaactaaccagctaggttgggttacgcttgaccggtgggactgcgcctgccgcgccgcggcgtgcaaccgcgtgcatgagcgcaacccgtgcgctgggcgcaacgcatgcgctgggcgctgcgtgtttctaatacccaagcctcaaacacaacaccccggggattgcctggcacaactgctatgacactgtaccgctagctaacccaaccctgagcccacccccgactgctgcgccccttccaatcatgtgtgcgccctccacagccgtgcgtctctgccccttggtctgtccctgcttgcactggttctgtgctcccgattttcattacccccgagcgagagtccccgtgtgtgtgtgccagtgattcctgcctgtgccttgaaagtgtgttgctatgc

SEQ ID NO: 6765 - DNA, 621 bp, Chlorella sorokiniana
  Clone ID: LIB3602-095-Q6-K6-A8
agcaggcagcagctttgcagcagtccagctacgattccgatgaagaggagctgcgggtgctgggcggcagcggtgctggcaacggcaacggaatgcaccaatccagcagcatggctgatgtcgtgtccaacctggggcagcccctgctggtccggccggccgtctgctcccatgcgctggacgcgaagctggcagaggcggcgcaggcggagcacatctgtctggacaatcacattctgaactgctcaaacctgctgaacgaagtggcgtaccagaacgtgcggcggcagtgcagcgaggtgtgggacgccatggagcgcttcattgagcagccggcagccagggagctgctgatggtgcaggccatgtacagcctggagaccggggaggtggactggtttggcctgctggcctgaggctctgttcaacagagcagagcacggacggcagtttccatcttctttgcagttcgcaaccttccttgtcccaataccttccatcgcattctggcccagcccgttccaccgccaccccacccgcatttgtaccagtaggcacaacaggcagcagcaatgttgccgatgccgcatgacacattgaattcttccgcaggggcgtgct

SEQ ID NO: 6766 - DNA, 448 bp, Chlorella sorokiniana
  unsure (1)..(448): unsure at all n locations; Clone ID: LIB3602-095-Q6-K6-A9
accaaactgccccccaacgcacgtccgccgctgcaccacctgccgccccctcacccgcacccatcttccacccgccacctttcctgccgctcaccgccgcacatcctacctcccacacctcactccatgtccacccttcacccgcgcttcacacagcggctgctgccatgcaaagctgctgccaaacccatccatcatgctcgcacacccactcacccacacgtccaacgtatccagacccattttcaaggcccgactgtacagtgcctttttgcgtccttatgccgatctggtaccaggacttaatgtgtaacaaatggtntgtnaaaaaaaaaaaaaaaaaaaaaaaaaaaaaaaaaaaaaaaaaaaaaaaaaaaaaaaaaaaaaaaaaaaaaaaaaaaaaaaaaaaaaaaaaaaaaaaaaaggggggggccggttttaaaagaac

SEQ ID NO: 6767 - DNA, 464 bp, Chlorella sorokiniana
  unsure (1)..(464): unsure at all n locations; Clone ID: LIB3602-095-Q6-K6-B1
gcgtttctgcggctgtagcgtccaagctgcagctcgctgccccaggctggcgagcgtctgcgccggccgctagcttgcccagccctgcggccagcaaggctgctggagcctgcaggccctgcccttgactgtatcgccccttaggaacccgcctgccctgcctgcctcggaaacgcacgcttctcctttcctgcttgttcagcgccggtagcgaccattgagttttgactctcaggacacagccttttttggccatttttgtagcgctctccccgccccccatgccggccgcccagctgctcgctagttgcattgtgcaggcgctcgataccccgcccgctcttgcatggcagcagccttgtgtgcttagcgagcaattgatatgtaacatggctttggtcaaaanttaaatttttttttttccaacggcaaattttttttctccttttttttggctttttttt

SEQ ID NO: 6768 - DNA, 531 bp, Chlorella sorokiniana
  unsure (1)..(531): unsure at all n locations; Clone ID: LIB3602-095-Q6-K6-B10
cggacgcgtgggcggcaccggcgcgctgccatgcaagcactgcggcggcacggggcggctggggcccgcgcagtaacagggccaaggcaagtcagcccatggcaagtccccacatgcagccatcagctcgtgggtcccgtcctccctgctgcttgttctggtgtggtcgtgtgttcttttctggcctgctgactgtcagccgcttgcagtgcactgctgtgcgccacctcttccctttttccagcaaaataagctccagtgttcctcttctgctgctgaaaacgagtgatactaaaacagatgcatgccatcgtgtccatttacaaacccgtggccctgctgcctggtgcactacgaatgctgccttttcctgcatgcatgccctctccgaacgcacccttgcacccctcaatgtcctcagctacccctcagccaactcgcggaagaacctgtaataaatgacatccngcgnttttcccgaaaaaattttaaaaaggggcctcacttaaaaaaaccaaaaaaaaaatttag

SEQ ID NO: 6769 - DNA, 554 bp, Chlorella sorokiniana
  unsure (1)..(554): unsure at all n locations; Clone ID: LIB3602-095-Q6-K6-B11
ggcctgcgctggtagnacaagtcaagaaggcgaagggcgacaagcgccaggaggtgtgcacccgcgagtacaccctcaacctgggcaagcggctgcacggcatcaccttcaagaagcgggcgccccgcgccatcaaggagatccagaagtttgcggccaagcagatgggcaccaaggtggtgcgcgtggacgtcaagctgaacaaggcggtgtggagccagggcatcaagaacgtgcccaaccggctgcgcattgtggtgcagcggaagcgcaacgaggacgacgaggactctgaggagatgttctccctggtgaccctggctgaggaccagaacaccaagaagggcgtggttgtgctggaggcgtaagcgcctgccgcacgccgcagcaccaaattgacgtcacctcccaccgcagcagccgcactctcccgacttccctgcacgcgttgcagcagcatgtaacgcgcgcgctagcaaaaaaaaaaaaaaaaaaaaaaaaaaaaaaaaaaaaaaaaaaaaaaaaaaaaaaaaaaaaaaaaaannnnnnaanaa

SEQ ID NO: 6770 - DNA, 599 bp, Chlorella sorokiniana
  unsure (1)..(599): unsure at all n locations; Clone ID: LIB3602-095-Q6-K6-B12
gccagcgggggtgngagcagagcggtggcccagcagggcagcaaccaggacagcacctcagcagcagcagcgccgcatgcggcggggccatcaccagcggccgctgccccgcggctgcacggcgccaaggggcggttgtgttccagcgctactaccacctgtttgagcggggggagctggaggggctggtggcgcgcctgcccggcgctgcgctggttgactcgttttacgacaaggataactggtgtgccgtgtttgagcgggttgtgtaacgcgacgcttgaaaaaaaaaaaaaaaaaaaaaaaaaaaaaaaaaaaaaaaaaaaaaaaaaaaaaaaaaaaaaaaaaaaaaaaaaaaaaaaaaaaaaaaaaaaaaaaaaaaaaaaaaaaaaaaaagggggggcgccttttaaaaaaaccaaattttacaaccccgggcttgcaaaagaaaaagttttttttttggggcccccaaaaataaaattaacgggccggggtttaaaaacgcgggaacggggaaaaacccgggggttcccaaattaaatcgctttgaaaaaaatccccttttccccagttggggaaaaaccaaaaaggccccc

SEQ ID NO: 6771 - DNA, 605 bp, Chlorella sorokiniana
  unsure (1)..(605): unsure at all n locations; Clone ID: LIB3602-095-Q6-K6-B2
ccaagctcaacacgnaanaacccgcccttccgtgacaccgccaccctgcccaagaacggatgggtggtgctgcgctttgtggcagacaatccggggctctggatttatcactgccaccttctctggcatgaatatatgggcatgctgttcgtgctggcagaggctgtggacgagctgccgccccgccccagggcctgccggcctgccccaagacttgcatccagaatgccgccccctggagcaagccgtttgtccaggagaagttcggcaagagcgggttcgagctgccctgagcggctagcttgtgcggtggtatgctgctgccaaagcaaggtgcacacaacctgccgcagagacgagtcgagcctcatgtccgccacactgtattgcgcaagatgtcaacatgtccttgtgcacctgctcaaaaaccttcttttacctgtcgccatgactttcattagtcgtgccacctgcctgctgcaaactgttttttccccggcagatcagaccatgccacttttcctgcgatgcaagctccccctatcctgtcgcattactgctgtctgcattgatacgttttttctgttcatgtgataagaagtcag

SEQ ID NO: 6772 - DNA, 601 bp, Chlorella sorokiniana
  Clone ID: LIB3602-095-Q6-K6-B3
ccgggtcgaccagcgtccggactgctgcactccacctgactgggcgggaaggctgctgtactctactggttcctcgccacccacaacacgttctgggcgcccaagcagaccctgcattgccattctccttcctgctgttcaactgggctgagctgaaccgcatgcaggactacatcaagcccggcaacaacgtgaccgagcccttcagcaacaagatcaagtacgtggtagctcggataccccggctttgaccccctgtcgctcttcaagaacaactttgatgagtggaagctgaaggagatcaagaacgctcgcctggccatgcttgccttcctgggcattgtggagcaacacaacgcgcaggcggtcagtcccctggagcagctgggtgctcacctggccaacccctggaagaaccactttatcaacaacggagtgtccctgcccttcatcaacgacaccgtgcacaatattttgggcgacacaccatgatgccttgtaatgcatcttccagctccgatgagctgtgcgcgagcgcagcttagagagaaccgatcaggctggcacgctgggggacctcccccctgcaagcctgcctgcc

SEQ ID NO: 6773 - DNA, 241 bp, Chlorella sorokiniana
  Clone ID: LIB3602-095-Q6-K6-B4
gctgccgcacaggccgcgtgtgtttgctctaattctgacgggtatgccccctttctatgctagctcctcctgctttcatgcatacacaccctgcacactccttgcccaaagcaacacaatgtgaacctacagcaccaaaaaaaaaaaaaaaaaaaaaaaaaaaaaaaaaaaaaaaaaaaaaaaaaaaaaaaaaaaaaaaaaaaaaaaaacatgcaaaaaaaataaaaaataaaatagtgga

SEQ ID NO: 6774 - DNA, 630 bp, Chlorella sorokiniana
  Clone ID: LIB3602-095-Q6-K6-B5
tcgaccacgcgtccgggccatcatcggcaagctgcaggccgtcaaccggtcatcggcattgagctgcttgctcaaaccctgctgcctgctgtggaggacctggcaacggacaagcactggcgcgtgaggcaggccattatcgagcacacccccatgctggcaacacaagttgggggcggacctgttccagcagaagcttggcaagcagtgcatgctgtggttgcaggactctgtgttcagcattcgtgatgcagcgatccacgtgctgcaggcagtagccaaggatttcgggcctgactgggcgcgcgaccacatcgtgccccaggtcctggcgctggcaggcagcgacaactatctgcaccgcatgacggtgcttagcgcgattggggcgctggctgggtgcgttagcaaggacgtcgtgcacaacagcatgctgccggcagtggtggcatgctccaaggaccgcgtgcccaatgtgcgcttcaacgcggcgaaggtcttgcagcagctggcggcgctgagcgacccgcccgctgtcagccagacaatcaggcccacgctgcaggagttgtccagcggcgacaccgactctgatgtgcgcttctactcagccgccgcgctcgctgccgt

SEQ ID NO: 6775 - DNA, 588 bp, Chlorella sorokiniana
  Clone ID: LIB3602-095-Q6-K6-B6
gcggtgagggctgacatagcgccaccatgcggcagctcatttcttctcggaccctcgtcatccccgatgaggtgtctatcgaggtcaaggcgcggcgggttcgcgtgaagggccctcgcggcacgctgcagcgcgacttcaagcacctggctgtggacatgttcctgactgaggaggagggcaagaaggtgctcaaggtggactgccactttggcaagcgcaagagcctggcgtccatccgcacctgcacctcgcacgtgcagaacatgatcaccggcgtgaccaagggctacgagtacaagatgcgcctggtgtacgcccatttccccatcaacatcaacatcgagaacaagggcggcaaggtggagatccgcaacttcctgggcgagaagattgtgcgcgtggtggacatgctgccgggcgtgacctgcgagcgcagcgccgccgtcaaggacgagctgatcctgaccggcaacgacatcgagctggtgtcccgcagcagcgcgctgatccaccagaagtgcctggtgaagaagaaggacatccgcaagttcctggacggcatctacctcagcgagcgcggcaccc

SEQ ID NO: 6776 - DNA, 207 bp, Chlorella sorokiniana
  unsure (1)..(207): unsure at all n locations; Clone ID: LIB3602-095-Q6-K6-B7
naaaaaaaaaaaaaaaaaaaaaaaaaaaaaaaaaaagaaaagaaaaaaaaaaaagaaaaaaaaataaaaaaaaaaaaacatgcaaaagaaatagaaaatactatagaagggacctaattaaagttaacataggccgagggtaggacaacgttggggagtgggatattccctggggggggccgcactgattgggggtggcgggcacta

SEQ ID NO: 6777 - DNA, 553 bp, Chlorella sorokiniana
  Clone ID: LIB3602-095-Q6-K6-B8
cgaataaaggatagaagccagatggaagctaaaaaagcaactactagaacactacaaaagaaacaaacgaaactacccagacaaaggaaaaaaaaacgggcgcgtggttggcaaggaaccaactttacctgcggcagaagcgcaggtcattgttcaaccatagcaagccgctaaatcaaatttacctggcaccaccttgaaaaccgaagaagaacggaaaaaacctggagtcacaaaattaaatcaggtagcggcacatcctgaataaggaagtcaccttcttcgtgaagagccccagaactgaacgccatttccaaacaataagacaacaagaatggaggaatgcaacgcctcctgtaaggcggcattaagcgagatcaaggggggggcttacaaggacaaggaccacaacactgggcagaacgctaacgccaaggcctttggcttcgttaacgttgtttaataacatgcctaagggcgctttccagggcaagctcaaaatcaccggccgcttatagagttccaattcaggggttaaagcgacctgctcccc

SEQ ID NO: 6778 - DNA, 499 bp, Chlorella sorokiniana
  Clone ID: LIB3602-095-Q6-K6-B9
ggcgggcgcggtgcagcaggagtgcgggctgcccatcacccccgaaggtttgtgaccagcaccctcaatttgggctgaccgaggtggtgtaccagtgggcgcgcggcacgcccttcaaggacatttgcgggctgacagacgtgatggagggcagcattgtgcgggccatggtgcgcctggacgagacgtgcagggagttccgggatgctgcgcgcgtcatgggcaacactgccctgttccagcagatggagaaggcgtcttccgccatcaagcgggacgtcatcttcgccgcctccctctacgtggcgtgagtgtggcagaaagtgcagcggcagctttgagcattagcagaggtatcctgttcatgtctgctgcggaacattgtaaaacaacttaagaaaaaaaaaaaaaaaaaaaaaaaaaaaaaaaaaaaaaaaaaaaaaaaaaaaaaaaaaaaaaaaaaaaaaaaaaaaaaaaaaaaggggcgggccgttttaaa

SEQ ID NO: 6779 - DNA, 322 bp, Chlorella sorokiniana
  Clone ID: LIB3602-095-Q6-K6-C1
gctggaagcgcatggttcacataaggtcatcgtttgtgctccccgcggcttcacctcgtatgccgctccaagtagcgagcggttcatcttttcccacaggcctgtcgcttgtttcaaggctgcactgtgacgcacctcggagcggtgagggcacctttccagctggtagatcctgggctgtgaataagaaccccaacggccagtcctacacggtgctgggcgtggtgaccactggctccatccttgcgggcaatgtgtctgagctgggcctggtgacctccggcggcatggcggcgtggggcaagcacgcgcaggtcaccaa

SEQ ID NO: 6780 - DNA, 507 bp, Chlorella sorokiniana
  Clone ID: LIB3602-095-Q6-K6-C10
gctagctgctcgatgagctagctgctcagcatgggtttgcttcccagcaaggagattgcaaggatgcatgaggtggacgaagcactccgccagatccaactgctggtacgcaccttgcgaccacttgcggcagctgaggcagacgcggggaaacctgccacgccgggcagccaccaagaccggttcaatgccgcatgggtgcacttcatgcagctgctgcacgagagttcggccatccaaaaccgtcttgatgcccagcgcgagggccgctccctgcccatgccgcttcccaccccacccttccgcctgccgccgctgcgggagccggaaacgcaaggcgcacccgagccggaggtagcatgcggagtgcaacccgccacacctgtcggcagcggcagcgcccgcaggggccagccaggcgatggcagcaatagcgaggaggctgctgatgccggtaacgcgggtagtgaggctgtgccgctgcttgcagcggggagcagcagtctg

SEQ ID NO: 6781 - DNA, 606 bp, Chlorella sorokiniana
  Clone ID: LIB3602-095-Q6-K6-C11
ctccatcaaggcagccagcggcaccagccctgcacattcgtgcccctgctggcatttgcagcagcacaactggtggcagcggtggcagcagcggcagcagcagcagtggcggcagcaggatgcagactcttgggcttgctccatctgctgctaggcgggtgcccggcggctcatctgtggtgtgggttgctccaccctcagccgccttcaaaaagaagcagcagctgctgccagcagatggcacctcggccgccacggcagcagcgggtgcgtccggcagcagcgccggagccacggccatgccggtgctggtgggaggcacatctgaggctgtagcaggcggcaatgggctgaaggtcggggcagcacgggtaaagcctggccagcccatcccagcatcagcgcaggcgtctgtttgcaaggcagcgctgtatcggcagtggcagcagctggtggcggcactgcacagtttggcatgcagcggtgggcaggaggcggcgcagcaggcccaggtgtcggcacccggcacagcagatgaagcagtagctgcgccgcaagaagcagcagcggcagctagtcgcagccctgctgagggtctcagctatc

SEQ ID NO: 6782 - DNA, 214 bp, Chlorella sorokiniana
  Clone ID: LIB3602-095-Q6-K6-C12
gcgtttctaaaaaaaaaaaaaaaaaaaaaaaaagggggggaaaaaaaaaaaaaaaaaaaaaaaaaaaaaaaaaaaaaaaaaaaaaaaaaaaaaaaaaaaaaaaaaaaaaaaaaaaaaaaaaaaaaaaaaaaaaaaaaaaaaaagggggggcccttttaagggtcccaatttttcttccccttccttcccacgttttgggtttttttttgggccc

SEQ ID NO: 6783 - DNA, 385 bp, Chlorella sorokiniana
  Clone ID: LIB3602-095-Q6-K6-C2
cctgctggcccgcctgtgcgccctgggcgccggcatgccggcggtgcaggcgcagctgcgcgccacgcacccagacctggccaaccgaaacttagactgaccgagtgttgctgcttggtggtgtcctacactgctgtgttggccgcagttctgttgcgttatatatacatcagggtagccctcgttactacccatgactggcctgcttctgcccatctccaccccactctgcttgccatcgtgcctgcttcacccactgcctgccagcgccatgcgacttgccaccactgccagcttgctgccaccccgccttgacacttgtcatttgaacgcctctgttgcgatgagggatttacagatctgaggaacagtcgcacacgcccaa

SEQ ID NO: 6784 - DNA, 451 bp, Chlorella sorokiniana
  Clone ID: LIB3602-095-Q6-K6-C4
gagctgcagacaaacgagatccgcacggccgcctggccatgattgcgtgcctgggctgcgcggcgcagggcgtcatgacgcagaagggccccttcgccaacctgctggagcacctggccgaccccgtgtccaacaacctgctgggcaacctggccaccatcctgaagcagtaagcgtgctgccccaagccccggcctgggtgtgagggctgccagggcggcggccagccacatctagagcctttgcattccttggctcggggcggcgactggtggcgggccctccggccgtgcctgcctgccgccccgcagcgcaccctcactcaccccacttcacccctgagaagaaatcaactgcccaactcttgttttgttgccgctcctacgcttccgtgtgcctcttgtatgggataattgctgctacactcctgacagtgtaactctccgctgcc

SEQ ID NO: 6785 - DNA, 526 bp, Chlorella sorokiniana
  Clone ID: LIB3602-095-Q6-K6-C5
cgggtcggacccccgccgtccgcaaacttcgtgggaattattttttattaaaaaaaaaaaataaaaaaaaaaaaaaaaaaaaacgccaaaacaaaataataaaaaaaaaaaaagcgcccgttggggttctacgttttagccggcctatttggagaaccaaaatttcttttacttgggggtccttatataaagtctttgctggggggaaccacaacgttaattaaagggaaacacccttgtgacaacccacctttttggccaaccgggggattcccctttttggaaggtgctggaaagaacatacccaagttcccccccccatggtggattgaccaaaaggggcgcgccctgaagggcctctttaaacgcccctgttgtggaggttaaagggagggggacctttaggttaccctaaacctaccgcctcttttttttacttccttccgtcccttttttttttttttttcccttatttcccggccagttctaactggtggtttcctttaagggtaaataggggggtttt

SEQ ID NO: 6786 - DNA, 557 bp, Chlorella sorokiniana
  unsure (1)..(557): unsure at all n locations; Clone ID: LIB3602-095-Q6-K6-C6
gccgcctcagtccgtactaaacaaatcagcacctttcgttcgtcgcctttcattccgctctcgtcctccctgcctacctggtctgcctgccctagtgtgctggactggtagcaccctttgctgccccagcgtctgtctgcctctgcctccttgtgctttcatgcagctttcatgcagcttatgcagcatcgttgcggctgtcccgctgttcacccctttgcctcacctccctgcccctgctagctccttcccctccccacaaatgaacccaacagctggcctcgctcggctgtgaaccagcccctaaccttgccagaacaattcgttcgcttcgcgcgcttgcaccctccatactgcaccgctgccgaccctccttcccttccctcctgcacaccaaaacaccctgctgcacacgtccctgccactcgcccggcgattgatcccgggagggttgaaccctccaacccgctgcgcggttttttcccttcaatttttgcagttgtaacatgtggcagcgcccaanaaaaaaaaaaaaaaaaaaaannnaaaannnnnaa

SEQ ID NO: 6787 - DNA, 615 bp, Chlorella sorokiniana
  Clone ID: LIB3602-095-Q6-K6-C7
cgcggccgacattcacaatcagccccgcagagcccaccacatgctgaccagcagcagggcttcacccggtgtcgccgtgcaggccactggggcgcccaatcggctcggtccgctgcacaggaggcttcaacggctggcggcgtcgcagcagccgcagcagcaggccgcagcgcagcagcaggcggagcagcagcagcagcagtcgtttgtgagcgatgaggaacggcgcacgctgagcgccagccaggtggagttcctggaacgcaagcggcgggcggcggcgggcctggggcccatcttcccagacagctgcacctgcgagcgctgtggcggcagcggagcagcgccgtgccaccagtgcgacggcacgggcgtgaatgcgtcggacaaggcggaggagctgttccgcaacgagcgcaacgtgatcatccagcgcaacggcctggcagacaaccgttggttcttccaagccgatgccccctgctggctgtgccgcggcgggaaaacgctgggctgcccagactgcggtggcagcggcatgcgcagcaggggcggctttgtcgccgactagcgctgtttgcgtggctggcagcagtgcagcagccaagcagcact

SEQ ID NO: 6788 - DNA, 571 bp, Chlorella sorokiniana
  Clone ID: LIB3602-095-Q6-K6-C8
gccagcactgcacctgcctcgcggtggcttgggtgggcgtgcagcgcatgcagcgagcaccgccgcggccctcccgatagtttaagaccccacaaccagctacctctgctcccactactgatgtaacacgcaactgccaaaaaaaaacaaaaaaaaaaaaaaaaagatgaaactaaaagatacccaaaaaaaacaaaaaatgaacagggccggggttttaaaggacccaaactaactgacactagcccacaaataaatagccatattaaagggtgccataaacaaattggagtgaaagaccatttacaccctgaacacggagaaaaccaggaggtcacaaaagttaatggccttgggtccaatccccattaagacctgggtgacagaccagaaaaggccgccaccaagcaccctcacaaaattggacccatcaacaataagtacaggcccccccccgggacatggaacttaaacgccgtcctagttctagatacccacagggcgacctatacaattcaaagttacctacgcccgcatgctacggcttacttcctttattgtgtcaccaaaa

SEQ ID NO: 6789 - DNA, 459 bp, Chlorella sorokiniana
  unsure (1)..(459): unsure at all n locations; Clone ID: LIB3602-095-Q6-K6-C9
cgnaaagcccttgctccggcgcggcccagcggcgcttgctttcatgcagcggttctgccgcagcgcgtcacacggcgggcgctggcgcgcagtttgcacccttcttagtttgtgcccagctgcccctggcgctgcgcggccgctgtaagtaggacccctngaaaaaaaaaaaaaaaaaaaaaaaaaaaaaaaaaaaaaaaaaaaaaaaaaaaaaaaaaaaaaaaaaaaaaaaaaaaaaaaaaaaaaaaaaaataaaaaaaaaaaaaaaaaaaatttaaataaactttacaaaaaaaaaaaaaactattttaaataatgaaaccaaaaataaaaatccactgtccttncatttaacaacttatttacctggggaaaacctggcgtaaaacccaatttaatgcccctccaaaaaaatattccctacagccagcttggttaaaatggaaaaaggccaaaaac

SEQ ID NO: 6790 - DNA, 265 bp, Chlorella sorokiniana
  Clone ID: LIB3602-095-Q6-K6-D1
ggtcgacccagcgtccttactcgtactgtttgatcacgcccagaatcggtggtgcgcacgccgttcgtcagctcgctgcacacccagcccgagcgctatgctccagtgggcctaggagcagccaaggtcattgcggggctcatcctggcggaccgctgggcgcgctgcgcatggcgctctcccgcagctgattgcagctgaggcgaagctgaataaatgcatgcaaatgagcaaaggctgcttgcatcacgagcacgcatggcgc

SEQ ID NO: 6791 - DNA, 551 bp, Chlorella sorokiniana
  unsure (1)..(551): unsure at all n locations; Clone ID: LIB3602-095-Q6-K6-D10
cgcttatccactattgtagattgcgacaaaattgccgctatttatagaggacgtgtgcttgaagagggcaatcattcgcatctcatggcactgaacggctactatgcatacttggttgctgcttccagcacataactggatttctttacgtgctacttgtctgcttgcccactctgtattgtcctgacattgtcttgattgcaattacaaaaagtatggcacagccgcacgcggcgccatcatgttgctgttctcatcagcctctgccgactaccagctcatgtccggaggctgcggaggcagctaaggacggcgccgccgacatgatggggcgggccaaagagagaggcgacgacctggccaacagccccgccggcaaggcggaggacatgattgagaagatccgggcctaaaccaaggctgtaccttgctggctgnggcggcgacaaaaccgagcccaccaaacagccagcggcctatgccggcagccctcgtggccgtgccggccgccggcactcccccaccttgccggcggcgccagcagccccact

SEQ ID NO: 6792 - DNA, 242 bp, Chlorella sorokiniana
  Clone ID: LIB3602-095-Q6-K6-D11
gcgagtaggttccttacacggtaagggtgtgcgtctcacgcgggggcctgcaaaggccttgcgcgtggccgccgccgccgcgccggccccccggccgcggcgccggccggccagctactgccggcggctttttgtggatctagccgcctgaaaccgtcgcgcggcggcgcggcgccactagcagcgccgcaaccgctctctttccaccgggaggcatggtgtggtgaggtgtggtgtggtgt

SEQ ID NO: 6793 - DNA, 421 bp, Chlorella sorokiniana
  Clone ID: LIB3602-095-Q6-K6-D12
gttgtggcctaacgctgtaccaagtctctgctgaccgccgtcccctccggccgtgccccagcgcccctgctcacctcccctcttgagactgctcctccgtgcttgcggcgaatgggctcctgtagattagacagcccccatgcgtacccaccactgtgccctcttttcctgtactctcgccggccgcggcgcgcacacacatgctcgctcgaaaacccaacgaagccgcccgcccgccatacacacgcactgctgtatcactgatgcacccaccgtgtgagccctttttcccatgcctgtgctcaccccatgtaacccagatagagctcaaaaaaaaaaaaaaaaaaaaaaaaaaaaaaaaaaaaaaaaaaaaaaaaaaaaaaaaaaaaaaaaaaaaaaaaaaaaaaggggcggcccgctt

SEQ ID NO: 6794 - DNA, 583 bp, Chlorella sorokiniana
  Clone ID: LIB3602-095-Q6-K6-D2
gcgttcggcggtgggcggcaccacgcaatacgcaggcgccgcacagctgctgggcctgccctgcaccacccaagcagacgtgtacagcctgggagtgctgctcacggtgctgtgcaccggccgcccactggcggcgcgcggccagctgtgcctgcccaccgcgcccgacgactgcccgcagcgggggctggagctgattcaggagtgtattcgacccgacccgctgcgccggcccaggcggaggaagcgctgcgccgcctgcgcgccagtgatgtgggctgatagcctcctgagcagcgtgccctggaggggagttgccgtgagctgttgcgattgcaattgtacagtcagatatttgttgcacctaggaggcatgttgcctcagtgctgcccacgataatgtgtaccttctcaaattaaagaatgcgtgtgttttaaaagaatttgtgagttttagataaaacattctctccttcagcctgctctcctgcaatcacgcccttttgctgcaaacccacccgttcaaactaagaatgaatatccatactaattgggcacaaaaacaagagaaaggcatggcgct

SEQ ID NO: 6795 - DNA, 485 bp, Chlorella sorokiniana
  Clone ID: LIB3602-095-Q6-K6-D3
ccgggttcgaccagcgttcgcgctcgtctactttgttgactctgggggaggagagctcactgagtatgcaaccgatgagcagggtatcccgcgccgcgggccggagggcaagctgctgggccgcgctgtggtccacgcacccagcgggcacaaggcggtgccagatggcatgacaattgatgcagatggcaacctgtgggtggctattggcgagagcggcagcgtggtgtgctacagcgctgccacaggcgaggagctgcaccgcgtggtgctgccggtgaagcggcccaccgcctgcacatttggcggggaccagctgcagcacctgtatgtcactaacgggtggaaacaggcgagggcgcctcggcacaccacggcgggctgttcagggtcacaatcccgggggtcaagggagcggcgccagcgtacaagtacccactttgatttttttttgtgcatcttcagcagttgtaagcacctcacct

SEQ ID NO: 6796 - DNA, 162 bp, Chlorella sorokiniana
  unsure (1)..(162): unsure at all n locations; Clone ID: LIB3602-095-Q6-K6-D4
agtaacgccagtgacgactgcgccatactgaagattcggcaagaagtggagaagaacggcaagaccaccatcaagtgccccaagatccagcgcctggtgacgccccagtgctgcagcgcaagcgccggcgggccgncatcaagaaaggagcgcatctcgcgc

SEQ ID NO: 6797 - DNA, 524 bp, Chlorella sorokiniana
  Clone ID: LIB3602-095-Q6-K6-D5
cgtgcgagtgctggcggttgggcacaactgcctcttctcggggtcgtgggacaagaccgtgcgggtgtggtctgcggagaagctgacgtgcaccaaggtgctggaggggcacaacgaggcggtgctggcgctggcggtgggcgacctgttcatggccagcggcagctacgacaccaccattcgcttctgggacctcgcctcgtggcagtgcgtgcgcaaggcggaggggcatgatgatgcagtgcgcgtgctggcggcagccgacggcacggtggttgtcagcggcgcgtatgatggtgcagtgggcatctggtgacgctcaccatttgctgcaggctcgcgccgagccagccgccaccagcagcagcaccagcagccgtcgcagggccattccctgccggctctaggttagcaggacatgttaggcacgatacataacgctgcgctccctgccccctcactagctacctttcattagcctctaatagtctctctgtgtgtcgtatgcgtagcgcgcagttttc

SEQ ID NO: 6798 - DNA, 586 bp, Chlorella sorokiniana
  unsure (1)..(586): unsure at all n locations; Clone ID: LIB3602-095-Q6-K6-D6
cggccgcgtgggcggncgcgtgggtgttgcggcagcaagtgcggcagcaccagccggctctcctggcaagggctcccgggcggcagcaacggcggcggcagccaagctgagcagcccgcagaaggtggagtgcagaagcgcagctctcctgccaaacctgccaaggcagcagttgttgcagtggcggcaggcgcggcagcaggtgcccccgtgcgcacatcccctcgcaagctggccctgagcttggcgatggatgaagcagccggcagcaaggccagcaaggctgcacccgcagctggcgccaacccgctggtggcggcgcgtgtggtgaagagcggcgcggcggctcaggcagctgccaagctgcgcagctcgccacgcaagcaggcggctgctgcggtggccgctgtggcggtggcgccgcggcgccgcggtctggcgcagcagccgtgatggctgtgcagtatcagccggctaggccaggtaggcaggcaggctagtaataccaaaacaacagactaactgacccagttgacaagattgtaggatgccagacaggccagattgaattggatattggagccgt

SEQ ID NO: 6799 - DNA, 125 bp, Chlorella sorokiniana
  unsure (1)..(125): unsure at all n locations; Clone ID: LIB3602-095-Q6-K6-D7
naaaaaaaaaaaaaaaaaaaaaaaaaaaaaaaaaaaaaaaaaaaaaaaaaaaaaaaaaaaaaaaaaaaaggacgaacgaatataaaggatccaaagcttacgaacacaaagcaatgcaacgatat

SEQ ID NO: 6800 - DNA, 426 bp, Chlorella sorokiniana
  Clone ID: LIB3602-095-Q6-K6-D8
aaatgctttcgtgcgccggcgcagacggctgcagacaggcatgcgcggtgcgttcggcaagccatttggtgtgtgcgcgcgcgtgggcatcggtcagatcctgctgtccatccgctgcaaggacacgcacgctgcggtggcggaggaggccctccgtcgtgccaagttcaagttccccgggcgccagaagatcgtggctagcaggaactggggcttcactccctacctgcgcgacgattacttggagtggaagcgtgagggccgccttgtgaacgacggtgtgaatgccaagctgcttggcaaccacggcccgctggacgcacgggagcccggccagattttcgagggtcctgcccgtctgtggcgtgtgccggtgcatgcctaacatgttgcttgggttctaaagatgtaacgaacatctgagca

SEQ ID NO: 6801 - DNA, 435 bp, Chlorella sorokiniana
  unsure (1)..(435): unsure at all n locations; Clone ID: LIB3602-095-Q6-K6-D9
tccgcgncagcggggggttgtccaggctggggctgcgccagcgacagggccgcggcgaggcagcagagcgctctgcccgttcatcataagtaagctgccacgcgagccgggttgcccctgtggtgcggccgaccagccgcaggctccgacatgttttgctcccctgtacgtctcccttcgccctgcctctcttccacactctacactctgctctaacctcttcctctcttctctgtcttcccctcttttcactcccgcctccactctctgccctcttcctcagctgaactgcttgagggtgccccactgcatgctcccgagctcatgcattgtgcactgcattgcatcttgcccagcgcctaacaacgcgggcaagccacgtgtggcatttacagccggttggaacaatgtgggacagggtaagagagcaggcgt

SEQ ID NO: 6802 - DNA, 293 bp, Chlorella sorokiniana
  unsure (1)..(293): unsure at all n locations; Clone ID: LIB3602-095-Q6-K6-E1
cgtgggggggggcatgtatgcccccggcctgggttggcaccccgtatgtgcccttgcaattggcgccggcgcacagtcccgcgctgccccggcccctttcctctcgcntttgctccacnngcttgtagcccctgccgnnccatacccagcncnnctcccctgctgctttcttgtgtttcactccgctgnnttcgttgccaagcactgtgtgttctggtcgctaccccaccggcaccctcaatgcgccactgtcccagcccaactgggcggcatgcttgtaaacgcttttctgc

SEQ ID NO: 6803 - DNA, 358 bp, Chlorella sorokiniana
  unsure (1)..(358): unsure at all n locations; Clone ID: LIB3602-095-Q6-K6-E10
canaaggcgccaagtcggccaagtggaggcggcccgcaaggccaaggccgccgcgcgccccgcggtgaagaaggtgtccaaggccttctacagcaccatgatcaccgactcggactacgtgggcgaggactacgaggtgttcagcagctggctgggcaccacccagtgagcgccccggccggagtagctccccagaggaggcgagcgcggcgcggcggcgccgcccgccgcgggcggcggagggtcaccggcccgcggcggcggccgctgcgcgcgcgccgccccgagcgttgacagagaggcccgcccagttgagggcgcacagaagtacacgcacccgtgtaacacgcacacacgc

SEQ ID NO: 6804 - DNA, 453 bp, Chlorella sorokiniana
  unsure (1)..(453): unsure at all n locations; Clone ID: LIB3602-095-Q6-K6-E11
gtggtctactcctggncggtccgcctgcaggnagaggaggcggggcctgagttcgccaactgctggatgacagaggcggtgcagcccatctcccaaaacctgtttggtagcgggctgtaaacgagcagatgaggccggcgtgtttcgggcctgccaaagcccctttcagcggcacgtgatgtgcctgccctgccaccgtgtcgtttgcttttgtatgtgcgtctgctgttgctctctgcagcggcacgttttccctcggatctgatacgaactgtttccttctctgagcgagttgtttgctctctttccattgcctgactggctgcagcgccgccgcgcttagccactctgtacactgcaatagaaccccgctgctgtattatacgccggcacgtgccgcttgcttacatgttctgacgcgttggatcgacactatgcaacagtacactgttt

SEQ ID NO: 6805 - DNA, 538 bp, Chlorella sorokiniana
  Clone ID: LIB3602-095-Q6-K6-E12
gcccttgcccacgtcctgagcctctccgcctgcagtgtgggcgtgcgcaagcatcgggcggcggagtcgcgtggcttggcggactagaggaagcggcgcacgatggtgaagattcagccgcccgagctgaagggcatgatggacaagaagctgagcgtcaagctgaacgcaaaccgccacgtgacgggcgtgctgcgcggctttgaccagttcatgaacctggtgctggacaacacggtggacgagaagctgaaggcggacctgggcatggtggtcattcgcggcgcgtcgatcatcacaattgaggctctggagcgggtagaccgcggcccctgaagctgttgatcgatagataggtggcgtgcaggctggctccttgcgtgcaggctggctctgcctatcatcaatgacttgccgccagtgctcctggccacctgcccgctgctccttccacttgttgctcctgttcactgcttgactgctctcttttgacatcctgatttgctcagcttgataccaaccgtgtgacttctcaacc

SEQ ID NO: 6806 - DNA, 454 bp, Chlorella sorokiniana
  Clone ID: LIB3602-095-Q6-K6-E2
gcgttctgagcgcccggcctagctgccctgcgccgctcgcccgccccgactgccgctgagctcccacccagcgtgctgcaccacccgactgccgctgatcataaccccagcgcgctgctgcacccatctccccctctttacccccacctgcctgcccctgttttcctcccctctttttccaaattgtccgacccgcccctcccgggagtgtgatctcactcggtgccattccctcagaccctttgcccaacccccatgccccaccgcaccccgtccccctttccctcctgaagaacccccaaacccctgccgtttcattcttttcactgtacaactgcacccgctctgagctcagagcccgcctgtgtttcattgaaactgccgcccccagcgcactgtactgcccacctccgcgaccggcggcccccttgcccctgtaactactagcaaggtg

SEQ ID NO: 6807 - DNA, 575 bp, Chlorella sorokiniana
  Clone ID: LIB3602-095-Q6-K6-E4
gtttgcgtcaggagtgaaggagctgcaggcttcgctgcaccaggccatcatcctgctgctgttcaacgagcatgagcagcttagctttgccgacatccaggcagctgtcaggctggaggaagcggagctgcggcgcacactggccagcctgtcgattgccaaggagcgggtgctgcttaaggagccggcagggtcagaggtggcgcgcaccgatgtgttcaaagtcaacccaggctacacatcgcgcatgttccgtgtgaaggtcaacaacctgcagatgcacgacagcgacgaggacagcaagaagaccaacgagcaggtgctgcaggaccgcttccaccagattgatgctgccattgtacgcatcatgaagatgcgcaagaccctgagccacaacctgctgctgactgagctggcatcgcagctgcgcttcccggttgggcagtcggatgtgaagaagcgtgtggagtcgttgattgatcgcgagtacctgcagcgcactgagcacggctacgaataccttgcatgacagcagctgcacctgtgtacatgtccctgctgtaaaataggcttac

SEQ ID NO: 6808 - DNA, 485 bp, Chlorella sorokiniana
  Clone ID: LIB3602-095-Q6-K6-E5
ggtcgaacaagcgtccgggagcccccctttggcgctatgtacacgtccggcctcaagtctgcccaggtcgcgcctcaacctccctgcgccggcagcaggaggaggatgcggccgctgaggcaggccaggagggcaaggagatggtggccgcctaagccagctggactcgccacagctcctcgcctttcaagcctttcaggctggcgtagcgctgtccgcagcagccgccagtcagctgcaagtgtacttcagcctttgttgaactcgctgccgcctctgattgcgccagtcagcagctactttgcccaacacacgccggggggttccctgggcgggcttccatcccgagcaataatgccatgcagcgctgaacgccacacgacacacccctttcagagaactgcctttcatctcgccctcagctgccatcccctgcctagcgcgatagcgtgcatgcaggcatggcacatgtaaatacactgctg

SEQ ID NO: 6809 - DNA, 136 bp, Chlorella sorokiniana
  unsure (1)..(136): unsure at all n locations; Clone ID: LIB3602-095-Q6-K6-E6
cccgggtcgaacccaacgcgtccgnaaaaaaaaaaaaaaaaaaaaaaaaaaaaaaaaaaaaaaaaaaaaaaaaaaaaaaaaaaaaaaaaaaaaaaaaaaaaaaaaaaaaaaaagggcggcccgttttaagaagaac

SEQ ID NO: 6810 - DNA, 458 bp, Chlorella sorokiniana
  unsure (1)..(458): unsure at all n locations; Clone ID: LIB3602-095-Q6-K6-E7
caacattttgccatgcatgcatgtacatctacctccgactgccgctcactgctgacggtggccctcttggcaggcatgccaacttgcgcttgcaaagactgcgctgcgagtggtgaagggacggttccatgcgctcccctgttatggatgcttggcattgctgcgtttcatgtgtgtgcaagcaatgccagccaagaactgaaggtggacggttgctcctaccgagcatcctgctcagctgactgtccctgctgcatgcacgcagcatagctgtgcatgctttgccaaccacaagggctgagctactttttttaaatggtgttcaatatgccaccttgaaacacgggacccatgaaaaaaaaaaaaaaaaaaaaaaaaaaaaaaaaaaaaaaaaaaanaaaaaaaaaaaaaaaaaaaaaaaaaaaaaaaaaaaaaaaaaaggggcggcccgttttaaa

SEQ ID NO: 6811 - DNA, 499 bp, Chlorella sorokiniana
  unsure (1)..(499): unsure at all n locations; Clone ID: LIB3602-095-Q6-K6-E8
cgagnacttcattgtgcacctgctggtagactgcaacctgtgcgccatccacgccaagcgcgtcaccatcatgcccaaggacatgcagttggcgcgccgcattcgcggccccgtctacggcgtgtgcagctattgagggccttgtgccatgcagcagcatcgcgctcacatttggcctatcagtggctcaatttgggcagggctgctgccagccaggccccagccattgtgcctagcccaatggcctttcgtttgtactctaggtagccagcagcagcaggagcagcaggagcaacacacactgaccgcaccacacgcaatacttgctttgcctggaggactttaacattgcctcctcaccaccaaccaaaccgcacgttcagcagccactccctctgtgtaaagcacgacgcactaaaaaaaaaaaaaaaaaaaaaaagggaatggatagaaaaggagaaagatgaacaaaccaaaaggagctaaaggagnntgatga

SEQ ID NO: 6812 - DNA, 453 bp, Chlorella sorokiniana
  unsure (1)..(453): unsure at all n locations; Clone ID: LIB3602-095-Q6-K6-E9
ngacctgtctggncttgtatgggcagccggngcagcaggcacaacagcttggacagcaggaggagcagctgcagccgcagccggctgaggaggccaaagccgctgccccaccaacctccgagctggcggcgctagaggtgcaaggcagcgatgcggagcatgagagcagggagcagcaagctgacaatccttgggcacagctattcgttccccagtgatagatggtgcatgcactgcctgtcaaatctttggcatgtagctcaagctgcgcaaaaaaaaaaaaaaaaaaaaaaaaaaaaaaaaaaaaaaaaaaaaaaaaaaaaaaaaaaaaaaaaaaaaaaaaaaaaaaaaaaaaaaaaaaaaaaaaaaaaagggggcggcccgttttaaaagaatccaagtttacttcacccgggcatgcaaacgtaaaagatttttttatagggccaccca

SEQ ID NO: 6813 - DNA, 560 bp, Chlorella sorokiniana
  unsure (1)..(560): unsure at all n locations; Clone ID: LIB3602-095-Q6-K6-F1
ttggtgaggccttcgaccccctgggcctggctgacgaccccgacaccttcgctgagctgaaggttaaggagctgaagaacggccgcctggccatggtgtccatgctcggcttcggcgtgcagggcctgatcacccgcaagggccccattgagaacctggctgaccacctggcggcccccgacgccaccaacttctgggtggactacgcccccaagtccgccggcatcggctactaagctgtttccgtcgcttgactggcgccgcccgctcgcccgcccgctgagtttacggccactcgcggcaacaggcagcagcggcgtctgtactttctgactcctccggcgattgctggtggcgcaccttgcttgctttgatgcttgcttcgggggcctaggcaccctcccatgcaacacatgaacccccaccacccctgccaacccaagtcttagcctgtgtttgcgcgcggtgaaggcaatgagaagaacagacccttgtaccctgcctcgctgctgcgtttttgctgcaagacatgagcctaannnaaaaaaaaaannanaaaa

SEQ ID NO: 6814 - DNA, 364 bp, Chlorella sorokiniana
  Clone ID: LIB3602-095-Q6-K6-F10
taaaaaaaaaaaaaaaaaaaaaaaaaaaaaaaaaaaaaaaaaaaaaaaaaaaaaaaaaaaaaaaaaaaaaaaaaaaaaaaaaaaaaaaaaaaacaatacaaaaaaagggcgcgcttgttttggggagacctaagtttacttccccggccttgcggaggacatcgtttttattggggggaaccttagtttaaactccactgggccgcgggttaaaaaccggtcgggattgggaaaaactggggtgttaccaaatttaatccgcttggcagcggatttcccttttgaagagctggcttaatagcgaaggggccccacccgttcgcccttcataaagttgggcacccggattggaaaagggcacccc

SEQ ID NO: 6815 - DNA, 452 bp, Chlorella sorokiniana
  unsure (1)..(452): unsure at all n locations; Clone ID: LIB3602-095-Q6-K6-F11
gcccggcagcattgagggcgcggctgagcccccagctggcgcaggcggccgagttcacgccccaagagctggagcacatcgacgagggccgcttcaacgagtacctgggcatggctgcgcgcgacctgctgtcggacggcatccaagcgcctgattgacgacgccaaccggctggagcctttcttcctcaacctggcgggcggccaggagtgagcgcggcagaccagcggcaagcccgcctgcctgaccaccccctgtggcgcacggcaaacctgcccgcctgaccaccccctgtggcttggggcacacggccggccggccattttcccgcgaggccggctgcacagctgtgctgcctcgtttgcactcatgcgcaactgtttcactcggttnttncgtgtagcgtgcccgtttcatgcatccccgatcctgcatcagtagtgctattcccg

SEQ ID NO: 6816 - DNA, 589 bp, Chlorella sorokiniana
  Clone ID: LIB3602-095-Q6-K6-F12
cgtcggaacttccacgacgggcctgttcctgtacacctggggcgacgccaacaacaactacgactcgtacatggcgcagcgcgaggccggcatcgacgccatcatcatggatgacgtggagaagctggccaaggcgcgcaagaagcaggcctcgctgttcgccaccaagtcgctgcggtcgcccgcctccgcgcaggacattgagaggctggccagcggcctgccctccctctccctggagcgcctcaccagcgggctgggcagcatgcacatggtggccatcagccccatcggcagccccgacaatccagacctggcgacccttgccagcggctcgctgtccccacatgcggcagccatggccagcctggccagcggctcgctgtccccacacgcagcagctggttccaccgccacgttcagcctggtgcccatccaaaacggggaggcagcgggctttgatggcctgagcaagtagaggtgcaccgacctgacaagcagacagccccagcagaccagcccaacatctgagggccaggcccccgtcccctgtgcccgccagttttcagatttcctgcctccgctggcc

SEQ ID NO: 6817 - DNA, 611 bp, Chlorella sorokiniana
  unsure (1)..(611): unsure at all n locations; Clone ID: LIB3602-095-Q6-K6-F2
cggncgcgtgggagcgggccgaggcttatgtgaaggagtaccgcgcgcaggagctggaccgcatccggttgaagcgcgaggccaaggccaagagcggcttctatgtcgagcccgaggccaagctggtgttcgtgatccgcatccgcggtgtgaacgacatcgaccccaagaccaagaagatcctgcaggtgctgcgcctgcgccagatcaacatgggcgtcttcctcaaggtgaacaaggcgaccatgaacatgctgcagcgggtggagccctacgtggcgtacggctaccccaacctgaagaccgtcaaggagctgatctacaagcgcggctttggcaaggtcaacaagcagcgcatcccgctcaccgacaactcggtgatcgagcaggtgctgggcgacaaggacatcatctgcgtggaggacctggtgcacgagatcttcaccgtgggccccaacttcaagcaggccaacaacttcctgtggcccttcaagctgtcctcccccaagggcggcatcgacaagaagcgcctgcactacatcgagggcggccaggccggcaaccgccaggagtacatcaacaacctggtgcgcgccatgaactgagcgctg

SEQ ID NO: 6818 - DNA, 587 bp, Chlorella sorokiniana
  unsure (1)..(587): unsure at all n locations; Clone ID: LIB3602-095-Q6-K6-F3
cggngaagctctcgcgagcgccgncctgaactgattgcggctgtggagggcgatgactggagcgaggtggtccagcagcagacggcagaggctgcggttgcgggccgtggacaggagcaggaggcggctgcggcagacgcctcggcgcagcagccgccggtgaccccatttgcacgggcctcagtgcaccgtgctgtgggtgagacggcagcggcagagcagcagcaggtggagatgactgtggaggcggttgaccatgcgctggacgatgtgcggccgtatttgattgccgacggcggcaacgtggaggttgtggcggtggagaatggccgcgtcttcctgcagctccagggcgcgtgcggcacgtgcgcggcctccagcgcgaccatgaagatgggcattgagcgctgcctgaaggcggcctttggcgagcagctggtggaggtgctgcaggtgggcggccaagaggacaaccgcgcgacagcggagagcgtggacatgcacctcaacatgctgcgcggcgcggtggcggcgtatggtggcagcgtggaggtggtgggtgttgagcagggtgtgtgcacggtgca

SEQ ID NO: 6819 - DNA, 354 bp, Chlorella sorokiniana
  unsure (1)..(354): unsure at all n locations; Clone ID: LIB3602-095-Q6-K6-F4
gcttgcgctgctgccttgcccacgctttttgctgtggncccttgaactcaacaagggcaagccatgctggctggctcaggatggcatggccaatgcccaagcggcagcttgtcaggatgacaatttttgtgccagcggccaacgccagtccagagagcctcctgccaagctggcctgcatggatttcgcgtgctgcatgcagttgcatcgactcccccacaacagctcaccccctccctattggtgtatgaaaacatgcatcccaatcaccggccctttgcttgccagcctaccactccactgaattctagcttgacttgttatccagcctcggccatgtaattgcgcaacaag

SEQ ID NO: 6820 - DNA, 123 bp, Chlorella sorokiniana
  unsure (1)..(123): unsure at all n locations; Clone ID: LIB3602-095-Q6-K6-F5
naaaaaaaaaaaaaaaaaaaaaaaaaaaaaaaaaaaaaaaaaagggcggacagatataaaggaaacacaagactaacaaacacaaagacatgcggacgtcatagtctaatggtatcgagtcat

SEQ ID NO: 6821 - DNA, 590 bp, Chlorella sorokiniana
  unsure (1)..(590): unsure at all n locations; Clone ID: LIB3602-095-Q6-K6-F6
gcgttcgcgctgggnacgcgtggcggcgtacgaggtgcttcaggaccccttcagcgtggacgacggcacgctgacgcgcaccatgaagccgaggcgggacgccatcttcaaaagtatgccgctgaggtggcgcgtctgcagtcgcacctgcgctgatccggcagtgccccgtgcattgtcagcgccagaacacccagcagtgcccaggagcgctgccgcgctggatcgccagccccatgtgcgggcctgtgaacctactggaccggcctcgcagctcagctagttgcttgcccagttgggtgttacaaatgaatgtcgccgctcagcttggccagcagctttctcacgcaagcccagcacctttgcgggtacagttttgcgatacaaatcagatgccagcgcgcaatatgtgactgcgcttgtctgcgagcaggcttaacccagccagctctgcccagtttgggcctctatctaagggctgcactttgcagttttccccgaccaatcgggcacctgccagccatgccaatgcctcttacctcgccaccccaaaacctgtggggttggccatgtgcaatcacgctccagtt

SEQ ID NO: 6822 - DNA, 89 bp, Chlorella sorokiniana
  unsure (1)..(89): unsure at all n locations; Clone ID: LIB3602-095-Q6-K6-F7
tcccggngtcgacccacgccgtccgnaaaaaaaaaaaaaaaaaaaaaaaaaaaaaaaaaaaaaaaaaaaaaaaaaaaatgaaaggaaaa

SEQ ID NO: 6823 - DNA, 262 bp, Chlorella sorokiniana
  Clone ID: LIB3602-095-Q6-K6-F8
ccctgctcacctcccctcttgagactgctcctccgtgcttgcggcgaatgggctcctgtagattagacagcccccatgcgtacccaccactgtgccctcttttcctgtactctcgccggccgcggcgcgcacacacatgctcgctcgaaaacccaacgaagccgcccgcccgccatacacacgcactgctgtatcactgatgcacccaccgtgtgagccctttttcccatgcctgtgctcaccccatgtaatccagatagag

SEQ ID NO: 6824 - DNA, 305 bp, Chlorella sorokiniana
  unsure (1)..(305): unsure at all n locations; Clone ID: LIB3602-095-Q6-K6-F9
caccacccctttgcaacaccacctgnactaaaaaaaaaaaaaaaaaaaaaaaaaaaaaaaaaaaaaaaaaaaaaaaaaaagacaaaacaaaaataaaggatccaagactaaacgaacacaagcatacaacaaggggcggcccctctaggggccccaagtttccgtcccactggccctggccgacgtcctaacgctcttttttctggggcaccccccaattcgcattcccctgggcacggcggtttaacaccagttggcccttggaaaaacccggcgtttccccaacttatgccccctcggaaccg

SEQ ID NO: 6825 - DNA, 299 bp, Chlorella sorokiniana
  unsure (1)..(299): unsure at all n locations; Clone ID: LIB3602-095-Q6-K6-G1
cgggttgacccagcgttttttgctggnatgcaacatgtgcggcgggcggcgcagcgaggccgagttccttgcggagctggaggccgccgactgagcggcagtgttgcggcatcctcgctcggccagcatgtgccaggcggcggctgtgtgttgcacgttgcagggtgcctgcaaggcagcggggccgccgctgctgcggctgagctgcgagcggtggagcacagcactgcagcactgaccagtcttcagttttaattgtgattgtttccatatttgacgtgtaactaccaggggcnnna

SEQ ID NO: 6826 - DNA, 511 bp, Chlorella sorokiniana
  Clone ID: LIB3602-095-Q6-K6-G10
gaccctgaacttagtgctgctgctgcgccgaggcatgccaatatcggtgaagatggtggcgggcaagaccatcacctttgaggtggacacaggcgacacgtaactacaacgtgaagtgtaagatgcaggactaggagggaatcccccctggacagctacacctaatttttgaaggactgctgcttgatgatgggcgcaccctgcacgactacatcatagcataaggagatcacgctatacctggtgctggatctgtgcagtgacctctacaactgtgacgaactcacccacctgctttgacacacatgatgctctgtatgagcggtgcacatcctgcacatatagcatcctggcctgtactctgagcctactgtacctgaccattgtaaccgatatgctctatcacgaagcaaccaaccctctcgctcttcttcttcattacatgagtccattctagagcacacaatttaacatactgcactatgatacaatgtacgtctgttatacagtg

SEQ ID NO: 6827 - DNA, 606 bp, Chlorella sorokiniana
  Clone ID: LIB3602-095-Q6-K6-G11
atctgttcttcctggtccgcacatctccccttacttctggtccgcgctcggcattagcctgtgcgtggggctgtcaatcatcggcgccgcctggggcatcttcatcaccggctccagcctggtgggtgccgccatccgggagccgcgcattacatctaagaacctcatcagcatcatcttctgtgaggcggtggccatctacggagtgatcgtggccatcatcctgcagaccaaggtggaggcagtgaagcacaaccccgacggctcctacggcctggcagcagccaatgcaggctacgccatcctgggtgcaggctcggtcacaggctgggccaacctggcatgcggcctgtctgttggcattgtgggctcctcagcggcgctgtcggatgcagccaactccacgctctttgtcaagatcctggtggtggagatcttcgcatcggcgctgggcctgtttggtgtgatcatcggcatcatcatggcaggcaatgccaacttcactgcgcaaggctgaccttgcagcaagcagcgcggctgtgctgccacgacagcggcagccatgcggttagcaagcttggaacatttgccgctgcttccttcctg

SEQ ID NO: 6828 - DNA, 517 bp, Chlorella sorokiniana
  unsure (1)..(517): unsure at all n locations; Clone ID: LIB3602-095-Q6-K6-G12
cccacgcccgtccgggcagnaaggggcttcatcccgcttgtccacctnacctgnaccaactacaagctgggtgactatgtggacatcaaggtcaacgccgcggtgcacaagggcatgccccacaagttctaccacggcaagactggctgcgtgtggaatgtgaccaagcgcgccgtgggcgtggagctgctcaagcaggtcaacgggcggtacatcaagaagcgcatccacgtgcgcatcgagcacgtgacccccagccgctgccacgaggagttcctgcgccgctgcaaggagaacgacgcggcgcggcacgcggccaaggtggagggcaagccgctgccggtgctcaagcgccagcccaagggcccccgcaccgaggccatcatgctggagaacgtgaagatggagaccatcacggccatcccctacgatatcctcaagagggcgtgctctgagcgtgatcggcggcgacgttccgttgattgcggctgcagcttagtgagatgtaaccccgcag

SEQ ID NO: 6829 - DNA, 615 bp, Chlorella sorokiniana
  unsure (1)..(615): unsure at all n locations; Clone ID: LIB3602-095-Q6-K6-G2
ccacgcgtccgnaaaaaaaaaaaaaaaaaaaaaaaaaaaaaaaaagggaaaaaaaaaaaaaaaaaaaaaaaagataaagaacaacaaaaaatacaaaaataataaatctaaaaataatgaaacaataaggggggtcctttggagggggccaaacttttttcacgctgggtgaaccataatgttctttatttagagccccttgaattcaaatccccttgtccgccagtttaacaacatcgcgattggaaaaccccgggtttccccaaattaaatcgccttgcgctaaaatcccatttggaccgcgcggtgtattggcaaataagcccgccccggttgccctttttaaacgctgcgtaaccgttatagttaacagggccctcccttttactgtttaatataactgtgctggctttgtgggcaccccccacgggtccccttacattgcccagagccgtaggcccccttctatttcgattgtttacttccttttggcgcctcgtcccgggttttcccgttaaggttttaaattgagggtcttcgcttctatgggcacccgaatatacggttttcacggcctttgaccccaaaaaactgattttggtggtgggctctcgt

SEQ ID NO: 6830 - DNA, 434 bp, Chlorella sorokiniana
  Clone ID: LIB3602-095-Q6-K6-G3
ggcgtcgcagcgcgcagcgttcttgcgggactgcaagcggccgctgagcaacctgggccgcttctggtcgggtgtgcactcggtggtgcggcggttcagccgggaacctgcagaggaggcggaggaggcgcatgtggactgaaaaccttcctaaatcataattgctgctctgctcgtctgctgctatgtctcctgcttgcaccgcttcgtctcggctcgccgcctctgccgcccctcggctgccgctctcaacttgccgctgttgcttgctccctgctgctgtggtctacatgctcccgcagctcagctatacacctggctgcctctgcctgcacatcacctctacgctcctctttcttcctttttcttccggcacataatgtgtatcgttcataactctcagttctgcggaatcactgcaaccgcgcacacag

SEQ ID NO: 6831 - DNA, 620 bp, Chlorella sorokiniana
  unsure (1)..(620): unsure at all n locations; Clone ID: LIB3602-095-Q6-K6-G4
gtagcacccctgtctggcgtgcgggcccctttggccacaanacgctctgcaatgcctgcggcgtgcgctggtgaagtactccagggcaagaagtgagtgggccctcctcggccggccccgctgggcaagtgaagcccgggccagcgctgcaacgcgctcgccagtagcgctaccgcaccgtgcgcttggatggcgcaggcatgcgcctttgcagccgacgtgcgcctttgcagaccagccagcgcagagatgcgcgcctggtgctgcaccagtgcagtagctgcctagtggcagctctcgcatcccatgcttcccacctgcctgcttcccacctgcctgctcccagtggctgctgccgcctcagcgcagcagcctagcacagttagagagacctaggcggccccgttttcccctgccgcacggttttggtgtttgtgatgtaccccctctctttgttcattcccctcggacctatgacccgcttctctcgctgacgcctcctcgcctcctgaccatgcttgctttgttggcttgaccctgcttttcgcccaccctgtgattgtactacttcttttctcctttagttcgatgtgcccgcggctagcgcctgtcctgcactc

SEQ ID NO: 6832 - DNA, 306 bp, Chlorella sorokiniana
  unsure (1)..(306): unsure at all n locations; Clone ID: LIB3602-095-Q6-K6-G6
naaaaaaaaaaaaaaaaaaaaaaaaaaaaaaaaaaaaaaaaaaaaaaaaaaaaaaaaaaacaaaaagaaaaaaaaaaaaaaaacaaaaaaaacacaaaaaaaaaaaggggcggacctttttaaagaacccacctttcagtgagccgtccgtgccacagttttgacttctttttaaaatgccgcctaaattccattttaccgggccgtagttttacaacccccgcttccggggaaaaccccgggggtgaccaaactaaataggcttggccctaaatccctttttcgcaggttggcttattaatggga

SEQ ID NO: 6833 - DNA, 245 bp, Chlorella sorokiniana
  Clone ID: LIB3602-095-Q6-K6-G7
tgctgtgtatgatagcccctatttcggccgcttcaggtcgattttgtttccacactgtgcccctttcttgtcccccctctcacctgatccgaatctctttctcagcctgaccccgccccacccagcaccggcgggctgcacctcgagcattgccttccaccctgcaactgagcgcctgagcgtgggacttgcactccattggcctcggggcagggccacttgcaacgatgtaaataatgaggaac

SEQ ID NO: 6834 - DNA, 406 bp, Chlorella sorokiniana
  Clone ID: LIB3602-095-Q6-K6-G8
ccccgccctgctggccgccctgctggctgtgcacctggctgtggagctgctggacgaccaggtcgccggcgagggcaccggcatgaaccagggcttcatcgaccggtccatgaccagggccatcaccattgtgtggagcatggtgtacggcgtcacctacgagatcaaccctgagattgaccctgagaacgaccatgagtacgaccagaacttttgactgaccctctaagatgacgcccaccatgaggcggacggcgaggggcatgcccaccaaactgtcgggcaaatgttgcagcttgtgctgcatgtggaccctcatgtcaactctaaatccaaaaagaaaactcagaatagaacaccctatggagaacacttgcgttaacaccgtccctctggggctcccgac

SEQ ID NO: 6835 - DNA, 583 bp, Chlorella sorokiniana
  unsure (1)..(583): unsure at all n locations; Clone ID: LIB3602-095-Q6-K6-G9
cacatctgcgcacacataacggccatggcgagcgagagccggccgccgctgcctcccttcacgctggagacggcgcggcacaaggtgcaagccgctcaggacgcctggaacacgagagacccanaccgagtggcgctggcatacacagaggacacagagtggcgcaaccgagccgagttcgtcaaggggcgggaggcggtgcggcagttcctgcgccgcaagtgggagcgggagcagggctacgtgctgcgcaagtacctgtttgccttccaggacaaccgcatctcggtgtgcttcgaatacgagtaccacgatgccagcgggcagtggtaccgcgcctacggcaacgagaactgggagttcagcgagcagggcctgatgcgcaagcgcatcgcaagcatcaacgaggcgcccatccggcccgaggagcgccgcattgctgtgccagaggggcagcaagttgtgtacaactcctggctggcggagcagggcattggcggcgaggagttcccgctgtgcggcggcaaccagccagcctattaaaggcagctggcgcgctgcaacaagtggcggcacgccttga

SEQ ID NO: 6836 - DNA, 614 bp, Chlorella sorokiniana
  Clone ID: LIB3602-095-Q6-K6-H1
ccctgccgcccctcccctaccccgcgggtgcgctggagaagaaggcatgtccaagaccacctttgagttccactacggcaagcaccacgccgcgtacctgaacaacctgaacggccagattgcgggcaaggacctggagaagctgagcatcgaggaggtgatgctcaagacctggaacggcggcagccccggccccgagttcaacaacgccgcgcaggtggtgaaccacaccttcttctgggagtccatgagccccaacggcggcggcaagcccagcggcaaggtggctgaggccattgaccgcgacctgggcggctacgacaagttcgtggaggccttcaaggccgcgggcgccacccagttcggcagcggctgggcgtggctgagcgtgaacaagcagggcaagctggaggtcaccaagacccccaacgctgagaacccctgggtgcacggctccacccccatcctcaccatggacgtgtgggagcacgcctactacctggatgtgcagaaccgccgccccgattttatctccaacttcatcgagaacctgatcgactggcagcgcgtggagcagcgctacctggccgccaccaagcagtgagcagccgctg

SEQ ID NO: 6837 - DNA, 142 bp, Chlorella sorokiniana
  Clone ID: LIB3602-095-Q6-K6-H10
gatccctttggcagagccccgacagctgctcctgcatcccatcgttttgatccacctcctcttcagcggttgctagtcactacacttgttttgtgccaacatctgactgactttgtacctggcctgtaaatgcacacatggt

SEQ ID NO: 6838 - DNA, 604 bp, Chlorella sorokiniana
  unsure (1)..(604): unsure at all n locations; Clone ID: LIB3602-095-Q6-K6-H11
ggcagcagcagaagcggcagcaaagccaagncgatgcctactgggacgggcatgccaaccccaaggcaaagcgcgaccaaaagcgggaggagcaggagcggcagcgggaggaagcggccaagaagaaggcggaggcaaagcggctggcagcagaggaggaggctgcgctggcggctgctggcaagaagaaggcatccaagcctgcgccacccaaggtcaccgcagcgcagctggccagcatgcgggagcgggagcagcgggagatggcgcagcaggcggcagagcagcaggatgcgcagcgccgcatggtgtcagaggaccagtacgcagcagctgtggaagtggacaaccgcaaccgggaggagggcgtggtggaggcgcgcagcatggatgcggcgctgcaggcgctgtcactgggcaagcaggaagtggaccggcaccccgagaagcgggccaaggcggcgtgggaggcctattacgaggagcagctgcaagtcctcaagcaggagaagcccggcctgcggctcatgcagtacaaaagcatgatcttcgagcggtggcagcgcgacccacgcaatccccgcaatcagaaggtcgacgcgtg

SEQ ID NO: 6839 - DNA, 147 bp, Chlorella sorokiniana
  unsure (1)..(147): unsure at all n locations; Clone ID: LIB3602-095-Q6-K6-H12
acccanttaacggcggccagccggttttggacaagcacacacaacatatgagattcccaacctccctgcgcactgcttgtaacaatcctggctccctcttgtacccttgacccgcactcgggcgtggatatgtaacgttccgcgggt

SEQ ID NO: 6840 - DNA, 549 bp, Chlorella sorokiniana
  Clone ID: LIB3602-095-Q6-K6-H2
gtcgacccagcgttcggggaggcctgtacaccaagtgcacgaggcgatccgcgccgacccctccgccaagcccaaggcccgcagcaagcccgccgaggccaagcggtggaaggaggtcaagctgacctacgagcagcgcaaggacaagctcaaggccaagctggccgagctggcggccgacgagtaagcgcctcccctttggggcgcttgccagttggagcaggcgggcgctgcgcccgccgtgcccgctgcgccagcacagcgctcggcgctgccgcccgcgctgcggcaggtgggcgggcgctccacaccacaccacacctcaccacaccatgcctcccggtggaaagagagcggttgcggcgctgctagtggcgccgcgcctccgcgcgacggtttcaggcggctagatccacaaaaagccgccggcagtagctggccggccggcgccgcggccggggggccggcgcggcggcggcggccactcgcaaggcctttgcaggcccccgcgtgagacgcacacccttaccgtgtaaggaacctactctc

SEQ ID NO: 6841 - DNA, 601 bp, Chlorella sorokiniana
  unsure (1)..(601): unsure at all n locations; Clone ID: LIB3602-095-Q6-K6-H3
gcgttcggtagnaacgtgcagcgccgcttccgcacggcttccgcgagggctctgctgccaanaagatcgctgcctaaacagctggtgtctgcagctacgcggcagcacgttgagccagctgtgtagcaggatgtaacaccgcgacacacaaaaaaaaaaaaaaaaaaaaaaaaaaaaaaaaaaaggggagggggaaaaaaaaaaaaaaaaaaaaaaaaaaaaaaaaaaaaaaaaaaaaaaaaaaaaaaaaaaaaaaaaaaaaaaaaaaaggggggcccgttttaggggaccaaaatttacgtccccggccttgccacgcaatactttttttatggggcccccaaaataaaatccacggcccgcgttttaaaaccgttgggccgggaaaaaccctggggtccccaaattaaatggcttgggagaaaaccccctttcccccgggggggttattcgcaaaaaggcccgccccgttcccctttccaaaaattggccccccctgattggcaaagggacccccccttgttggggccatttaaccgcggggggggggggggttccccccaggggacccgttaaatttgccaggcccttaagcccccgc

SEQ ID NO: 6842 - DNA, 267 bp, Chlorella sorokiniana
  Clone ID: LIB3602-095-Q6-K6-H4
cggccgcgtggggccagtaagctgactgcggcgccagcagcagcggcaggcatgtgctgaacgcacggagcgcaagcgcgtcccgcgcacagccgccaccgaagcggcctgccagcgtcgacggcagcgaggcagcaaggcgcggcctggcatgctagcagcgcgtactgcgcgccacggcgctagcagccgcaccctggaacagcatcagcagtaattcagcagcccacctgcatgccgaacgctccgctgtaacaggttctcagg

SEQ ID NO: 6843 - DNA, 616 bp, Chlorella sorokiniana
  Clone ID: LIB3602-095-Q6-K6-H5
gctggaatgcactccttgccgcgtgtccatccccctgacggccgaaaacatcatagcccaaagaacatgcagttggcgcgccgtattcgcggcacccgtcatacgagcgctgtgcacgctattagaggggcctatgtgttcatgtcagcagcatctgcgactcacattttagggcctgatcatgtgtgctacaactttgggacaggtgctgactgccagccaggccccagccattgtgcctagcccaatggcctttcgtttgtactctaggtagccagcaacagcaggagcagcaggagcaacacacactgaccgcaccacacgcaatacttgctttgcctggaggactttaacattgtctcctcaccaccaaccaaaccgaacgttcaacagacactccctctgtgtaaagcacgacgcactgaaaaaattacaatataaaatatagggcggccgctcgcgatcccgtccgctctgctgcttgtggacaacagcatgcggtacgcatgcatgcccttcatgcatgcctgcctggagcacttgctactactccacctgctttgttgagggtccattgattgccgctcgctgacttgtaatgcgggtgggagcagga

SEQ ID NO: 6844 - DNA, 429 bp, Chlorella sorokiniana
  unsure (1)..(429): unsure at all n locations; Clone ID: LIB3602-095-Q6-K6-H6
gcgccgtcaccggcttccaacgctgctcatgcacccgtcgcgatgacggcccgccgcggcggcggcacccctcaatgactgcgcaaggccgcttgccctcctaagccctgctgtagcgggtgtgccagcggctgtggcacgctcgctgtcgccccatgtttgtgactcgcacctagcccgcctgcaggctgcgctcccgccaccgcctgcatgcgcttgacatgacgctatgcaggccgcccctgctcctctcaacaccaccgcctgtattttattgcacatgcttctatggctcctcgtacccgccgccgccggcatcgtcactgccctgtaggtcccccttctgcaaaaaaaaaaaaaaaaaaaaaaaaaaaaaaaaaaaaaaaaaaaaaaaaaaaaaaaaaaaaaaaaaaaaaaaaaaaaannnna

SEQ ID NO: 6845 - DNA, 415 bp, Chlorella sorokiniana
  unsure (1)..(415): unsure at all n locations; Clone ID: LIB3602-095-Q6-K6-H7
ngactgttctctcgccttctgtactgcatgccgcaccgccgcgtgccgcccccaccctgccgccagctgacgcatcgctggcgcctgcccttctgcacataaatccctccaaatccctcccagcccagcaggcaggcaggtagttaggcagtccctttccccttccctcttgcccgtatcgtcagcagcttatcaacgcaggcaggccgtccctttccttctaccttgctgcggtggccgtatgataggcccccggcttgccacgctccaattgtgttgcgctgcccttgcagccacgctcattcgctgattctacgctcctgcccctgtttatttatttggcaggccgttgcctgcgcctgcacgatgatttcctgatctgttgcaagtgccttgttgtaagatttcaagcagt

SEQ ID NO: 6846 - DNA, 336 bp, Chlorella sorokiniana
  unsure (1)..(336): unsure at all n locations; Clone ID: LIB3602-095-Q6-K6-H8
cggncgcgtgggctacaggnagtgctcacctacgcgcccgacaacaaggtggccaacgcacgcagcgagtactgccgcacacggctgcagcgcacggcgtgagcacgggcgccaacccatgctcgcgtggacgtcccaagtaggcacccattttttccaaggaacctccccaacctcatccctgcaaacccagccccctgcagcccggctgctgcgcctgattgtatcccccttctcttcgtcattcgcccgtctcagtctgcactgcgccccttctgctccctggaacaacacagatgcagttgcgctacaaacgctgcaaaactcaatgccatc

SEQ ID NO: 6847 - DNA, 570 bp, Chlorella sorokiniana
  unsure (1)..(570): unsure at all n locations; Clone ID: LIB3602-095-Q6-K6-H9
naaaaaaaaaaaaaaaaaaaaaaaaaaaaaaaaaaaaaaaaaaaaaaaaaaaaaaaaaaaaaaaaaaaaaaaaaaaaaaataaaaaaaaaaaagaaaaaaaaataaataaaaagggtttggcagttattatagtttcaattttttgatcccctttttttgggggggctggttctttttttttcctggtttttactgggtttttcctgggcgttttttttctttttgggggatggggaaataccttggtttgccccctttttttatcgtggtgagcatcccccttttcgcctttttggttttttgtacagggcctttggccactgttttttcccatgggttgtgcactttaagggggccgttgccgcgcctttttccaggggttttatgcccgttggttggtgtgtttcccccctttttttcgcttttttttctgggttttttggggccgttccctttttttggccttccttttttttttcgccctttcccttgatttttccgttttagtttttaactggggcccccttttggggctcttttttggggttttggttaacggggggcccctt

SEQ ID NO: 6848 - DNA, 310 bp, Chlorella sorokiniana
  unsure (1)..(310): unsure at all n locations; Clone ID: LIB3602-112-Q1-K1-A1
gcgtgtgctgccggggcctgctgctacctagccagtggcgagcagtagcttccattgggcagggctgcccagccccgtctggttgagcatttagctattcaagacagtatgtgtttgttttgcggtggcgtgcgtcgttttatctctggtatgtcactccacactcactgcaccaggccccgctgcatgaaatacccgtaccgcttttgccagcctgcttgcccgcttgcgtcaaccaaaattttacaagtcccacaccagcagccttttgccgggctccgnccgactgccacttgtaactgtcagtttg

SEQ ID NO: 6849 - DNA, 539 bp, Chlorella sorokiniana
  unsure (1)..(539): unsure at all n locations; Clone ID: LIB3602-112-Q1-K1-A2
ggngttcatcacggccaacaggtggtggcctttatcaagggcactaagcagttcccccagtgcggcttcagcaacactgttgtgcaaatcctcaacacgatgggcgtcccctacgtgaccgtgaatgtgctggaggatgacctgctgcgcagcggcatgaaagagttttcgcagtggccgaccttcccccaggtgttcgtggcgggcgagtttgtgggcggcgccgacatcctcatccagtcgtacaccagcggcgagctgagcgagatgctggaggcggccctgaacagctgaggcaggggccacatcgcgaatttgcaccagcttgaggcagccctggacagctcacgcaggccaagtcgcaaccttgaagaggctgatgtggctgacgcagggcccgagcgtccgacccaaccaatggctcggtgcagcggccgcagcgtgggcatgcagccccccaaaatcttttcttaccatgctgacccgaatgaatctgtggcaggccgcgtgctgccctgccccctgtatcctaatgcccc

SEQ ID NO: 6850 - DNA, 575 bp, Chlorella sorokiniana
  unsure (1)..(575): unsure at all n locations; Clone ID: LIB3602-112-Q1-K1-A3
gctgttgctcttggtcccgaccgcccctgcttctgctcccattcgccccgttctgtacacgcccatcacttactctatatcccgtcttccctgtccacagctcacctcccgctaccttccccgcccacacaatactgtgcctggctattccaggcccgcatgcgcgctgactgtgtaacaatgcgctcaggaaaaaaaaaaaaaaaaaaaaaaaaaaaagggaggagagcaaaaaaaaaaaaaggctaacttgcggagagctgcatacgagcaacggtggcttaggggcgcccggcgtgcagtcgacgggcgcgccgctggaccaccttgtatgacggggcgccccgctggcgaccccattgtgctgctcttgcggccgctggggggcgccgcgccggccgtatctgctgttgatgcccggtccagagggccgttgctagcggccgctggttggcgccgcgccgtcggccgcggcctgtggcgctgcggcggttgctggcntggctgcggcttagaacggtgcgggtgctgcggcctcgggcggcgtcccggttttggggggtctggccaactaa

SEQ ID NO: 6851 - DNA, 535 bp, Chlorella sorokiniana
  unsure (1)..(535): unsure at all n locations; Clone ID: LIB3602-112-Q1-K1-A4
gntcgctggtgctgcgcccgctggngcccgcgcccatgcaggccctggcgcgcgacttcatggtcaagacgcggcggcgcaagggcatgacggacgacgtgtccatcaacaagcactttgacgaccccatgctgctggagctggcgcggcaggacgcagacctgcagcaaatcctctgagccagaccttgttgagctgctctcattgctgaggcggacctgtctgagctgctctctctctggccagctggcgaggcccccagggcctgcatagctgcctgcgcagcgcgcggctggcagccgcagcagctgcacaggcggccgcaggccagcgcgcagggttgctgcgaggttttgcggctgtgccggccatgcggtggcgccaccgctgcttcggcgggcacttggtcccaagccagccgctggcaggagccaaatgggccgtcttgccctctagattctgttttcatttnctntgntccatttgtccttgntttcatgcgtcttgnttnccctttcggttgccgnctggttag

SEQ ID NO: 6852 - DNA, 538 bp, Chlorella sorokiniana
  unsure (1)..(538): unsure at all n locations; Clone ID: LIB3602-112-Q1-K1-A5
ggccaatatccagnacaaggagggcatcccccctgaccagcagcgcctgatcttcgccggcaagcagctggaggacggccgcaccctggcagactacaacatccagaaggagtcgacgctgcacctggtgctgcgcctgcgcggcggcatcattgagccgtccctgcagatcctggcccgcaagtacaaccaggacaagatgatctgccgcaagtgctacgcccgcctgcacccccgcgctgtgaactgccgcaagaagaagtgcggccacacctcgcagctgcgccccaagaagaaactcaagtaaactactcgcttcggcacgagcggaagcggcatgagcggcagcaaccgctgccccccccccgccccgccagccgggatgccatgacagcaccggctgctcagctgctgatgtgctgcatgtcaattgctgctgcggaaatgtaacggtggtagcgatcaanaaaaaaaaaaaaaaanaaanananaaaaanaaaannaaaaaaaannaaaaaaaaaaaaaaaaaggggggcc

SEQ ID NO: 6853 - DNA, 434 bp, Chlorella sorokiniana
  unsure (1)..(434): unsure at all n locations; Clone ID: LIB3602-112-Q1-K1-B1
gcaacccacagacggtgtngaactgcgcctgtcgctgcggcaggatgaccctgcctatggatggaaggcagccgccctggcccgccacggctttgcgtccagccagctcttcccgctgcgcatgcaagcagccccttgggagctcctgcattatgcggggctgtgtgtggcggaggtgggcaacgctgcagaggcagacagcttggccgagcggctgttcaagcaggacgatttcccgcgcgagctgcagccggcggcgctggaggctgtcatccgagcgtgccaggcagcgcagcaggcctatgcttcctgtctggatgcggatcgagcagagctcgaggcattggagcagcagcagtaggtggtgggcaggagcagtagtggtgcaggacccagcatgcgacagtaggtgctgtaggttctggtgtgactag

SEQ ID NO: 6854 - DNA, 583 bp, Chlorella sorokiniana
  Clone ID: LIB3602-112-Q1-K1-B2
ggcgccgcaggaggtaaagagcaaatagccggcgggccagggctaccgcgcgcgtacgcgccacatgttcagccgcggcttcaggcagaagggcttcatcccgctgtccacctacctgaccaactacaagctgggtgactatgtggacatcaaggtcaacgccgcggtgcacaagggcatgccccacaagttctaccacggcaagactggctgcgtgtggaatgtgaccaagcgcgccgtgggcgtggagctgctcaagcaggtcaacgggcggtacatcaagaagcgcatccacgtgcgcatcgagcacgtgacccccagccgctgccacgaggagttcctgcgccgctgcaaggagaacgacgcggcgcggcacgcggccaaggtggagggcaagccgctgccggtgctcaagcgccagcccaagggcccccgcaccgaggccatcatgctggagaacgtgaagatggagaccatcacggccatcccctacgatatcctcaaggagggcgtgctctgagcgtgatcggcggcgacgttccgttggttgcggctgcagcttagtgagatgtaaccccgcaag

SEQ ID NO: 6855 - DNA, 549 bp, Chlorella sorokiniana
  Clone ID: LIB3602-112-Q1-K1-B3
gtgacatgcacttcaactgagggccatgggcagcaagctgcccgctctcggcctgtgcacgcgcggaatggcgcgcctgccgagccgggcggcccggtggctggctgttcatgccgcagacccttataggagacaagtcaacagctacgcagcggccaacgtggaccgcatcctgctgaacttcatcgttgtcacatttccaatcatcctggcagccaagtcgggcggcaggccaggcctgctgctgctgggtgggtgcggagtgctgctgtcggcggccgttttggcggttatgcggcgccggccgagtgcctacattgccaaccgagaggcgttcatcgttcttcctgcgctgctggtcccgctgctggccatccggctaaacttggctgatgtctttggccacctgcagcggcacggcggcagcccgctgcgcctgctgggcctgctgctgctcagccacccgggcacgtgggtgctcatctccgcgctctgcggcggcgcggccatcgcagcaaacgtgctggtcctgcccatgcttgcggcccc

SEQ ID NO: 6856 - DNA, 577 bp, Chlorella sorokiniana
  Clone ID: LIB3602-112-Q1-K1-B4
gcggaaccatccaccctcagcgctcggccggtgcccccttccccgcagagcagcccgttctccacctgccgatcccagccgtcagcatggcgcagatcagcaacctgaaggagatcatcaccagctttgagtcggcctaccgctccacacccaccaagctgaagctgctggacgccttctcggtctgcgcgctgctcacggcagtcctgcagtttgtgtacgccaagctggtgggcaccttccccttcaactccttccttgccggcttcttctgctgcgtcggcgcgtttgtgctcacggtcagcctgcgtatgaaggtcagcgagggcggcagcgccagcgggccgcgggaatttggcggctactcactcgcgatgctgacgctcttcatcgcggcttggaactacgtgggttgagcagagccgattcgcttccggctcagcggcccgccaggcccctctgctgcgaccctgctgctgctttcttttttgtgcacgttcgcttcttgcttccctctgctgccgctcaatgctccctgctgaccgtgtccccacctttttcgaactgccaaactgac

SEQ ID NO: 6857 - DNA, 570 bp, Chlorella sorokiniana
  unsure (1)..(570): unsure at all n locations; Clone ID: LIB3602-112-Q1-K1-B5
gnggnagagggcagnaagtgctcaagtggactgccactttggcaagcgcaagagcctggcgtccatccgcacctgcacctcgcacgtgcagaacatgatcaccggcgtgaccaagggctacgagtacaagatgcgcctggtgtacgcccatttccccatcaacatcaacatcgagaacaagggcggcaaggtggagatccgcaacttcctgggcgagaagattgtgcgcgtggtggacatgctgccgggcgtgacctgcgagcgcagcgccgccgtcaaggacgagctgatcctgaccggcaacgacatcgagctggtgtcccgcagcagcgcgctgatccaccagaagtgcctggtgaagaagaaggacatccgcaagttcctggacggcatctacctcagcgagcgcggcaccctggtgaagcccgagtaagcggagcccgcacgttgcagtagaggtggcggcacgagcgcagcagtgcgcagcgctcacgcccgcgccggcggagcatcggcggcggcagccggccccagctgcggcgctgcacgccatgtnacgcacacgttagc

SEQ ID NO: 6858 - DNA, 62 bp, Chlorella sorokiniana; identical to SEQ ID NO: 6592
  unsure (1)..(62): unsure at all n locations; Clone ID: LIB3602-112-Q1-K1-B6

SEQ ID NO: 6859 - DNA, 476 bp, Chlorella sorokiniana
  unsure (1)..(476): unsure at all n locations; Clone ID: LIB3602-112-Q1-K1-C1
cctagnacgcgtgcggccgcccgcgatctagnactagtccgcttcttatgcacgctctcggcagtacttgtctccccctcccaactgctcttggccttccctgctctgccctaggggaggcctcccctctcttttccgcccacctctagcgatttgcccctcattattgcctcctgctttgttaatgctttctttgcccagtggttttcatctcgtcgccgcaacatctgcgcttctgaatgaacttgcagtcttctgcgcacgctaacttcagccatcccggcagcccttcccagccccaactgccgttctgcaagcgcatgcctaccacggncgtncaaagcgcacttactagccgtggttgcaaaaccatgcttacagatgttgtgatacacactatttttaatggtcggtagttgtatgttggatggttgattgtgaggtatgttggtgtgcattggtggatgtgctgtatg

SEQ ID NO: 6860 - DNA, 558 bp, Chlorella sorokiniana
  Clone ID: LIB3602-112-Q1-K1-C2
gtccgccaagggccacggcacttgaggcgtggtgacccgctggggtgtgtcccgcctgccccgcaatacccatcgcggtctgcgtaaggtggcctgcatcggcgcgtggcacccggcgcgcgtgggctggaccgtggcccgctccggtgccatgggcttcaaccaccgcactgagatgaacaagaaggtgtaccgcatcggtgtgaagggcgaggccagccacgccgccaccaccgagcacgacgtgacggtgaaggacattacccccatgggcggcttcccccactacggcgtggtcaaggaggactatgtgatgatcaagggcgcctgccccggcgtcaagcgccgcgtcatcaccctgcgcaagagcctgttcccccagaccagccgcaaggcgctggaagatatccgcctgaaattcatcgatacgtccagcaagttcggcaacggccgcttccagacctcggaggataaggccaagatcctgggccgcctcaaggcctgagcccataagcgtgctgagcggggagcgcagcgcgcacagtacgccgcccgccc

SEQ ID NO: 6861 - DNA, 51 bp, Chlorella sorokiniana
  unsure (1)..(51): unsure at all n locations; Clone ID: LIB3602-112-Q1-K1-C3
naaaaaaaaaaaaaaaaaaaaaaaaaaaaaaaaaaaaaaaaaaaaaaaaaa

SEQ ID NO: 6862 - DNA, 349 bp, Chlorella sorokiniana
  Clone ID: LIB3602-112-Q1-K1-C4
cgtcctgcccgcctgcgcgcgcaccgccccaccccttcttttgcctctcctcccttgctcgcatcttctcggttcttcggatgtgtgtgcgtgtgtgcgcggtgaacccccgcggcacgacttgataaccaccaaagcacaatttaatcttgcctggcaaaaaaaaaaaaaaaaaaaaaaaaaaaaaaaaaaaaaaaaaaaaaaaaaaaaaaaaaaaaaaaaaaaagaagaaaaaaaaaaaaaaaacgaaggttgctttaaagaaaataaaaaaataatagacttttttatagaggaaataaaaatttaattaaagtggccaaaaaaaaaaaaaagttggggaactggg

SEQ ID NO: 6863 - DNA, 597 bp, Chlorella sorokiniana
  unsure (1)..(597): unsure at all n locations; Clone ID: LIB3602-112-Q1-K1-C5
cgctgtccctggnanaagctcaacttcgacaagctgctgcacctgtgggaggtggtggacaagcacggcgacccgcagctgacgcagtacgtcgaggacatgctgcaggagcaggctgaggacatcaagaaggtggccgactatgtgagccagctgcgtcgcgtgggcaagggccacggcgtgtgggcctttgatcacgagctgtacgaggaagagatccgggcccgcgccacgcccaacgcatgagcgctcatcgtgccagagttgggcatggcgcagccaggagcagcctgagggcgagccgcgcccgctgctgcgcccagcacagcctcggcctctggatcgcagcccagccctccggaagtggcttgacaagcgcgcacatgcccagtgccaaagcgcggcttgtgccaattttctggagcagaagcagcgggcaggcagatggccgcagctggagtggtttgtggctgcttgcatgctgcgcacggagtgcagcagcgcttgtgatgacagggtttgcagcaccttgagcgctggattgtttgcctccctgctgctgngcgcatccgtgtttcttacagctgtgcacagtgt

SEQ ID NO: 6864 - DNA, 125 bp, Chlorella sorokiniana
  Clone ID: LIB3602-112-Q1-K1-D1
ggtaaaaaaaaaaaaaaaaaaaaaaaaaaaaaaaaaaaaaaaaaaaaaaaaaagggcggaacgatctaaaggatcacaaaaattacgtacgcaatgcatgcaaaaataaatagggtgttctatgt

SEQ ID NO: 6865 - DNA, 420 bp, Chlorella sorokiniana
  unsure (1)..(420): unsure at all n locations; Clone ID: LIB3602-112-Q1-K1-D2
gggcgatgtcaagnactgctggntggtgtgcgngacacggtcaacaccgtggctgccggctggagccgggaggagaaggatgcatgcctggaggcaactccaggcaccttcatgtggggcggccagctggtgtccctgatcaccggcggcaagcccgtgggcccccactgagcacgccagctgcgcctgcgcgttgccgggctcccagcccaggcctcggcgcccaataaacgactcgcttccctgcattacacggcagccgccgcagccacaaccctgccggccggcacgcagtggggcccgccgctcatctggtcattttgtcccctctgccatttcatcggtaccttctgctgcattcttttgtcctgctctctgcattcggccacctgctgtacaccttgcaaagtgctctcgtgc

SEQ ID NO: 6866 - DNA, 232 bp, Chlorella sorokiniana
  unsure (1)..(232): unsure at all n locations; Clone ID: LIB3602-112-Q1-K1-D3
naaaaaaaaaaaaaaaaaaaaaaaaaaaaaaaaaaaataaaaaaaaaaaaaattaaaaaaaaaaaaaattaaaatattaaataatattttattaaaaaaatatttaaataggttttgggtttttaagtttattaaggttttttgttttgggggcttggggggtggttattgttttgtttttgttttccctttgttggggggggggatgggccgtgggtttgttctttttttt

SEQ ID NO: 6867 - DNA, 502 bp, Chlorella sorokiniana
  unsure (1)..(502): unsure at all n locations; Clone ID: LIB3602-112-Q1-K1-D4
naaaaaaaaaaaaaaaaaaaaaaaaaaaaaaaaaaaaaaaaaaaaaaaaaaaaaaaaaaaaaaaaaaaaaaaaaaaaaaaaaaaaaaaaaaaaaagggaagggggcggtccttttttcagggacccacggcttgccgtccttcttgcttgcttacttctttcctttttttttcgggcaaccctattttcttttcccttggctcgtcgttttacaacattgggactgcgtaaacccttgccgtttctcactttattgccccttgtggccctttccccttttttgccggttggggcaataccggactagggcccaccccctttcgcccttcccaacatttccccagggctgattggggattggccctccccctgtgtttggctctttaggcgctctggtgttggtgctttcgcccagcgtgactcttttcatttcccagccccctagccccctctcttttcttttttttccctgccttcctttccgcgttctccgcctttcccc

SEQ ID NO: 6868 - DNA, 440 bp, Chlorella sorokiniana
  unsure (1)..(440): unsure at all n locations; Clone ID: LIB3602-112-Q1-K1-D5
ccttgggtgcgcgccgggcggcccgcctcaaatccaaccctaactcaaanacagcatcgacttgactcttattacgtggcatgattagccctttgtcgcaagtatttctgtgccctgcagcctgcctgcgccccctgtgtcccctgcaccggccgatttcttcctgttgccttgatgcatgcccaaccagacttgcaacagagtctcccctgcatccactgcacctgtccccctctctgtccccctcaccctgcacccctcgcctatcgccgcctgccggcggctgcaagcctcgcacccaacaaaccctttgcactttgctttcgcttggtctgccctttacttttcattggtcggcgtcgtgggcttgcccccgtcacgtgcacagcggggagccgcccctcacctctgccttgccccttagccagctggtaacgcat

SEQ ID NO: 6869 - DNA, 619 bp, Chlorella sorokiniana
  unsure (1)..(619): unsure at all n locations; Clone ID: LIB3602-112-Q1-K1-D6
cccgggtcgnacccactgcgtccgnaaaaaaaaaaaaaaaaaaaaaaaaaaaaaaaaaaaaaaaaaaaaaaaaaaaaaaaaaaaaaaaaaaaaaaaaaaaaaaaaaaaaaaaaaaaaaaaaaaaaaaaaaaaaaaaaaaaaaagagggggggccggttttaaggaggacccaagtttacttccccgtgcttgcgaacgttttaattttttttttggggccccctaatttaatttcatgggccgggtttttacaacgtggggacgggaaaaacctgggggttccccaatttattcgctttgaagaaattccccttttcgccagttgggttattagcaaaaaggcccgcaccgttcgcctttccaaaaatttgcccaccctgattggcaattggaaccccccttttaggggccctttaagcgcggggggtgtggggtttccccccagggggaccgttacttttgccagggccttagcccccgttcttttggtttttttcctttcttttttggccactttcgccggttttccccgtaaagttttaaatggggggctccttttagggtcccgttttagggttttacggccccttgcccccaaaaactggtttggggggagggt

SEQ ID NO: 6870 - DNA, 539 bp, Chlorella sorokiniana
  unsure (1)..(539): unsure at all n locations; Clone ID: LIB3602-112-Q1-K1-E1
gggagcgccgcaggggatagcacgatgcagatcttcgtgaagaccctcacgggcagagacatcaccctcgaggtggagtcttcggacaccatcgagaatgtgaaggccaagatccaggacaaggagggcatcccccctgaccagcagcgcctgatcttcgccggcaagcagctggaggacggccgcaccctggcagactacaacatccagaaggagtcgacgctgcacctggtgctgcgcctgcgcggcggcatcattgagccgtccctgcagatcctggcccgcaagtacaaccaggacaagatgatctgccgcaagtgctacgcccgcctgcacccccgcgctgtgaactgccgcaagaagaagtgcggccacacctcgcagctgcgccccaagaagaaactcaagtaaactactcgcttcggcacgagcggaagcggcatgagcggcagcaaccgctgtccccccctctccccgccagtcgggatgccatgacagnaccggctggtcagctgctgatgtgctgaatgtaaattggt

SEQ ID NO: 6871 - DNA, 340 bp, Chlorella sorokiniana
  unsure (1)..(340): unsure at all n locations; Clone ID: LIB3602-112-Q1-K1-E2
gncccatctcaggccgtgcggcccagcaccgccggcgtgtatcacgctgcctgcaaccctcagcacagcaccagcgtccagcctggtccccagaggctgcgcagcaaccaaatttaccatcatgacgggcggcaggccgccacagcggcgctacaaccaagcagtatgcgcatgcaaacaggcggtggcggcagcagcaccacctcaaccgtcgcatccctcacacagacagcatgacttctcgttatttgcacagggctgttccgctttgtattcagtttttgtgcgttccacaccattgctccacacctcactgaccctgtgaccaccacccggcaca

SEQ ID NO: 6872 - DNA, 298 bp, Chlorella sorokiniana
  Clone ID: LIB3602-112-Q1-K1-E3
gcgctggccaatagcctaacgcgcagcaggtggctcccttcaagcagttcctggacagcgtggtcatgggccccctgctcaaggacaagtacattgcgatccgtgaagagcggcgggagctggagagcagcacctcggacgcaatggaggcgtgatgcggcaccgccggttccccatgcttgcacaccggactggcatgcctgctgctgcctgtgtagctcgctgcagcacctgctgccctcaaatgaaaatgtgtgcgttgtcaacaggagtgcagccttgtaaaaatagatacggc

SEQ ID NO: 6873 - DNA, 548 bp, Chlorella sorokiniana
  unsure (1)..(548): unsure at all n locations; Clone ID: LIB3602-112-Q1-K1-E4
ctcgacatgatagggagacgcgagnacgtgcgctgtctcatcccctgcgccatccaccagcacctctacttcacgaatgacgcgcgacgcggggcccctcctgggccacctgaagaccgctctcaaggaggcgactacttcccagcgctgcacggcgagagcaagaagatgagcgccagagactagaacagcaccatattagtcagcaacacgcccagatagatcaagaacaatgtgaacaagcacgcgttcagacggaagtggcgctacgcatgaaggagcaccgggaaaagggcaacaacctagaggagaatgtgggctggaagtgggtcaacttcttcatggaagacgaccccaaactggcaacaaatggggcgctactatgcgagcaggcggatgctgacaggagacatcaaggaatagctcatagcagatgctcacagagatggttcagcgcgccaaccgtctacaggagctagtctacgaccatgtggaggatgccttcatgactgtgcggacgatgacctacctgtacggctgacgggcct

SEQ ID NO: 6874 - DNA, 552 bp, Chlorella sorokiniana
  Clone ID: LIB3602-112-Q1-K1-E5
ggccccactgccgaccactcctgcggcacagcctgcaaatttggcgcgcgaggccgctgcggcagaccctgaggttcctgctgtggcggagccagcgaccgcagcggccgccgagccagcgccagtggagccgagtccaacgaacgaaccagctgccgctttgcgcagcactgagcgtgtcccgcacaccgccgcaccatcggctgctgcccccgctgccgtaaaggacagcagtggcggcggcagccacctccaggcttcagcaggccatggagcaccctcttccaccccattcgccctgtttgctgctggcctcgtgctggctgctgtgctcctgcagctcgccacgcactgagccgcacctctctgtccgtgctactgacccttctatctgcgaaccctctgtgcgccccctttggcattgcagcctgactgccgaatctctgccctgttgcatccgttgtctgcacccttgattcgtccgcagttgcgaccgccgcgttcatattgcagggcgataccgccccccaggcctgtagaactacctaacaa

SEQ ID NO: 6875 - DNA, 444 bp, Chlorella sorokiniana; identical to SEQ ID NO: 6623
  Clone ID: LIB3602-112-Q1-K1-F1

SEQ ID NO: 6876 - DNA, 75 bp, Chlorella sorokiniana
  unsure (1)..(75): unsure at all n locations; Clone ID: LIB3602-112-Q1-K1-F2
naaaaaaaaaaaaaaaaaaaaaaaaaaaaaaaaaaaaaaaaaaaaaaaaaaaaaaaaaaaaaaaaaaaaaaaaaa

SEQ ID NO: 6877 - DNA, 536 bp, Chlorella sorokiniana
  unsure (1)..(536): unsure at all n locations; Clone ID: LIB3602-112-Q1-K1-F3
caacaagcgcaccatcgactttgaccggggcggcggcgccaaggccggcggcagcggcggcctggccgcttcctgctgcgcagccaccacgctcggctgctgcggcgggggcgccgcctgcacctgccagcccggcgcctgcgcctgcgccgggggggagtgcagcagtgcctctcgagctgcaccggcgtcctgctgcgccaagcctgccacgacagagcctgccgctgcgcagccctccagccggctgtgaaggctgtgatgctgtggcagctgtaccaatccttgcagccgcccagcgcgggtggctgcccctggtgtgactgctccactggggtgccacatctgctgttaacccaccatgtggtggcatacataccaacctgtgcacctgtctgttgttcagtggcctctgagcccagcttgcgtgttgtgcaccacgcctagtttttcctgcccccctcccctgntgcttgctgccttgcaaagcctgtgccctgcttgccncctgtgctccccctttgctgtcctttgcc

SEQ ID NO: 6878 - DNA, 59 bp, Chlorella sorokiniana; identical to SEQ ID NO: 6456
  unsure (1)..(59): unsure at all n locations; Clone ID: LIB3602-112-Q1-K1-F4

SEQ ID NO: 6879 - DNA, 553 bp, Chlorella sorokiniana
  unsure (1)..(553): unsure at all n locations; Clone ID: LIB3602-112-Q1-K1-F5
ccggnacacggccctgnacacggttgtggtgcggtgcagaccgacttgtttacccttcccgaacgacagactgcccaactgcgccactctctcgccgccctggggcctgctgcccgccgtacctctgcctgctctgctgccgagtggtcaatcccaatgcatgactcgcttgccgcgcgcgacgcccgaagagcgcaccctgcacccacaaacggaccagcgaccccccgccgccacgcacttctgaccgccccgctctgcctatgacagccgttctagtgcgcgcagccgttttgccgccactcacctcccctgctgccctgtccctgacgcacctatctccgtctgacgcatctgtattgctttctctggggttggggccatgtgcccggtgtgtaaactatgagatcaaaaaaaaaaaaaaaaaaaaaaaaaaaaaaaaaaaaaaaaaaaaaaaaaaaaaaaanaaaaanannnaanaannnaaaaaaaaaaaaaaaaaaaaaaaaagggggggcccgttttagaggttccaagtttacttccccgtgct

SEQ ID NO: 6880 - DNA, 239 bp, Chlorella sorokiniana
  Clone ID: LIB3602-112-Q1-K1-F6
cccccccctttttttttttttttttgttgtatgtttgttttacatgttctttctattggtctgttctatcgtgtcttggggggggtcaaacaggggtacaggacacagggggaggaatacagagcgtggtgagcagacaagggggatacagcgggcagcagggggtgtgctgagggataggccggggcactgggtaaccagagacggggggcttgcggagattctgcatgcaggcacat

SEQ ID NO: 6881 - DNA, 596 bp, Chlorella sorokiniana
  Clone ID: LIB3602-112-Q1-K1-G2
cctggtgatatctagagatgcaacggcatcaactgtgggaccatgttcatccgcaactccacctggtcccttatgctgatggcggagatgtacatgcataatggcgacggcctgcgggatgggccagggcaatggccaaaatggtggatatatcgtgagcaagcggtgctgtggaaacttctagaggacgaccgcgtccgcaaccacgtaaaagttgtccctcagcggctgttcaactcgtacccaggccatgattgcatctccgagggcacattccaggatggcgactttatgctgcaccttgcaggtttggggaagtcccatttcgatcagtactgggctaagcgcccccgccccccgccgccatcgtctgacgtattgcaaacgaatggccctagcccgccggcactcagcagcgaaaattagccgcatgcggacctggctataatgacagctgactaaccaaagtacttccagcattgaccattcatatttattgtgcatgcagcgtttttatcttcattgcttgaggctgctggctgcgtacatgcgcatgctggctgcttgcaacgcattgatgtaaacgccagtgttgc

SEQ ID NO: 6882 - DNA, 585 bp, Chlorella sorokiniana
  Clone ID: LIB3602-112-Q1-K1-G3
accgcacccgtgctcacaggtcaaggagtgcctgaagctggctgccaaggccaggaataccggccggcaggcggcgccacagcgcggccagcgggcggcggcgcggcagggcaggcaggcggcgagtcggggcagcgacaggagcagcagctgcacgaggacgaggcggcgctgcaggcggcggctgcgggggaggagggcgagggcgcggcagcacagcaggtggacgaccgcctgcccggaggcggcgcagtgctcacggaacacggcggcggcggccggcgctcggtggtcaagcgcatcgacggcgtgctggtgggggaggctcgcccgctgggcacctcacggctaggcctgtacggcgtgctgctgtgggcgggcgggctggtgggggccttcttcctgctgcccgcggcgcgcaaggcggctcgcaaggcgggctcgctgctgcccacaacggcaccctaccggtcaaaaggccgtgacgactgaccgcagtgtttatgctttgtgcttccctggcctccctgcttgctcttattactgctgctgtgtgatgctacgcttctgcgagcccatttttgt

SEQ ID NO: 6883 - DNA, 581 bp, Chlorella sorokiniana
  unsure (1)..(581): unsure at all n locations; Clone ID: LIB3602-112-Q1-K1-G4
gcggcggctggagtttgagaacgacacctttgcgtttggtgacaagctgatcaacaagtggtatggcaagcagaaggacaagaccggcatcctgctggttgtgtctgcgggcaaggacggcgcgctgaccggcggcgatgccttcatgcaggcaatcggcgacgacctgattgactcgattgtgggcgacaacatccccatcctgacgggcgaggagaagtacaacgagagcgtgtccagctccgtgtcgcgcgtggtggccaagctgacgggcaaggaggaccccggaccgcccttccgcgccgaggccaaccgccagcgcacgtacaagaccaaggcggagactgatgccaagaagcccgtcacctccaccattgtgctcacgctgctcttcatctcggtggtggtgcccatgctgcagtactggggctacaccaacaaggactgagcgtggcagcctgnggtctgccgaatctcagcttcaaccagataattgcaaatctgttttgttactgttgtatgtaagcggcgtgtgcgcgggcccccgcccgattttctgcccgcgctgacccttgctgttg

SEQ ID NO: 6884 - DNA, 593 bp, Chlorella sorokiniana
  unsure (1)..(593): unsure at all n locations; Clone ID: LIB3602-112-Q1-K1-G5
cggagccgctggcatcgacgcaacanagccttcaagagggctctctggtgggcagcgacaacttcacgcacattctgcgtgtgctgaacaccaacgtcgatggcaagcagaagatcatgtatgcgctgaccgccatcaagggtatcggccgccgcttctccaacatctgctgcaagaaggctgaggtggacctgagcaagcgcgccggcgagctgtctgccgaggagctggagagcatcatgaccatcgtggccaacccccgcgcctacaagatccccgactggttcctgaacaggcagaaggacgtcaaggacggccgctactcgcaggtgacctcctccgcgctggacaccaagctgcgcgatgacctggagcgcctgaagaagatccggaaccaccgcggtctgcgccactactggggcctcaccgtgcgcggccagcacaccaagaccactggccgccgcggcaagaccgtgggcgtggctggcaagaagaagtaagcagcttcttgcgggcgcggcctgcggcacgggcggatgctggcggctgggtgacggcggctggcgccgcccgcgcagcaaccccactggcag

SEQ ID NO: 6885 - DNA, 554 bp, Chlorella sorokiniana
  unsure (1)..(554): unsure at all n locations; Clone ID: LIB3602-112-Q1-K1-G6
cacaggcaacgcacggnatcgagnaataccacaatgctggtgtgctgtgctggagcggcaacgatgatgaggcacatgctgggcggcatcagcatcatgcgcagggtgtcatcagcgtgaccagcaatgtcatcccgggcctgatgtcaagcctcatgaacgggcgtgacgatgcaacggcagagagcctcaaggagcttattgcctggctgttctgcgagcccaaccctatcccgctgaacaccgcgctggccatgtgtgggcttgttcgcccgattttccggctgccctacgttcctctgtcgcgtgagcagcgcgagcatggtgccaagctgctgcgggcagtgcagcaccacatcccaggctgcaaggaagtccgcgtcatggatgacgaggagttcatcctgatccactctgctggctattgaccgtgtgaccctctttgacagagaaggggaggttgaaagtccaccgccgctgctgctagcactgtcacgctttgccacagtaatgtacagctcataagtgccacatgtaactctggaaggacanaa

SEQ ID NO: 6886 - DNA, 496 bp, Chlorella sorokiniana
  unsure (1)..(496): unsure at all n locations; Clone ID: LIB3602-112-Q1-K1-H1
agcaccccacttgccccgttccttgccatgcgctgctttgttcttcttggactggctgctcctggcattgtaacatgnnggcaagcaaaaaaaaaaaaaaaaaaaaaaaaaaaaaaaaaaaaaaaaaaaaaaaaaaaaaaaaaaaaaaaaaaaaaaaaaaaaaaaaaaaaaaaaaaaaaaaaaaaaaaaaaaaaaaaaaaaaaaaaaaaaaaaaaaaaaaaaaaaaaaaaaaaaaaaaaaaaaaggggtgggaatagtaaaaaaaaaaaaaaaattaaccgggccggcaatttaaaaaggacgtgtttggaaaaaaccctgcaataatcaaaacttagggcccctcgaaaaaaaaaccccttttcggaaaaaacccttttttccaaaaaggctaaaacccgaaaaaccttccccacttttcgcccaatcctaaaaaaaaaaaaaaaaaccccccccttaaagggccccttcaaaaaagaggggggatttaaaaggt

SEQ ID NO: 6887 - DNA, 568 bp, Chlorella sorokiniana
  unsure (1)..(568): unsure at all n locations; Clone ID: LIB3602-112-Q1-K1-H2
gnactcgtggggcgacagctggggcgagcagggctacttccgcctgtctgccaagtccaagnacgaccgcggcgcgtgcggcgtgctcaccaccgcctcctaccccaccaagaagggcaccaccaaccccgaggtcccctccttctgcggctactttggctggaccgagtgccccgtgcactccacctgcacctgcaactggaacctgtttggcctgctctgcctctcctggggctgcgacgccggcgcgcagtgagcaccacgcagctaggcggatgtggcacatgccacacgctctcgactgtgccgctgctgctggcgctgcagcatccacccatgtcccaccatgcacgcacagtcagctaaagcgcatggccgaggcacctttcctgttgcaacatgcaccccacctgccgccgagcttgcctgacacttgctactaagaccgtcagcagcagcctgatatccctttggcgtgccccctttcatcctcagtgtcctctgctgtaccatgcgttcattagggcccacgggccgcggctcttttgtacaccatgcctgcccgccc

SEQ ID NO: 6888 - DNA, 579 bp, Chlorella sorokiniana
  Clone ID: LIB3602-112-Q1-K1-H3
gcggcgcgtgccctacggccggtttcgtgcatacgagcaatagcgaataccgctgcgccggcatgctgcctgccgttgccgcccatcacccaccggcccaccaccccaccctagcgccgccaccgcccaccacccaacctctctttggtggcacatgccaccctagctggccgccaccacacgcctgccgcactgtcaagttttgcaccgaagcgaagcagccacctgcaataatgcgccgggcacgcctgcccgcccccccgctccctctcttgaaggtggtggttcagcctggagccgcggcagtgacagctggcagctctccatggatgtgctgggcacgttcacagcagcacccagcccagcctgcctagcctgcgcggcggcagcccgcgccatccgccgctggcctttttgtgccatcaatcggacagtttcatctcagcactctagcgcgtgtgtttttccttcccaagaacccttgtctctcgtggtgggcgcctgcccctgccttcaaacgcacgcaaacgacgcaactctgacgcaacccgcccacccgcatttagtttctctcccgca

SEQ ID NO: 6889 - DNA, 406 bp, Chlorella sorokiniana
  unsure (1)..(406): unsure at all n locations; Clone ID: LIB3602-112-Q1-K1-H4
gccgccgcggcagggctctacgtggcagccgtcgtgcccgagactcggggcaagacgctacaagagattcaatccctgctggcgcttcgagtggcgcctggcagccggggccggcggccggcggcacagcccagcgaccggcacggcttgctgccgccaggtgcacccctgagtgatgcctagcacaagccatgtgtacttgtgcagatcagtgagagattcagtctgccccgcttgttttcagcctgcttgttttcagcctgcttgttgtcaggtccggttgagcgcgcgttgtgcagtgcaccccttccctcggtagtgtgaaagtgagagagcanaaaaaaaaaaaaaaaaaaaaaaaaaaaaaaaaaaaaaaaaaaaaaaaaaaaaaaaggggcggcgcgtt

SEQ ID NO: 6890 - DNA, 103 bp, Chlorella sorokiniana
  Clone ID: LIB3602-112-Q1-K1-H5
cgaaaaaaatttttttatatatacaaaaaaaaaaaaaaaaaaaagggacggccgaatctaaaagaaaccaaaaataacgaacgacgtgcatgcaacgaaaata

SEQ ID NO: 6891 - DNA, 391 bp, Chlorella sorokiniana
  Clone ID: LIB3602-112-Q1-K1-H6
tgctcacatgcctaaattacgacccccctctttcatcgccctacctgcgtcgatctccattctttttgccccgcttgcacctcggatgtctgcaacaggccacgattctcccacccctctttgtttgattgaaccataccgcggtttgtaacagttagcgacaaaaaaaaaaaaaaaaaaaaaaaaaaaaaaaaaaaaaaaaaaaaaaaaaaaaaaaaaaaaaaaaaaaaaaaaaaaaaaaaaaaaaaaaaaaaaaaaaaaaaaaaaaaaaaaaaaaaaaaaaaaaaaaaaaaaaaaaaaaaaaaaaaaaaaaaaaaaaaaaaaaggggggattgttttaaaatttaaaaattttgaaactgggaaaatggaagaaatttttttttttttt

SEQ ID NO: 6892 - DNA, 457 bp, Chlorella sorokiniana
  unsure (1)..(457): unsure at all n locations; Clone ID: LIB3602-113-Q1-K1-A1
cccgtgaacggcgaccccttcatcggcatgctggagacccccgtgacctcctcccccgccatcgcttggtacctgtccaacctccccgcctaccgcaccggcgtgtcccccctgctgcgcggcgtggagattggcctggcgcacggcttcctgctggtgggccccttcatcaagctgggccccctgcgcaacgtggagaacgtcgctgagattgtgggctgcatcaacggcgccgccacggtgctgatcctgaccctgtgcctggctgcctacggcgcggtcaccttccagggcgagggcccccaggtgggcgtgaagaccctgtctggtcgcagcatcccccgcgaccccctgcagtctgctgagggctggaacaagttcaccgncggcttcgctgtcggngggctgagcggcgcggtctggggcttcctgtgcacccagttcctgggcttctgcg

SEQ ID NO: 6893 - DNA, 523 bp, Chlorella sorokiniana
  unsure (1)..(523): unsure at all n locations; Clone ID: LIB3602-113-Q1-K1-A2
ggngttcatcacggccaacaggtggtggcctttatcaagggcactaagcagttcccccagtgcggcttcagcaacactgttgtgcaaatcctcaacacgatgggcgtcccctacgtgaccgtgaatgtgctggaggatgacctgctgcgcagcggcatgaaagagttttcgcagtggccgaccttcccccaggtgttcgtggcgggcgagtttgtgggcggcgccgacatcctcatccagtcgtacaccagcggcgagctgagcgagatgctggaggcggccctgaacagctgaggcaggggccacatcgcgaatttgcaccagcttgaggcagccctggacagctcacgcaggccaagtcgcaaccttgaagaggctgatgtggctgacgcagggcccgagcgtccgacccaaccaatggctcggtgcagcggccgcagcgtgggcatgcagccccccaaattctttacttaccatgctgacccgaattgatttgtggcaggccgcgtgctgccctgccccc

SEQ ID NO: 6894 - DNA, 572 bp, Chlorella sorokiniana
  unsure (1)..(572): unsure at all n locations; Clone ID: LIB3602-113-Q1-K1-A3
gtggnactacaccaagttcctggtggaccagnacggcgtggcccgcaagcgctacaagcccaccttcaacccggccgactttgatggggatgtggcccgcctgctggcaggcaaggagccgctgcctgccgagtgcatcgcgcacccgggccgcaaggtctgcaaggtggatgcctaggcacggctcggcccgccgcccttgtggatgcctgggcatggcggccacccctgggcacgtgccttgcagacgcggcgccacctgcagtcactacagatggctactaattagtggccttgtaggactggcatttttttgctgatgccaaacgagccacctgagcgtcccccagttttccatgcttctgttccggccggcgcaccgcctgcacgtgctgccgccccagcccagcagcaccgcccgcccatgacggcagcaggccaaaccgcaccctcggacgcctgctgcccgacgcagcggccgctgtggggccacgcctgcgacctggcaggccccactcggctcgcgggccgctgctggctgtggcggcagcatgcgcagcgagctgagccca

SEQ ID NO: 6895 - DNA, 447 bp, Chlorella sorokiniana
  unsure (1)..(447): unsure at all n locations; Clone ID: LIB3602-113-Q1-K1-A4
ctgagcccgagnagcgcgtctaccccggcggcgccttcgaccccagggcatgtccaagggcaacctggatgagctgaagaccaaggagatcaagaacggccgcctcgccatgctggcctgcctgggcttcgctgcccagcacgccgccaccggcgccagcccgctggaggccctggcctcccacctggccaaccccatggccgtcaactttgccaccaacggcgtgtccctgcccctggcgtaagcgcgcccctgtagcagcggctgtacccagcacccgcggcgcagcagcagacgggtggcccatgtgtggcctggttgtctctgcccgtgtggtctgtacgcttgttcctatttgctctcctgttgctcattgctcctgactgcacacccgagaagattcaatcaacccctcctgctaccatgtggctgtaaggcacagctaac

SEQ ID NO: 6896 - DNA, 464 bp, Chlorella sorokiniana
  unsure (1)..(464): unsure at all n locations; Clone ID: LIB3602-113-Q1-K1-A5
ggccaagnaccagnacaaggagggcatcccccctgaccagcagcgcctgatcttcgccggcaagcagctggaggacggccgcaccctggcagactacaacatccagaaggagtcgacgctgcacctggtgctgcgcctgcgcggcggcatcattgagccgtccctgcagatcctggcccgcaagtacaaccaggacaagatgatctgccgcaagtgctacgcccgcctgcacccccgcgctgtgaactgccgcaagaagaagtgcggccacacctcgcagctgcgccccaagaagaaactcaagtaaactactcgcttcggcacgagcggaagcggcatgagcggcagcaaccgctgccccccccccgccccgccagccgggatgccatgacagcaccggctgctcagctgctgatgtgctgcatgtcaattgctgctgcggaaatgtaacggtggtagcgatc

SEQ ID NO: 6897 - DNA, 400 bp, Chlorella sorokiniana
  unsure (1)..(400): unsure at all n locations; Clone ID: LIB3602-113-Q1-K1-A6
ntcatcccagctgaccgcccagtttgactacgagggctccacaccgcgcaaggtccatgtcgaggtgcatggcatgctgcgagacggggctgacgacctagtgggggctggggacctggacctgtgcgaggttctggagagcgggacgcgccaggtggtggaggtgccgctgaccaaggccggccgcgagttggggcaactggagctgtgcatacagcaccaggcgatgccggaagcgaagtgatggagtagggcacaactatgcacatgtcgacaacgaaccaaggcatgattgatttgatcaatttgccacagctgcggccgggcaaacaaccggcctgatgcattctgctccactggtgatgtacaacacttgcagccatgtaattttgcagtgatt

SEQ ID NO: 6898 - DNA, 406 bp, Chlorella sorokiniana
  Clone ID: LIB3602-113-Q1-K1-B1
cccggtcgaccccgcgtccgggcctcgcctgggccaccgtcgaccagtccctccagaacgccttctccaagtacggcgacgtcatcgactccaagatcatcactgacagggagacgggccgttcccgcgggttcgggttcgtcaccttcgcgtcggacgaggcgatgcgccaggcgatcgaggccatgaacggccaggacctggacggccgcaacatcaccgtcaacgaggcccagtcccgccgctccggcggaggcggcggcggcttcagcggcggtggcggtggcggctacggcggccagcgccgtgagggcggcggcggcggcttcggtggcggcggtggtggcttcggtggtggccgcggtggcggcggtggtggcttcgggtgtcgtgggggctgcggcgg

SEQ ID NO: 6899 - DNA, 560 bp, Chlorella sorokiniana
  unsure (1)..(560): unsure at all n locations; Clone ID: LIB3602-113-Q1-K1-B2
ggnagttcatctccttccccctttgcctctttggcaccgtggtgggccgcaactgggccggcgcgcccngacacccctgccgcgtcaagcgcatccccagccccatcccggacaaagcgtggtacctcaccccacaggccatcgcggttgtgggcggcctgctgccctttggctccatcttcatcgaaatgtacttcatcttcaccagcttctggaactacaaggtgtactacgtgtacggcttcttcctgctggtcttcctcatcctgctcatcgtcacggtgtgcgtgacgatcgtgggaacctacttcctgctgaacgccgagaactaccactggcactggacggccttcagcgccggcgcgtccacctccgtgtacgtgatgctgtattccgtgcactacttcgtggtgaagaccaagatgacgggcttcttccaaacagccttctactttggctacaccgccatgttctgcctaggcctcagcaccctgtgtggcgcattgggctccctgggcgcccttgcgtttgtgcggcgcctttttccggacgtcaaggtc

SEQ ID NO: 6900 - DNA, 228 bp, Chlorella sorokiniana
  Clone ID: LIB3602-113-Q1-K1-B3
ggggctacgatgatcgctaccggaagtattgagagtgacgtgtgtgccagcctggcgggcctgcacagctgcacagctcgcttgcgtgtgcacgcccgaccccagctgcacagtcgtgtgtgtttgcctttccgtgccacctgttgctgcactgtctgcatgcgcgtgatgatgccctgtgacgcctcgtgttgatacgcttacccacatgtaacatgaaatcggtca

SEQ ID NO: 6901 - DNA, 434 bp, Chlorella sorokiniana
  Clone ID: LIB3602-113-Q1-K1-B4
ccactctgccttacatgggaacacacaaggggaggggggggtcgctcaaactcttgaaaaccagggaaggatatggggcccaacgagcaggggggccagcccgaggggggcaggcacagccctggggcctgcctaaatctattgcaaatggggttgcataaaatgctagcgggggaacaacaagcccgcggatggaggggcggccccctgctgggggggcacagcgctgccaaggaggctgagcagggaagctgatacagtgagctggaggggggaggagtgtggtacccccccttgcaaaggggcgaggggaaaacgggatggaataaaggtagcgggcaaagcctaaacaatcagcaccaatgggtccaattcattcattgaaaaactgcccacagggacacgtgggcccggccgcgggggccggccaggct

SEQ ID NO: 6902 - DNA, 569 bp, Chlorella sorokiniana
  unsure (1)..(569): unsure at all n locations; Clone ID: LIB3602-113-Q1-K1-B5
gggnaggaggcaagaagtgctcaagtggactgccactttggcaagcgcaagagcctggcgtccatccgcacctgcacctcgcacgtgcagaacatgatcaccggcgtgaccaagggctacgagtacaagatgcgcctggtgtacgcccatttccccatcaacatcaacatcgagaacaagggcggcaaggtggagatccgcaacttcctgggcgagaagattgtgcgcgtggtggacatgctgccgggcgtgacctgcgagcgcagcgccgccgtcaaggacgagctgatcctgaccggcaacgacatcgagctggtgtcccgcagcagcgcgctgatccaccagaagtgcctggtgaagaagaaggacatccgcaagttcctggacggcatctacctcagcgagcgcggcaccctggtgaagcccgagtaagcggagcccgcacgttgcagtagaggtggcggcacgagcgcagcagtgcgcagcgctcacgcccgcgccggcggagcatcggcggcggcagccggccccagctgcggcgctgcacgccatgtaacgcacacgttagc

SEQ ID NO: 6903 - DNA, 384 bp, Chlorella sorokiniana
  Clone ID: LIB3602-113-Q1-K1-B6
gtgccctaccgcccaggcggcagcatgtacgcgcgcaacccgcccttcgacccgtctgtgcacatccatctggactttggccgcgagggccactgagcgcttgctggcggcggctgcagaccgacgcagggcagccactggagccgctgtcctgccgtcctgcagcagcgcacaaccggcagccctgaagagcctctggatgtagcggcggccctgcagagtctgctagtgcagccgcagtaatgagcctgtgctgtggaaccctgctgcatgttgtcgggcatgggttgtgctgcgccgacgggcctttgcagcctgaggctgctcccgtttcgcatgcggcactctgaactttgccaccctcacactgtaatcctcctggcg

SEQ ID NO: 6904 - DNA, 417 bp, Chlorella sorokiniana
  unsure (1)..(417): unsure at all n locations; Clone ID: LIB3602-113-Q1-K1-C1
ccggtgatactttgttgngagccgccccgcgcggccacccagcattgcgcgcgacaaggccgcgcagcagcggctgtggcggctgctggaagagcagacgggggcgcactggagcgtgtgatgctgcctggctggttagctgacgtggccagtgtgtggcggctggctggttgatgcggtagtgtgaggctggttagctgatgcgggcagtgtgccgcgcttgcagcagactaggccgagttccttcgaatgttgctgcgcgttgatgcgacgcgaggagcggcgagatttgcaacaccctcaatgccaaaatagcaagtgcagcatgtgcttctgccgatgcatggcgcacttgcacacggagtatgctcctcaccctgtgcttgagcgactgttgaggcggtnacagtttcaaga

SEQ ID NO: 6905 - DNA, 568 bp, Chlorella sorokiniana
  unsure (1)..(568): unsure at all n locations; Clone ID: LIB3602-113-Q1-K1-C2
caccgcctgccccccacggtcggctccnctggcaaggagagcgcgatcagttggccaaggagtttggcttccggtccattggtgcggagctgccagatgacgtgacgctgcaggacatcatcaagtccatgccggctgaggtgtttgagctgaacatgtggaaggcgtggggtgctgtggcgatcgctgtggcctccttctccctgtcgctctacatcatctccatctgccccgcgccgctgctgcccttcgcgtgggccttctccggcaccgccctgaccgggtggtttgtggtgggccacgactgcggccaccgctcgttctccaagaacaagctggtggaggacattgtgggcaccatcatgttcatgccgctgatctaccccttcgagccctggcggatcaagcacaacgtgcaccacgcacacaccaacaagctggtggaggacacagcctggccccctgtggagcgcgagaagatggagaagtggagccccgcggggtctggcttctacnagctgttcctgggccccccgctgnaactggttgcctcctttcgcctctggtg

SEQ ID NO: 6906 - DNA, 593 bp, Chlorella sorokiniana
  Clone ID: LIB3602-113-Q1-K1-C5
gccgtcggcgcccctgcagccaagcacccgtccagccgctccctccgtcgcccagcggccagcccagcgccgcctagacatcgcatgcgcagccagcagcagcgccagcagcagcgcgggcagcgccaccggcgactatgccgcgctgcaagggcggacggtctactctgccgccagcggcgccgaagtggagctcccctcgctgtggcgggcagagcctggcaagcgctgcatcgtcgtgtttctcacccactttgccgacctgagctccactgagctggcccagaagctcaaggccgtgctgccagagctgcaaggcgcgggggtgggcgtgattgcggttggcctgggcaacgtggccgccgcccgcaagtttgcagacctgctgcagttcccgctcgacctgctgtatgcggatcccatgggtgacctttacaccgccctgggcttcagccgcggcgcgctgccggacgccccggtgtcgccctatgccaagctgctgctgatgctggcgggcattgagtctcccggcaccatcccagaggtgctgcgggggtatgtgggcgaccgctcagccaagcccgtgtttgccc

SEQ ID NO: 6907 - DNA, 428 bp, Chlorella sorokiniana
  unsure (1)..(428): unsure at all n locations; Clone ID: LIB3602-113-Q1-K1-C6
tccgcgcacccacggcggtggctgcgctgcgcgccaacgagcagcgcctggncacagcctacgacttgcacaccacgctgnaccacctgctgnacctgggggagtnggncnagnccacggngcagcagtatggcggctggacggcggccggtaacgtgagccagtcggtgcgctggggcgtcagtctgttggacgaggtgcccacggcgcgcacctgcgacgatgcgggagtgcccccagagttctgccagtgctttctgccctgaaaacaaatggtgctaacacctggatacgtcatgccatccctgcgcacccctacgactgaattctcagaccacactttttgtcgtgtggcgcgaaatttttctccacacattgcgcactgagttcaccatcaatagggattcagccctgtgtcctacttccca

SEQ ID NO: 6908 - DNA, 612 bp, Chlorella sorokiniana
  Clone ID: LIB3602-113-Q1-K1-D1
cagcatttggttgtgctccccctaaagagaaaaaacaattttatcattctacaccgcacagccagcgccgatgcgcgcgctgtaatgctctgccccgcaaaaaaaaaaacaaaaaaaaaaaaaaaaaaaaaaaaaaaaaaaaaaaaaaaaaaaaaaaaaaaaaaaaaaaaaaaaagggcgggccgttcgcgaacctaaaaactagtccccagaagtggaaaaaggccctggtgcttcgcttgcccaacctggctgagctttgaaagtggaagttcgtgcgaacaaaccttaccttgccccaagcctcgttggccttgaccagggttcgagcagctgggtgtttcagggtaaggtcaggaagctggtgttcagccaccagcggctgggagcatttgcctgacagcatcaccggactgaccactttgacccgcctgggggtcacagcctgctccctggaacagctgcggccagggccctacctggggggcctgcgagagctgaacctttttgccaacgcgctcagagacctgccagaggggcttgcccacccactctgggggttaaccgccctgcccctggtgggcttgggctgcgtttccagccaatttctat

SEQ ID NO: 6909 - DNA, 461 bp, Chlorella sorokiniana
  unsure (1)..(461): unsure at all n locations; Clone ID: LIB3602-113-Q1-K1-D2
ggccactaagtgcaaagcagtgggtgcatggcgtgtcccagctgcacagaacagagcagcacgcctggacgcatcgaaacgctgcatgcaccgctcctgagctcgcgccctgcgcagttgtgtccacctcactgcaaacatccagccgactcaagaaccgcgcgcacacacatatgcatatccatctgcagtttacagatgcttggtgtaaggtacatctgctgcaaaaaaaaaaaaaaaaaaaaaaaaaaaaaaaaaaaaaaaaaaaaaaaaaaaaaaaaaaaaaaaaaaaaaaaagaaannnnnnnntananganccaanntaacnnacccccnctttcnccnncntanctcttcttttttttcccctaacttccttttccttcccctctttttcccccttccnnactcnnaaacccctcnctttcccccccttaatcccctttcccctcttccccctt

SEQ ID NO: 6910 - DNA, 291 bp, Chlorella sorokiniana
  Clone ID: LIB3602-113-Q1-K1-D4
cgactttgcggtgttcaaccaccgcggtaccatgctgggcgtgctgccgcacatgcgccagctctcggtcccggagctccgatgaagggcagaagggactgcagcacgagatgaatgagctgacctgcaggagcagaggcagcccgaccaatggcggcggtggcggcagcagtgtggctgcccggccctctcgtgccgcccggctggcaagctttgagccacctgcctgcgcagttgctgtgcaatttacaaccattattactcgtccaactatgcaatgccgcccgcagc

SEQ ID NO: 6911 - DNA, 414 bp, Chlorella sorokiniana
  Clone ID: LIB3602-113-Q1-K1-D5
cgtccgggaaaaaaaacggaaaggaaaacaacaagaaacaaggcaagctcacggtctacagatacacgcagttacagcagggcaagcacgccacgcgtaatgcttggacagtgcggctctgatgacggcagtctggtgctgtgggatgcagccgcccccggtgccccgctggcccagcgcccgctgtgcttggggccgggtgagtggctctggccctgcacccctgcccctgcaaccccaccggcggcgcctgcggctcctccgtgggcgcgattgtggccttctggctgggcctttcggctctcccagcccggatcagcgtccggggcggtttcgtgctgcgcttgccgggctttggcgttgccgtggtgcgggccgtctgcttgctgttggtgtccgtcttctggggtggcc

SEQ ID NO: 6912 - DNA, 497 bp, Chlorella sorokiniana
  unsure (1)..(497): unsure at all n locations; Clone ID: LIB3602-113-Q1-K1-E1
ggcgggcggggcggttgagcaccagnagcgctccgccactttcattctccacgacttcatgtgtaccagcgggcgggtgcttacggcgctccagaaggcgcgtgcggtgcgctgctgcatgagcgacgcaggcagcagcggccagcgcaccaccgtctatccagacctggttgccatcactagggagattctgtaccaccacagcctgctggagccagaggagtgacctgcacctgctgagtacggtacctgcacagcctgctggagactacgtagcgaaatgtttcaagtttagtaccaccgcaaatgctttccctgtagcaggagcagtgacgtgttttcacacgccggctgctgcactgtttgatgtttcacccaacttgctctttgccctggcttgagcagccaacgcatggttttactgcttttcctttttgcctggcttaagcagccaacacataaatgtactgctttccctttttgcctggctccaggag

SEQ ID NO: 6913 - DNA, 581 bp, Chlorella sorokiniana
  unsure (1)..(581): unsure at all n locations; Clone ID: LIB3602-113-Q1-K1-E2
gctcgcttgcccttcagtcacccataagccagcagccatgcagaccgccgctgtgcgcgcccccatcgtggcttcggcccagcagcagaaggccgcccccaaggcgaccgtggcggccctgccccgtgtggccaaggccctgggtgccggtgtggcctccctggccctggcgctgagcgccaacgccgccactgtgaagctgggcgctgacaacggcgcgctggtgttcgacccctccaacatcaccatctccaagggcgagtctgtgacctttgtgaacaacgccggcttcccccacaacatcgtgttcgatgaggacgatgtgccctctggcgtgaacgccgaggcgatcagccgcgaggactacctgaacgcccccggcgaggagttcaccgtcaagctggacaccgctggcgagtacggcttctactgcgagccccaccagggcgccggcatggtcggccgcatcaccgtgaactgagcgcagcatgctcagcgccgnggcgtgcactgacccatttttgaagcacttgctgtctctcttcggttgactggccctttttcagggtgtaacgctacac

SEQ ID NO: 6914 - DNA, 413 bp, Chlorella sorokiniana
  unsure (1)..(413): unsure at all n locations; Clone ID: LIB3602-113-Q1-K1-E3
gnaagctgcagcacgtgcatgctgctgttttgaagtggtcggctgttccaagctcagcactcccgcccagtacgccctcctccgctttcacaccacgtgtgcagcaactcacgccgcccatcacgtcacttggcgatttcgaggtgttctcccacgagaacgagctggatgggctgcgccacctcagcctgtctgtcctggagcacatgtcgtttgagcgagaggcgctgcgacgcaccagcatggatcctcacagcagccgctctaagcccttggcaacagaccatgaaccgaacggcgaggccaccagtgaggcgcctcaagccgctgctgttgatgggagctgaaccactgtatatttagcccttttgttgcagctgagatctgcctgggaagctggtcccttgcttgcg

SEQ ID NO: 6915 - DNA, 601 bp, Chlorella sorokiniana
  unsure (1)..(601): unsure at all n locations; Clone ID: LIB3602-113-Q1-K1-E4
anaggtggaggtgcagaagctgggcggcctgcacgtggtgggcacggagcggcacgagtcgcgccgcatcgacaaccagctgcgcggccgctcggggcggcagggcgaccccggctccacccgctacttcctgtcccttgaggacaacctgttccgcatctttggcggcgaccgcatcaaggggctgatgagcgccttccgcatcgaggacctgcccatcgagagccagatgctgaccaacgccctggacgaggcgcagcgcaaggtggagtcgtacttctacgacatccgcaagcagctgtttgactacgaccaagtgctcaacacacagcgtgacaaggtgtacgctgagcggcggcgcgcgctggaggcgtcagacctcacgccgctcatgatcgagtacgctgagcgcaccattgatgacatcctggaggccaacatcccgcccaccacgccgcccgaggagtggccgctggagccgctggtggccaagctgcggcagtattgctacctgctggaggacctgaccccgcaggcgctggcggcccgagcgggcggcgactacgagcgcatgcgcgactacctgcgcaagcgcggcgtg

SEQ ID NO: 6916 - DNA, 574 bp, Chlorella sorokiniana
  Clone ID: LIB3602-113-Q1-K1-E6
cccacggcggctcccgccgccagctggtgtgcgtggccaacacccacatccactccaaccccgagctgaacgacgtgaagctgtggcaggtgcacacgctgctcaggggctggagaagattgcagcctccgcagacatccccatgctggtggcaggcgacttcaacaccatccccggctcggcggcgcactccatgctggtcaagggctcggtgcagcccgccaacccggagctggccaacgacccgctgggcatcctgcgccccgcctccaagctgcagcaccagctgccgctggcctccgcctactcggctgtggcagcctgcccagacgccgaccacggcagccagcggcagaagcggcggctggactcggccacgggagagcccaagttcaccaacatcaccaaggacttccgcggcaccctggactacatcctctacaccactgactcgctggtgcctgccgccgcgctggagctgccggatgagagcgagtgccgctccaagagcaacgcgggcctgcccaacgactcctggtcgtccgatcatgtggcgctcatggttgagttctgc

SEQ ID NO: 6917 - DNA, 464 bp, Chlorella sorokiniana
  Clone ID: LIB3602-113-Q1-K1-F2
gccgagcgagaggagcaggcagccaacacacgcagccgcagcgctaagctcagagttgttgagaagctgtaaggctggctggctgcaccgcgcctgctgtggcaggcaggcagctaacgcccaccagcagtacaagcttaggcagcctgcagtccaagctgcagctgcactggccagttttagcgcaaggggtggcgccccgccccgctgctcccagccgccgcacccacccatcttttgctcgtgtacactagcacgttttgcaagtttggtagatagcaagcttccagttcctgacgtcccgtcctgcactttgctaactgcagaggtgcaggcttgacctgcctgaccgacatttgtgctctcccttccctccatttgctgccctttcaaacgtgctctactcttgtttgtgtccctcttggccgctcgaccctcagccaactatgcaactgttgcacaga

SEQ ID NO: 6918 - DNA, 353 bp, Chlorella sorokiniana
  unsure (1)..(353): unsure at all n locations; Clone ID: LIB3602-113-Q1-K1-F3
ttnngggnnnnnnngggggggcccccaaaaaaaaacgaggggggggggccccccccccccccctttttttgtaaaaaaaaaaaaaaaaaaaaaaaaaaaaacaggccgccctgggttcgtgtcgggggggcggggggggagaacacccacacacaaaaacaaaagaccaaaaaaaaaaaaaaaccnnnnngcagaaaaaaaagaaaaaaacaccgtggtgggggtggggggggagagaaaattgggggggggggaaggcgcaaacacaacccgcgccccccccaaagacttttttgggtgtaggtaaaaaaagaaaaaacaaagaaaaataatattggtgggggggggggggg

SEQ ID NO: 6919 - DNA, 240 bp, Chlorella sorokiniana
  unsure (1)..(240): unsure at all n locations; Clone ID: LIB3602-113-Q1-K1-F4
ctgcgccgctgcaggnagacgacgcggcgcggcacgcggccaaggtggagggcaagccgctgccggtgctcaagcgccagcccaaggcccccgcaccgaggccatcatgctggagaacgtgaagatggagaccatcacggccatcccctacgatatcctcaaggagggcgtgctctgagcgtgatcggcggcgacgttccgttgattgcggctgcagcttagtgagatgtaaccccgcag

SEQ ID NO: 6920 - DNA, 579 bp, Chlorella sorokiniana
  Clone ID: LIB3602-113-Q1-K1-F5
gcgagcatgagtgcagcggcgcggggtgctcgcaccactcacacaagcacgggcacagccaccagcaccacgacgacgcggtcagcagcgtgagcatcagcatcgagggggacatggaccttgataaggtcaactactggctgggcgggctgatggaggtgaagagcaacgacctgtaccgcatgaagggcgtgctggccatcaaggactttcccgcccgctttgtgttccagggcgtgcacatgctgtttgagggcatgccggaccgggagtggaaggagggggagaagcgggtgtccaagatggtgttcatcggcaaggagctggaccgccagctgattgaggagggcttccgggagtgcctggtcaagtgaccgggctgttttgggctgttttaaaagccgcgcagttgagacttggcaaggctgaaggcgcagcgtgctgaggcccgtagtacggcgcaggggcctgcaccggcgttttggagattgccccagctgacggcgcgcaccgaacgctgttgacgcgcactcacccatatcgactttatgcacactgtgaaaacatgattactaaaaa

SEQ ID NO: 6921 - DNA, 225 bp, Chlorella sorokiniana
  unsure (1)..(225): unsure at all n locations; Clone ID: LIB3602-113-Q1-K1-F6
tttttctccccccccgcccgcccccccccaaaaaaaaaaaacccccccccgcggggggggtgggcgcgcccccccccgccccccccccccccccccctccttttttttttttttctctcccccccccccccccccccccccccccgtggggggggggggtgggggggggagggaganagggggcggccgcgcgggggggaggaaaaaaattttttttgttttttt

SEQ ID NO: 6922 - DNA, 600 bp, Chlorella sorokiniana
  unsure (1)..(600): unsure at all n locations; Clone ID: LIB3602-113-Q1-K1-G1
gcccagnaccgccaaattaatcggcatggtgggggttgtggccctctcagtcagcctcaccgctgtgctctactcagcgacaggttttatgggctacctcgcctttccgcacccacagcccgacatcctgctcagcttcgatcccgaggacaaactgatgcaggtggctcgtgccgcaatcggcctggtcctaatcgcatcctatcccgtggtgcacttccccgctcgggccgcggtgcgcgagctgctgcaacaccttgcctccggcagcagagtcggcgctgcgctggcagacggcggcggcggcaggtttgcagcggtggaagcgctctgcttctttggcgccacgctggcgctggcgctgagctgcacagacctggggagcgtgtttgaggtcgtaggtggcacgtgcggcagcacccttgtgctggccgtgcctggagcgctgctgatcagctatgcttctcagaaggcagcagagtcgaggcagctgctggatggggcgtcgcttgcagggggcgacctgcggcagccactgcttgggtcagcagcggcaggggcaatagcggcagaagatgccgcagaacagggagcaggcgg

SEQ ID NO: 6923 - DNA, 80 bp, Chlorella sorokiniana
  Clone ID: LIB3602-113-Q1-K1-G2
aaaaaaaaaaaaaaaaaaaaaaaaaaaaaaaaaaaaaaaaaaaaaaaaaaaaaaaaaaaaaaaaaagggcggacagaata

SEQ ID NO: 6924 - DNA, 506 bp, Chlorella sorokiniana
  unsure (1)..(506): unsure at all n locations; Clone ID: LIB3602-113-Q1-K1-G3
catgcaccctgaacccaagcctttgcctgtttccgtttccctgccgctccgctctctgaccgctcagtctctccgggggctttgtcgcacgcactcgagttttccccagtggggggcgcggaccatgcgcccgcccctcgagccccattttgtccttcagccactgtagattccaggcccagagtacccccactgttgtaacaattggaaacgcaaaaaaaaaaaaaaaaaaaaaaaaaaaaaaaaaaaaaaaaaaaaaaaaaaaaaaaaaaaaaaaaaaaaacgaaacatactaggggatagtttttaataaaccgagatctcactaccaatgcactggccgtttaaggtcacctaaattcactccaaaaaccctggttttacccagccgttttccgcttgcaacccttgggaaatccctccaattgcccttttaaaaaatctgccttctcccaccgcttttcccagcgggggggcctccaaaaaggcccntgccaatcgccctt

SEQ ID NO: 6925 - DNA, 602 bp, Chlorella sorokiniana
  unsure (1)..(602): unsure at all n locations; Clone ID: LIB3602-113-Q1-K1-G4
ccggcatcagcaaggccttccgcaacctgcccggcgtggaggttgcctccgtggagcgcctgaacctgctgcagctggcgcccggcggccacctgggccgcttctgcatctggaccaagtctgctgtggagaagctggacaagatcttcggcaccaccgagaccgcgtccgagcagaagaagggctacaagctgccgcgccacatcatggccaacggcgacctggcccgcctcatcaactctgatgagatccagtcggtggtcaagccgcagaagaccggcaccgcccgcgccgcgctgaagaagaacccgctgcgcaacctgggcgcgctgctcaagctcaacccctacgccaaggtggcgcgccgcgccgagctgctggccgcgcagaagggcgccaagtcggccaaggtggaggcggcccgcaaggccaaggccgccgcgcgccccgcggtgaagaaggtgtccaaggccttctacagcaccatgatcaccgactcggactacgtgggcgaggactacgaggtgttcagcagctggctgggcaccacccagtgagcgccccggccggagtagctccccannaggagccagcgcggcgcg

SEQ ID NO: 6926 - DNA, 328 bp, Chlorella sorokiniana
  unsure (1)..(328): unsure at all n locations; Clone ID: LIB3602-113-Q1-K1-G6
cagaaaggataccctgnagcctatgtccgcgtcatcggcttcgacaacatgcgccaggtgcaatgcgtcagcttcattgccttcaggccaccaggctgcgaggaatccggcaaggcctaaagtgcaagttgaagtaaccgatatacatgtcatgttagtcacatttgtcggcggctctgctttctcagttttacttctcgttctactcatatgtgaatatatgagcatatgtatgtaagcacttaccaatgtaggtcgaggaggatgcatatgagaattatagcaccggctatacatatacatatatattatatgcaatcaacggatt

SEQ ID NO: 6927 - DNA, 574 bp, Chlorella sorokiniana
  unsure (1)..(574): unsure at all n locations; Clone ID: LIB3602-113-Q1-K1-H1
gctcggccctcaccttacggacacaaagcggacgagcaacatggggcggcggccggcgcggtgctaccgccagnacaagggcaagccctaccccaagtcgcgcttctgccgcggcgtgcccgaccccaagatccgcatttatgatgtgggcgccaagaaggcgggcgtggacttcttccctcactgcgtccacctggtcagctgggagaaggagaacatctcgtccgaggcgctggaggcggcccgcatcgcggccaacaagtacatggtgaagaacgcgggcaaggacgccttccacctgcgcgtccgtgtgcaccccttccacgtgctgcgcatcaacaagatgctttcgtgcgccggcgcagacaggctgcagacaggcatgcgcggtgcgttcggcaagccatttggtgtgtgcgcgcgcgtgggcatcggtcagatcctgctgtccatccgctgcaaggacacgcacgctgcggtggcggaggaggccctccgtcgtgccaagttcaagttccccgggcgccagaagatcgtggctagcaggaactggggcttcactccctacctgcgc

SEQ ID NO: 6928 - DNA, 564 bp, Chlorella sorokiniana
  unsure (1)..(564): unsure at all n locations; Clone ID: LIB3602-113-Q1-K1-H2
gcactcgtggggcgacagctggggcgagcaggcctacttccgcctgtctgccaagtccaaggacgaccgcggcgcgtgcggcgtgctcaccaccgcctgctaccccaccaagaaggcaccaccaaccccgaggtcccctccttctgcggctactttggctggaccgagtgccccgtgcactccacctgcacctgcaactggaacctgtttggcctgctctgcctctcctggggctgcgacgccggcgcgcagtgagcaccacgcagctaggcggatgtggcacatgccacacgctctcgactgtgccgctgctgctggcgctgcagcatccacccatgtcccaccatgcacgcacagtcagctaaagcgcatggccgaggcacctttcctgttgcaacatgcaccccacctgccgacgagcttgcctgacacttgctactaagaccgtcagcagcagcctgatatccctttggcgtgccccctttcatcctcagngtcctctgctgtaccatgcgttcattagggcccacgggccgcggcttttttgtgcaccatggcctgccc

SEQ ID NO: 6929 - DNA, 580 bp, Chlorella sorokiniana
  unsure (1)..(580): unsure at all n locations; Clone ID: LIB3602-113-Q1-K1-H4
ggnagcaccaggcgcggcccggccccagccgcccccgcgtcttgaacaacctccctcgatctcgattcgtgcacagatgtgctaccccatccccctccatcgtttttgcccgtagtgccatgcatctccttttctcgtctgctttttcccgggccagattggcctccggactcgtgacccgattgccgcggcacccctccggccatctgccgggggctgcggggcaggcctgatgccctgattccattcctgcacagattgcctccccgcttgcttgcgtttcgaccctgctgtgggccgtcagcttttgccggcaagcactgacacaaggagggcgcgcccagcccgccgcttggatccctccctaacttcctcccatggtcccgcattgttgctcgatttgttcccttcctcccaaccataccgccgctggctcagctcccagcatttgttcacttgcccctgccataccaccgcttgctgttaccggcttgctccgctcaggtcccgtgctcccatctcacacaacagcgcacgagcgcagcctgttttttcctcagctgatcacgcttttgcatca

SEQ ID NO: 6930 - DNA, 596 bp, Chlorella sorokiniana
  Clone ID: LIB3602-113-Q1-K1-H5
tgcaacacacaactccaggccaccaaggcagcacacggcacgatgcaggggcttgcacaccgttccgcgccctgcagccttgcagcgagctgcagtctggcccatccggcatcatgcatgcggcaatggccgggagcgggcagccagcttgcagcggcagcgccagccaggcggcggcagcagcggctggcggtgcaagtggcggcgagcggcggctttggcaagcctgctgagaaaaagctgagcaagcagaaggcttgcccctgcggtagcggtctagcattcaaggagtgctgccagcggtaccatgatggagagctgccgcccactcctgaggctcttatgcgctcgcgttacagcgcctacgtgaagaacaactggcagtatgtgctggacaccacgcaccccgagaacccgctggccaacgacccgcagtcgctgaaagacgacatccagtccacgtgcgacagcctgggattcgagaagctgaagattctcttggtggagcccggcaaggatgagaacgagggctacgtgacattccagacctggttcaagacccaaggccagatggggcagcgcgcgcagggctggca

SEQ ID NO: 6931 - DNA, 355 bp, Chlorella sorokiniana
  unsure (1)..(355): unsure at all n locations; Clone ID: LIB3602-114-Q1-K1-A1
gtggacatgttcctgactgaggaggagggcaagaggtgctcaaggtggactgccactttggcaagcgcaagagcctggcgtccatccgcacctgcacctcgcacgtgcagaacatgatcaccggcgtgaccaagggctacgagtacaagatgcgcctggtgtacgcccatttccccatcaacatcaacatcgagaacaagggcggcaaggtggagatccgcaacttcctgggcgagaagattgtgcgcgtggtggacatgctgccgggcgtgacctgcgagcgcagcgccgccgtcaaggacgaagctgnnatcctgaccggcaacgacatcgagctggtgtcccgcagcagcgc

SEQ ID NO: 6932 - DNA, 278 bp, Chlorella sorokiniana
  Clone ID: LIB3602-114-Q1-K1-A2
cgtggggcgacagctggggcgagcagggctacttccgcctgtctgccaagtccaagactaccgcagcgcgtgcagcgtgctcaccaccgcctgctaccccaccaagaagggcaccaccaacccagaggtcccctccttctgcggctactatagctggaccgagagccccgtgcactccacctgcacctgcaactggaacctgtttggcctactctgccttctcctggggctgttaggccggcacgcagagagcaccagacacctaggcagatgaaaaa

SEQ ID NO: 6933 - DNA, 481 bp, Chlorella sorokiniana
  unsure (1)..(481): unsure at all n locations; Clone ID: LIB3602-114-Q1-K1-A3
ccttcctgtgcaatcgcacagtcacgcacattgcgttgccagcgggcagcagcaatgagcgcctccagcgtgcaaggaagagttgcggcaccagtagcgggcgctcccggctgtcgaaggcagcgcaacaggcatgcagccgccagagacgctcgcagctggcagtcgtggcgtatgtgccacgagggcacaaggagggcacccgcgcgccgcccgggcccggtggccggactgagaagcagcgcatgcttgcaggggagtcctacagcccatttgatcccgagctagtcgatgcccgcatcaacgccagaaggttgctgcgcatgctcaactacgagctcgactatgcagatgtcaagggccgggaggaggtgctgaagcagctgctgggcggcgccaactggcgctgccctccctggtttgactcgcccttccattgtnacttcgggttcancattcccgtgggttagcacccctatct

SEQ ID NO: 6934 - DNA, 361 bp, Chlorella sorokiniana
  Clone ID: LIB3602-114-Q1-K1-A4
cgcgtggccaagtcaccggcggcgcccccaacagctgtccaagatcaaggtggtgcgcaagggcattgcccgcgtgctgaccgtggtcaaccagaagacccgggacgctctgaaggaggcgtacaagggcaagaagtacgtgcccctggacctgcgcgtcaagaagacccgcgccatccgccgccgcctcaccaaggcgcaggccaacgccaagactgagaaggctgccaagaaggcgcgcgccttcccgcagcggaagtacgcgctcaaggcgtgaaggccttggaagcagcccgctgcagccgtgcaggcacacctctaggcagcggccgctccggccccatgtaacttgacgcccgac

SEQ ID NO: 6935 - DNA, 550 bp, Chlorella sorokiniana
  Clone ID: LIB3602-114-Q1-K1-B1
cacgacttccagcgcctgctgatcgctgttgagcagggcaggagtctatctgcgcagccaccgttcaccacccgccgccgccgtcgctgccgctgctgccatctattagcagcaagccctacaactggctgcatctcgcatcgggcgccatgattgtcgcagcagccgtcatcgcaccaaacaactcgccgctgtacctctccacgtttggcggggacgacgagtcagcgcggctgtccaccatggtgcactgctcgctggacgcggttgaggagaaggtggcggcggggctgcggggtaccgcaccaggggacgtgcctgatgcctatctgggactgttgtcatcagaggatgagctcaaggtgttcggctacgtcaccaacacacgggtcaagctggttgctgtggtggacgacccgatcgtgaaggacgatgaaatgcgtgcgatcttccggcgcatgcacgcggcatttgttgacgcggcgtccaatccattctaccagcaaggcgcgccgtttgcctcggcgcgctttggcgcccgggtactgcg

SEQ ID NO: 6936 - DNA, 353 bp, Chlorella sorokiniana
  Clone ID: LIB3602-114-Q1-K1-B2
tccggcaacccctgagccgtcagttcatgcaaccccaaccatcagccgtcgcaccgtgatacccccgttgcaccaatcctccccgccagagagcgcgctgctctcacgcccacatttcaagctaacacttgaccctgcactttttgccgcccataatcccctccgtcaatgaaacgaatgttatactgcccttctgcacccttcattttgcgcactggcacagttttgccctgatgctctcaattcgcgagcgcttcgatccgtctgtcctttgttccgtgtgagtgttccttttttccccgctcctcctaccatgtgtattcttgggtcatatgttgtaacatagagttttc

SEQ ID NO: 6937 - DNA, 560 bp, Chlorella sorokiniana
  Clone ID: LIB3602-114-Q1-K1-B4
cagggcctcggccctgtctgctacccacctgctccctgccaggctcgttgctttgcacccccgcctgcctcggtacgcaccctcccttcctgggccctggcccagtcgcacaaccccccacctgggcccttggccctgtttgctttgaccccgctcgctgccgcactgcggcgcaccatgctccttccccacaccgaccctgcaccttggccctcatattgctgccgtccgtcgcctgccgtgccccgccagcccgcctcatggggcgctccatgcagctcacatccccctggcaggctggctgagcacttaggctagacagcagctgcccgttggcctccctgcacccggttttgctcccttcttgcttccacaacccgcttgcagcaacgttgctcgtgcactgctcccagcagttggtggtgctcaacgatggggtcacccggacacccgacctccgctgttgttgtttcattccagcattgcatgcccacgttgtgttgtttccagagccagtcagcctgtggaccaggccccacctctgtaacccaagcaagcaa

SEQ ID NO: 6938 - DNA, 369 bp, Chlorella sorokiniana
  unsure (1)..(369): unsure at all n locations; Clone ID: LIB3602-114-Q1-K1-B5
naaaaaaaaaaaaaaaaaaaaaaaaaaaaaaaaaaaaagaaaaaaaaaaaataaaaaaaaaaaaaaaaaaaaaaaaaaaaaataaaaaaaaaaaaaggggcggcctgttttaaaggttccaagtttcctttgcccgtgcttgcgaacgtcttaagtttttttttaagtcccacctaaattccaatttactggcccgttgtttttacatacgtgtgttttgggaaaaaccctggtgttccccaatttattcgctttgcacctcatccccttttggccagctggcttattaactaagaggccccctccgttggcccttccaaacatttgggcatcctgattggcaaatgggaccccccttgttttggcact

SEQ ID NO: 6939 - DNA, 396 bp, Chlorella sorokiniana
  unsure (1)..(396): unsure at all n locations; Clone ID: LIB3602-114-Q1-K1-B6
gctgcccgtgccccaggcctggcggtcaaggtgtgagaagaacacgaccatcgaggtgtccgggtttgacaaggagctggtgggccagtttgcagccaacatccgcagcaagcgcgagccggagccgtacaagggcaagggcgtgcggtactctgacgaggtggtcatgcggaaggagggcaagcgcgngaaagtaattggctcggcatcttgttacggcgagagccatggcagcctcacatcttgctgctggacagcctggcacggcatgcacatttcgcggcctgccagcctgacgcaccgctgccgccactcattcttctctgctctgccattccctttgcgcctggcatctttctgttctttgttactgctaccgatttaacgctcctgcgc

SEQ ID NO: 6940 - DNA, 528 bp, Chlorella sorokiniana
  unsure (1)..(528): unsure at all n locations; Clone ID: LIB3602-114-Q1-K1-C1
gctacggccacgccggcgatgtgttcatccccaccatcggcttcatctactttgctggctggctgggctacgccggctccaagtacctccagaccgtggccaccgccgccaagcccatcgagaaggagatcatcatcgatgtgcccctggcctggaagctgctgtgggagggctttggctggcccctgcgcgccttcgccgagtacaagaacggcagcctgatggaggacgacgccaagatcaccgtctccccccggtaaattggcagcccttgtagcggcgccgcgcccatttgtgcgcgcgccagcagcagcagcagcagcagcttgtatcatgactgcggccgtgggaggaggccgcggcgggcaaaggcctgagagctaaccaaccaagctccctggttaaggcctggggagcgccggggtcggcgccgcgcagcaccccgccgctcgaacctggcggccgagcagcggagcagcaggggcgccgnnccgccgnnccctagcnggccctgcctgccttgggggg

SEQ ID NO: 6941 - DNA, 66 bp, Chlorella sorokiniana
  Clone ID: LIB3602-114-Q1-K1-C2
aaaaaaaaaaaaaaaaaaaaaaaaaaaaaaaaaaaaaaaaaaaaaaaaaaaaaaagagacgaacat

SEQ ID NO: 6942 - DNA, 543 bp, Chlorella sorokiniana
  unsure (1)..(543): unsure at all n locations; Clone ID: LIB3602-114-Q1-K1-C3
ttttttttttttttttttttttttttttttttttttttttttttatttttattttttttatatttttttttttttttttttttttttttattttttttattttttttagttttttgagcaaatgggttctggctgaggaggggggaatagtgggtggagtgaagggggggggaaaaaaaaaaagccgttctggggtgggggggagggttggctttttaataaaaggggtggggggcaacagggggggatttaaaagaggtgggggagaagtggccctcccttttttgcgacgggggggggggaaaaaaggtaaaaaaaaaaaagtgggggggggggagttgcttctgttaaaaaaaaactttttttgtgtgtcttaacccggagaatgtgcccttccaattgttttttgtgggtgctttagctccccattctcagaattttttgggggcggggggggggtttttgggggggtttttttgtgtccgggttttttgggnttttttttttttttttgggggttttttttgttttccctttggggtg

SEQ ID NO: 6943 - DNA, 315 bp, Chlorella sorokiniana
  Clone ID: LIB3602-114-Q1-K1-C4
cgagcaggaggtgaaggtggaccagtgcaagatcgtggtggtggaccagcggctggcgcccaatgccgacaaggagtgatgctgctacacctccggcagtaacatcattcccccatagtggcaccgacgtctgtccagcagccagctcacccggcctcagaactcagttcaaacctcggcacaccttccgctcccgtgtccgctatgctctgctccactccctctgctgcccagctctgctcccggcttcccgtgcgcactgctctctgttgcgttaaagctggaacaatgcgatagtctgcaacagaccggggc

SEQ ID NO: 6944 - DNA, 513 bp, Chlorella sorokiniana
  Clone ID: LIB3602-114-Q1-K1-C5
ccgtccgaaaaaaaaaaaaaaaaaaaaaaaaaaaaaaaaaaaaaaaaaaaagaaaaaaaaaaaaaaaaggaaaaaaaaataataaaagaaaacaatataaaatacaaaaaacttgctttgggagtagctaaaattttaatggggggcgcccctttttatttcccctggccgttcgggggggcccccctttgggctgcccaaccccctgggggttggcccccgttttccaccttggctctccgggcggttcttccccagctggctcttttcgccccctttgccccctccccctcgtttttcccttttgggggtttggccccctttgttcacgtgggtcctctcctttctcgcggctccttggggtgcggcggttgagggggccctcccccttgcgtcgccctttaactcgcccgcttcctgggggcgttcctcttttccctcccctttttttcctttttttccccggggggtcgttttttcccgcctttttttttcggcgtttgtttttttttg

SEQ ID NO: 6945 - DNA, 569 bp, Chlorella sorokiniana
  unsure (1)..(569): unsure at all n locations; Clone ID: LIB3602-114-Q1-K1-C6
cgcacccacagcggtggctgcgctgcgcgccaacgagcagcgcctggtcacagcctacgacttgcacaccacgctgcaccacctgctgcacctgggggagtcggcccagcccacggcgcagcagtatggcggctggacggcggccggcaacgtgagccagtcggtgcgctggggcgtcagcctgctggacgaggtgcccacggcgcgcacctgcgacgatgcgggagtgcccccagagttctgccagtgcttcctgccctgaaaacaaatggtgctaacacctggatacgtcatgccatccctgcgcacccctacgactgaattctcagaccacactttttgccgtgtggcgcgaaatttttctccacaaatcgtgcagtgagttcaccatcaatagggattcagccctgtgtcgtactcgtatgtacccttcccctctacctcccttgcccctccctctccttctggcctgcccaaccgcctgaccctgcctctgacgcacgcatccaattgcttgcagnactagaccttttttcactcagccctccaattgtttgcatgaagtaaat

SEQ ID NO: 6946 - DNA, 284 bp, Chlorella sorokiniana
  unsure (1)..(284): unsure at all n locations; Clone ID: LIB3602-114-Q1-K1-D1
aagaagnacgtgctgggctccgtgttcggctcccgcggctaagcacccgggtctcctacctgttgccgccaccagtgtagccggcgcggcgggcccgcggcagttttgtgtgtgacgccagtgcgcaagcagcagcggcgggatccctcctcggcgccgcgcggcccgccgcggcgtgccccccaaaccctgtattctcttcgtctggtcccattttccattcagacgccacgagaagaaaaatttctaatggcactctgctcttgttttaatatctcgaactg

SEQ ID NO: 6947 - DNA, 253 bp, Chlorella sorokiniana
  unsure (1)..(253): unsure at all n locations; Clone ID: LIB3602-114-Q1-K1-D4
aacacctgggaccgcttcggnagcgcctgcacaagcgcctgatcgacctgcactcccccgccgaggtggtgaagcagatcacctccatcagcatcgagccgggagtcgaggttgaggtcaccatcgccgacgtgtaagcagccatttcagctgtggaagctggtcgcacggtgcgcccctgaccgccgctggcgggcgggtcggcccttcggagccgcggccgccgccgcccgccncgcnncccccnngcccc

SEQ ID NO: 6948 - DNA, 566 bp, Chlorella sorokiniana
  unsure (1)..(566): unsure at all n locations; Clone ID: LIB3602-114-Q1-K1-D5
ggcgcctcgctggtgngagaggacaagctggccctggccaagagctgatggagaaggccaaggccaagggcgtggagtttgtgctgcccaccgacgtggtggtggccgacaagtttgccgccgacgccgactgcaaggtcgtgcccgtctccgccatccccgacggctggatgggcctggacgtgggccccgagagcagcgagatgatcaagaaggcgctgtccgactgcaagaccatcctgtggaacgggccgatgggcgtgtttgagtttgagaagtttgcggcgggcaccaactccatctcccacctgctggccgacctcacggtcaaccagggcgccaccaccatcatcggcggcggcgactcggttgcggcggtggaggctgcgggcgtggcggacaagatgagccacatctccaccggcggcggcgcgtcgctggagctgctggagggcaaggtgctccccggcgtggcctgcctggacgacgcatgaagcggaggaggcagcacattgctgcttgtgggaggctcagcagccagccggccgcggctgtgaagcgctcgc

SEQ ID NO: 6949 - DNA, 537 bp, Chlorella sorokiniana
  Clone ID: LIB3602-114-Q1-K1-E1
gtctgacccggcaggcgggctttcgggtgggccctgaccgccccgctgccacagctgccctggagggccgcctgctgccactgatgtgcgccgacatcgacctcattgccgcagggcggctgcgcccgaagaaagcgagctgccttacctggcagcctgggcagaggttttggccaccatcagcgtgcggctgccgccgcagcagctggaggcagtctgcagcttcgtgggccagcacctgcaggagctgactccccgcgatagggagcgtttgctgaaagcctttgaggcctggggctacgagcctggcctggcgttgctgcacccgtaacttcagcctaactgcgcttgccacaggctggaggtgcggttgggcgggctgcaggagctgctggggcgcatcaacacagacatcggcatcgcacgcagccagctggacctgccgcagtggcagaggagctcgcgcagcagctggcggcggctggtgtgaagcagggagtaatggtcgcctctttgcacgttatatatagctcttta

SEQ ID NO: 6950 - DNA, 566 bp, Chlorella sorokiniana
  unsure (1)..(566): unsure at all n locations; Clone ID: LIB3602-114-Q1-K1-E2
ataactcggcctgggcttccgcacccccaagnagccattgagggcaactacattgaccacaagtgccccttcaccggcaatgtcagcatccgcggccgcatcctgtcgggcaaggtgaagagcaccaagatgaaccgcacgattgtggtgcgccgcgactacctgcactacatcaagaagtaccagcggtacgagaagcgccacaccaacatctcggcgcacatctcgccctgcttccgctgccacgagggcgacaccgtggtcatcggccagtgccggcccctgtccaagacggtgcgcttcaacgtgctgcgcgtcatccccgcgggctctggcgccaagaagggcttcggctccttctaagcaggctggactaagggcctcttgccttgctggctgaagccctcgacagcagcagcagcagccccagcacggcatgcaagcgctgcagacgccctgctgccctgagtaagcgccgccatgtgccggcggtggcagcagcaccgcccgccttgcatacacctggccccttagatgccggccacggggcgcccagttgttgccag

SEQ ID NO: 6951 - DNA, 492 bp, Chlorella sorokiniana
  Clone ID: LIB3602-114-Q1-K1-E4
atccgattcaacacggccgccactgccattcgctggatgcgccgccctggtgcgatttgggcgctgcgcctgatgtgccgctattttttcctccatttggtttctcacactcactgccatgccactcgagtcctgcgcgtgccggccgccccctgggccctgccgcaggggccttcagacgagggctggcgtcagcgcactgtcttttgttgttttgcctcctgctgcccaaccgcaacaccccctgcctgctggtatagccgaactttccaccccggcttactacgcaataaccagcgcccttttccctgccgaacggatgccactacctgcccctccgctccaccaacaacaccacacatcatgcttgctcacccggccccgcgcaagcgggactgcgccgtccctcaaacttccccctgccaatactttacccttttccggatgccgagacgatcacaacgcaacaatgtgtgaacagagctgatctaa

SEQ ID NO: 6952 - DNA, 87 bp, Chlorella sorokiniana
  unsure (1)..(87): unsure at all n locations; Clone ID: LIB3602-114-Q1-K1-E5
gtgactgcaacatttggcgaccgaccatcagtgctgccattacaggccttgatagctgcctagcggtgctgtgtaaatttctgggng

SEQ ID NO: 6953 - DNA, 543 bp, Chlorella sorokiniana
  unsure (1)..(543): unsure at all n locations; Clone ID: LIB3602-114-Q1-K1-F1
ctcccccctgcaagccatccgccggnaggaggcgcagcttcgctgtccctgccttcccacaactgtcaagatggctcccaagcgccgcaccacccaggaggagaatgtcagcctcggcccggccacccgcgagggcgagctggtgtggggcgtcgcccacatcttcgcctccttcaacgacaccttcgtccacgtgactgatctgtccggcaaggagacgctggtgcgcgtgactggtggcatgaaggtgaaggccgaccgcgacgagtcgtccccctacgccgccatgcttgccgcccaggacgtggccacccgctgcaaggagctgggcgtgaacgcgctgcacatcaagctgcgcgccaccggcggcaaccgcaccaagacccccggccccggcgcccagtccgcgctgcgcgccctggcccgctccggcatcaagatcggccgctttgaggatgtgacccccatccccaccgactccacccgccggaaaggtgggcgccgcggtcgccgccttggaggcgggcgcgctttgcgcgctcc

SEQ ID NO: 6954 - DNA, 465 bp, Chlorella sorokiniana
  Clone ID: LIB3602-114-Q1-K1-F2
ggcaacgccgacccatctcgcgcactacaatctctggcagtctcgcgcctgatcagtcgcttgtcggctcggccgctttcggctcgccctcctcgcgcagtggggctcgcagagcctgatcagcgccgcggggaaccggagggccggccaaggccagcagtcgttggaggagggcaccggcctgttcgacgccgccgcgctgcccgccgagggccaggcggcggtggcggcggcgctggaggccaaccccgccgccgacatggggcaggagtgacgcggcggcggcattccaccctcgatggcgcattgcagtatgggcctgcctgcagctggcgccttcgcacgccagcgcagtgcaccctcgacatgctgccagccggcacactcagctgttctatactgccgagtcccacgcaaacatcacacagtgcaatacatgcatttgactgtaaagtgctgtcaccg

SEQ ID NO: 6955 - DNA, 586 bp, Chlorella sorokiniana
  unsure (1)..(586): unsure at all n locations; Clone ID: LIB3602-114-Q1-K1-F4
cgcgcgatgctggatgctgctcctngattagcgctggcaaagatggagacgggggccaccccgctgcacatggctgcccagaagggtcacgatgaaacggtgcgagtgctgctgagtgcagagccagcagcagctgtggagcgcctgcttgaaggcgcccctggcgcgttagccacccctctgtacttggcgagcctcgaggggcatgctgccacagtgcggcagctgctggcggccgcgccgcaggcggcaggcatgctggcgagcgtgctgacgcagaagaccccgctgcacgccgctgtgcaagaaggcaatctggacgttgttcaagcccttttggaggcggcgccgcacacagctctgatcggcaccagcgacggccacctgcccatccacttggcggcagcgggcagccagcacacctgcagcgcagccatggtgcagctgctgctggccgcggcgccaggcacagcgtctcatgcgcacaacggatttacgccgntgcactttgcggccatggggggcaatgcagcagcagcgcgcctgctgatggcagtcgcaccccgcggcgcggaacgagcgctag

SEQ ID NO: 6956 - DNA, 575 bp, Chlorella sorokiniana
  unsure (1)..(575): unsure at all n locations; Clone ID: LIB3602-114-Q1-K1-F5
tacgacagccggnacggcagcagcagtagcagccagctcacggcagcagntacagcagttacagcagggcagccgccacgcgtctgcttggcagccggctatgaggacggcagcctggtgctgtgggatgcagccgcccccggtgccccgctggcccagcgccagctgtgcaaggagccaataatggctctggccctgcacccctgcccctgcaaccccaccggcggcgcctgcggctcagccgaggacgcgattgtggccttcaagctggaccattcggctcacccagccaggatcagcgtccggcacgaaatcgagctgcgcaagcagggcattggcgatgccgtggtgcggcccgacggcaagctgttggtgaccgccggctgggatggccgcgtacgagtgtacaagtaccgcagcgggcgtgcgctggcgatcctcaagtaccacacatctncggtgacgggcctgcgctttgcgccacgcagcatgctgctggctaccgcggcacgggatggcacactcgcgctctggcccgctgtccagccggatgagcaggtttaatgggctacctg

SEQ ID NO: 6957 - DNA, 384 bp, Chlorella sorokiniana
  unsure (1)..(384): unsure at all n locations; Clone ID: LIB3602-114-Q1-K1-F6
tttctttttttttttttggtggtggggnggggggggggggccgcccgcccccccccccccccccccccccccgcgcgcgggggggnctgtaagaaaaggnaanaagaaaaaaaaaaaaaaaaacacaaaaccaaaaaaaaaaaaaaaaaaaaaaaaaaagtaagaaaaaaagaaaaaaaggaggggggggnggtgggggggggcaggggcggggggcggttgtcctccttgtcgcccttcttctctttttttnttnttttttattattttttttggtttntttttttttttttaacaattaaaaataaaataaaaaaaaaaaaaatntaaaaaaaaaaaaaaaaaaaaaaaaaaaaaaaaaaaaaaaaaaaaaaannaatcaaa

SEQ ID NO: 6958 - DNA, 274 bp, Chlorella sorokiniana
  Clone ID: LIB3602-114-Q1-K1-G1
caataacatgccaatgcccacgccctcgcggttgaccaacttcaccttgctcctaactcaatgcatcttttgcccaacacctccttgaccgccctgccgctgtcctgcgccctgcaacctggaccccagtccctcacttcttttcctaaaccttccaaaatcagtttacaacagtgctttcactgtctaacacattagatgctgccagtctgcattcgagtttcttctgggcagccgcatacttgccgtatctgccttgcaagcagagctgatg

SEQ ID NO: 6959 - DNA, 260 bp, Chlorella sorokiniana
  Clone ID: LIB3602-114-Q1-K1-G2
cggccgcccccgctgccggcggcgccgcgcctgccgccgctgcggccgccgcccccgagcctgaggaggaggaggacgaggacatgggcttctccctgttcgactgagcgggccacagcctgcctggttgagctggagcacaggccagccctgcaagcagccgcaccaaggatgccgaggtgtggctgctgggctggcaagcccaggggtgcagctgccccccctgggctggcaagcccaggggtgcagctggcccccct

SEQ ID NO: 6960 - DNA, 560 bp, Chlorella sorokiniana
  Clone ID: LIB3602-114-Q1-K1-G4
tccgaaaaaaaaaaaaaaaaaaaaaaaaaaaaaaaaaaaaaaaaaaaaaaaaaaaaaaaaaaaaaaaaaaaaaaaaaaaaaaaaaaaaaaaaaaaaaaaaaaaaaaaaaaaaaaaaaaaaaaaggggggcccttttataaagaaccggggtttcccttccgggggcttcccgtttcttcccctttttttggggccccttttttttttttttggcccccttttttccccctcgggggcggggttcccccgggggtcccccggttaaacccccttgggccccccccctttttccctggggggggttcccccttttgggccctggccttttcccctttcccccccctccccccccctttttggattttgggcccccccttttgggggttttttccccccctttgttggtttttttccccccggggggggggtttttttccccagggccctcccccctttttttttgtttttttcccctttttttttggtttttttccctttttttccccccaatttttaggtttggccccccctttttgtttccggggggccccttttggggc

SEQ ID NO: 6961 - DNA, 570 bp, Chlorella sorokiniana
  unsure (1)..(570): unsure at all n locations; Clone ID: LIB3602-114-Q1-K1-H1
agggnagcaagcgccatggctcccgcagacaatagcaaggccgccaaggccgccaaggcggtcaagaagagctccttcaagaagacgaagaagccccgctacagcgtggtgttccaccgccccaagaccctcgttcgcagccgggaccccaagttcccccgcgtcagcgcgccccgccaggcccgcctggatgagcactccgtgatcaagtaccccctgaccactgagtccgccatgaagaagattgaggacaacaacaccctggtcttcatcgtggacgtgcgcgccgacaagaaggcgatcaagaaggctgtggcccgcctgtacgacatccagaccaagaagatcaacaccctcatccggcccgacggccagaagaaggcgtacgtgcggctgaccgccgactacgatgcgctggatgtggccaacaagattggcgtgatctaaagcgtgcggctggagcggggcggctcccgcccctcccaacccacccttggcctggtgccaaggcgccggcagcctgcacggccaccccacgcggccgggggcgccggcgcagcagcggcagcg

SEQ ID NO: 6962 - DNA, 444 bp, Chlorella sorokiniana
  unsure (1)..(444): unsure at all n locations; Clone ID: LIB3602-114-Q1-K1-H2
ctcttgattcacccgagtctgcctttcgttccctttagtgcgcctcccatcgacttcagtccctgcatttcgtcgcgtgtccgtctgccttcagcgtgtggcccatgccccgctgtacgtccaggtctctcactgccgccgctacgcattttccacccctccgatcgctcccctttccccccaatacccctcccccggcccttggccaccaatgaatgccccgcaacccccgacccctacgcctcttcgctactacccctcttcccctgccctcttctacctgcttagcggctttcatcccgtctgtggtgcgtgcatgtccgtgcccttgcgctgtgtgtcttgactcgctggcttctcccatgcccgctttgncgcttgctcttcatatgctgcntgctgcgtggtgcgtctgggcggngctccacagtgtnacacgctctg

SEQ ID NO: 6963 - DNA, 150 bp, Chlorella sorokiniana
  Clone ID: LIB3602-114-Q1-K1-H4
agcacattcctgcaatggtggaatgggaacgggccactgtaccgtgtgcatgtaagcatcgaacgggtgtgggttgttactgcgctaccgtgcaccgcttacactttgccagttgcccatagcgcctcagctccttgtctgcttttcttc

SEQ ID NO: 6964 - DNA, 586 bp, Chlorella sorokiniana
  Clone ID: LIB3602-114-Q1-K1-H5
gcacctttgtggccgtcatgtacctgttcacagtccaggattccttggtgattcgccgcaccgtgttctaccgcgagcatgcggccggcacgtacaacgtcatccccttctgggcggcggagctgctggctgaggcgcccttcctggtggtcaatgccatgatctacagcgtgatcgcttactggggcgtgggcttcatcccggacgccgccaagttcttctggtactacctgatgatcctgctggtcctcttcgccttcatctcctttggcatgatgtcggtccacatcacgcccaacctggagatctccaatgccttctccgcctttgcctttgccctcatcaacctgatgtgcggcttcatgcggcccaaggcctccatccccaaaggctggatctggctgtactacctcgacccagccagctactcgctgtacggcatggtggccaaccagctgggtgacgtggactcgctgatggagctgccacccggctcggtgaggcttggggatttgggctaacaaccttgtgccattagttgtgcccagctgccggcagctgtcgcttgcattgcgggcagctggca

SEQ ID NO: 6965 - DNA, 382 bp, Chlorella sorokiniana
  Clone ID: LIB3602-115-Q1-K1-A2
ccttcacccaccaagctgcacgcctcagctggctcagtaggcacatccagcgctgcagctgggccgctggactggcggcagttggcagatggagccagcagccttgcggcgctggcggcagccactgggctgctgtcgcccctactgggcacgctcacagaaaacgtcagctcagactccatcattgcctgcgcctgcctgctcctgctagctcacctgtacctgcacgattaccacttcacagccggcctcactgcccacctgagcggcagcctggcgctgggctgcgctgtgtgcggcagcgtgctcatcgcctcgcggctgcgcagcccgctggcagtgtatgcgcagctgctgctgtcgctcgagctgtacattctgg

SEQ ID NO: 6966 - DNA, 469 bp, Chlorella sorokiniana
  unsure (1)..(469): unsure at all n locations; Clone ID: LIB3602-115-Q1-K1-A3
cggtccggnatcccggtcgccccgcgtccggttcctgctgtaggttcatgttgaaaaaaaaaaaaaaaaaaaaaaaaaaaaaaaaaaaaaaaaaaaaaaaaaaaaaaaaaaaaaaaaagttaaaatttaatgatcctttttttttttttgctgttttttttatgtttttcttttttttcttttttgttgggtgggggggcgcttgctgcttttccttttgcgcttcttttttttgctttctcctttttctgttgcgtctttccccttgggtcgtgtttgttttttttcttccggggcgttttttggtgttggttttgcgtcttttttgtgtggttttttcctttttttttgttttccttgctttgtggttttttttccgtttgttttttttttgttttttttttttttttttgtttttttttttttttgttttttttttttttttttttttttttgttttctttttttt

SEQ ID NO: 6967 - DNA, 526 bp, Chlorella sorokiniana
  unsure (1)..(526): unsure at all n locations; Clone ID: LIB3602-115-Q1-K1-A4
cggncgcgtgggcgctgcccgnccgccgccagnagcggctggtgttccaggcctgcacctccgcgatgaacctgagcgaggaggtggacctggaggactatgtggcccgccccgacaagatcaacaacgcggaaatcgcgtccatctgccaggaggcgggcatgctggcggtgcgcaagaaccgctacgtcatcctgcccaaggactttgagaaggcgtacaagaacgtggtccgcaagcagtcggacagctttgagttctacaagtgagagcgggcggctgtgcgccggcgcagggcaaaggaggaaaaaatcggcgtgcggcggtatcctccgcctgtgcacttgcacccctgcggcccttgcacccacctgccatgcatgcctgcaccgtttgtaagccaggagcacgcnnaanaaaaaaaaaaanaaaaaaaaaaaaaaaaanaaaaaaaaaaaaaaaaaaaaaaaaaaaaaaaaaaaaaananaaaaaaaannaaaaaaaaaaaaaaaaaaaaaagggggg

SEQ ID NO: 6968 - DNA, 307 bp, Chlorella sorokiniana
  unsure (1)..(307): unsure at all n locations; Clone ID: LIB3602-115-Q1-K1-A5
gcagnaacagcgggngaatcgacggcaaggtgtacacatacatcgccttcacctccgagaccacaacccgcagcggctaccaggtgcggcgaaagaacctggcggtggcagcggcgcgaaaggcaacctctttgtgctgggctgctcagcacgcagcgaccagtttgacaaggagaaggaggcggcattcgagaccattgtgcagtcgttccgcctgctctgagcggctgccatggacagtggtttgtgcagcggcaatgtgttcaacattattggctgcgtgttcagcactgcaagcactgcggtt

SEQ ID NO: 6969 - DNA, 354 bp, Chlorella sorokiniana
  unsure (1)..(354): unsure at all n locations; Clone ID: LIB3602-115-Q1-K1-B1
gnacctgtacgtgggcaaggaggtggtgcggcgcaacatcgacaacgacaaggcctgcgacgagctgatcgacctcatcaaggagcacggccgctggcaggacccccctaaggaggaggagggtgaggcggccctggctggcgccggcgcctcgtccgcgtaagcgccccgctgcacgcagcgcagccattgctgccggctgccgcggccttgcgcaaccctgctcccatctgttccgctgcacttttgtttcttccatttgctttgctcctttcatctgccacttgccgcggctacgattgaacgctatagtacagttccaccgaatactgagtaactgacagcacgagcgtt

SEQ ID NO: 6970 - DNA, 588 bp, Chlorella sorokiniana
  Clone ID: LIB3602-115-Q1-K1-B2
ccttcctgtgcaatcgcacagtcacgcacattgcgttgccagcgggcagcagcaatgagcgcctccagcgtgcaaggaagagttgcggcaccagtagcgggcgctcccggctgtcgaaggcagcgcaacaggcatgcagccgccagaggacgctcgcagctggcagtcgtggcgtatgtgccacgagggcacaaggagggcacccgcgcgccgcccgggcccggtggccggactgagaagcagcgcatgcttgcaggggagtcctacagcccatttgatcccgagctagtcgatgcccgcatcaacgccagaaggttgctgcgcatgctcaactacgagctcgactatgcagatgtcaagggccgggaggaggtgctgaagcagctgctgggcggcgccaactggcgctgccctccctggtttgactcgcccttccattgtaactacgggttcaacatccacgtgggtaagcacacctatctcaacatgaactgcacaatactggacgacagcacggtgacgattggggaccgagtgctcatggggccaaacgtcaagatctatgcagtggggcatcccgtggatcct

SEQ ID NO: 6971 - DNA, 422 bp, Chlorella sorokiniana
  Clone ID: LIB3602-115-Q1-K1-B4
gctgcccgtgctcgacagggcctcgcgttcaaggtggctaagaacatgaccatggaggtgaacggcgctttgacaagggatctggtggggaccagtattgcactccaacatccagcagcaagcacgaagccggtagccgtacaagggacaagggctgatgcggatactctagacgagtgtggaatatgacgagaagggagggacaatgcgctggaaagtaattgggtcagcatcttgttacggggagagccatggaaggactcacatcttgctggtggacagtctggcacggcatgcacatttcacggcctggcagcctgacgcaccgctggcgacactcattcttctatgctctgccattctgtttgcgcctggcatctttctgttctttgttactgttaccgatttaacgctgctgggcc

SEQ ID NO: 6972 - DNA, 580 bp, Chlorella sorokiniana
  Clone ID: LIB3602-115-Q1-K1-B5
gccggcgccacggccggggaactcctggctgggtgtgcacgagagagctggcggacgaagtggcggcggcgcagcgggctggcggcctggactacgtgctgtacggggacagcatcatggaggcgttccgggggcagagcgtgggctgggacgccagcgaccggtacagcggcaacctgcaggcctggagccggctggcgccgcccaaggcgctagtggctggaatctcaagagaccaagcggtccacctgctgtggcggctgcagaatggggaggggccgcgggggctcaaccccaatgccgtttcggtcatgattgggaccaatgatgtggcgcacctcagctccatgcatgggtacaacgccagccggatagggcacattgtggcgctgggcgcgcagcagtgcgtgcgcgagctgcagcggcaggtgccacaggccaccgtggtggtgctggcgctgctgcccatggaacccatgatgctgcacgcccctcagctcatgtttgggcccatggtggcggcagccaatgcggagctgcaacagtatgtggcggcgcagggcatcgaacggcttaagtt

SEQ ID NO: 6973 - DNA, 325 bp, Chlorella sorokiniana; identical to SEQ ID NO: 6196
  Clone ID: LIB3602-115-Q1-K1-B6

SEQ ID NO: 6974 - DNA, 408 bp, Chlorella sorokiniana
  unsure (1)..(408): unsure at all n locations; Clone ID: LIB3602-115-Q1-K1-C1
ccgtcgtcgaggtagccagcactgatggccaaaatcaaggcccatgagctgcgcggcaagggcaaggaggagctgctgcagcagctcaaggagctgaagcaggagctgagcggcctgcgcgtggccaaggtcaccggcggcgcccccaacaagctgtccaagatcaaggtggtgcgcaagggcattgcccgcgtgctgaccgtggtcaaccagaagacccgggacgctctgaaggaggcgtacaagggcaagaagtacgtgcccctggacctgcgcgtcaagaagacccgngccatccgncgccgtctcaccaaggcgcaggccaacgccaagactgagaaggttgtcaagaaggcgcgcgcctttctgtagtggtagtacgcgctcaaggtgtgaaggtcttgtaag

SEQ ID NO: 6975 - DNA, 538 bp, Chlorella sorokiniana
  unsure (1)..(538): unsure at all n locations; Clone ID: LIB3602-115-Q1-K1-C2
gcatgtctgacctttgctgtccatcatagtgcatcactgtttgccctccagctggcctaaggacagctctgggctgcatcgcaacttcacctgccgactcgttgtgcctgcacctgcttgctctgccgccccgcatcctcacgttccctcatggcctcgcccaccccctttgcctacgattgcaggtgctccacttgctccggctactactaggcaactagctgagcaaggcagggcagcctgaaacaggctcccatgtgccgacgctgctggcggcatgaggcacagcaccaagaaaggcagctttcaagggcggcgttgtgctggagcaggcatggccgccagtctggagcgccagctacagcacgttgccgcgctcgatggccctgccaaccagcctcgacgcacagctgaagcgctgcaacacacccgtgacaaaccgtgcaacagcagccacacactgcgttgcttgaaccccctttccgtgacccaagacccgatccattccgggatctctcccatctgcnacccagcacac

SEQ ID NO: 6976 - DNA, 329 bp, Chlorella sorokiniana
  unsure (1)..(329): unsure at all n locations; Clone ID: LIB3602-115-Q1-K1-C3
cattttattccctttggaaaaattccccttttccccggtggggtttttaccaaaaggcccccccccgttcccctttccaaaattttgcccccctttattggcaatgggacccccccttttgccggccttttaaccccggggggtggggggtttccccccagggggcccttttcttttgccgggcccttagcccccgttcttttggttttttccctttcttttcccccccgtttggcggttttccccggnaagtttttatttggggggctccttttggggtcccctttaatggttttcgggccctttgccccaaaaaattttttttgggg

SEQ ID NO: 6977 - DNA, 490 bp, Chlorella sorokiniana
  unsure (1)..(490): unsure at all n locations; Clone ID: LIB3602-115-Q1-K1-C4
cgcacccacggcggtggctgcgctgcgcgnccaacgagcagcgcctggtcacagcctacgacttgcacaccacgctgcaccacctgctgcacctgggggagtcggcccagcccacggcgcagcagtatggcggctggacggcggccggcaacgtgagccagtcggtgcgctggggcgtcagcctgctggacgaggtgcccacggcgcgcacctgcgacgatgcgggagtgcccccagagttctgccagtgcttcctgccctgaaaacaaatggtgctaacacctggatacgtcatgccatccctgcgcacccctacgactgaattctcagaccacactttttgccgtgtggcgcgaaatttttctccacaaatcgtgcagtgagttcaccatcaatagggattcagccctgtgtcgtactcgtatgtacccttcccctctacctcccttgcccctncctctccttctggcctgtccaaccgnctgaccct

SEQ ID NO: 6978 - DNA, 537 bp, Chlorella sorokiniana
  Clone ID: LIB3602-115-Q1-K1-C5
catccagcagctttccagccactcggcacttgcccccagtcccacacacagctgcaaccatggtgatggcatccttctccaggtcatgtccgtgatcggccccgtggctgcggtgagcgccagcctgtactacattcagcgcggatatctggcccctgggccgcaccctgaacaacgagtggtttgcggccagcgagagcctgatgagcgccatgccccgccagggcagctccacaccggtgcgcatgaaccctatgtcggagaacatcaacatgaatagcgtcacgtactgagcgcctcgctggcagcccccatggactgaggcggcccgctggcagcggcaggggcctgaggccccacaccccgcagccgcgtgcgcctcagctgggcgggccacaatcgctgcccctcttactacactgagttttcgactcaaatttatgtcctatgcactcacccctttggttaaccctgtatcacttgcctcgcacccgcgcccatcggggaagcccactctgtaactgtgagccatatctg

SEQ ID NO: 6979 - DNA, 282 bp, Chlorella sorokiniana
  unsure (1)..(282): unsure at all n locations; Clone ID: LIB3602-115-Q1-K1-D1
tttgctcctgctgctcgctcccgagcgccccctagctcgctccatattaaggcatgagcttctctgcccctgatatcgcccccttggctgaagcgcagttacaggtgggggcgcggctgcaattcgnaggcaagtgcgcagttcagacaggggggcgatntnnggggctgtgtagcgggggggggaatatggtgcgagcttgggggcgcttgggagcgagctgtttggtgtttnntgggcgcgtgggttgttttgggagttttggtttggtacttggtggcg

SEQ ID NO: 6980 - DNA, 218 bp, Chlorella sorokiniana
  unsure (1)..(218): unsure at all n locations; Clone ID: LIB3602-115-Q1-K1-D2
cgnacttcacgaggnacggcctgactacctgggcaacccctccctgatccacgcccagtccatcgtggctgtgctgctgacccagctggtgatcatgggcgccgccgaggcgtaccgctacagcggcgagggccccgtggnagaccagcggcgactccctgtaccccggcggcttcttcgaccccctgggtctggcttgacgaaccccgnacaccctg

SEQ ID NO: 6981 - DNA, 331 bp, Chlorella sorokiniana
  Clone ID: LIB3602-115-Q1-K1-D3
ttcgccttttcccgtttgttcccactagtctctctgtacaacacccgctgcgtgctttggtccccaacccgctttcttcaaacgctttgctcaccacgctttgcccccaacccttcaaccaacctcgccccaacgaatgaagttttccgccgtcgtcgccacggcacgcaggccgccctgcggttggcccatcttatctggccccacacaggcaccactgcatggctctttagcagcctcgtttttctgtactttgctccaagctgtatgcctgcagagcccgatacaatcgctggcccacatccctccacctatgtaacgactgatttca

SEQ ID NO: 6982 - DNA, 558 bp, Chlorella sorokiniana
  unsure (1)..(558): unsure at all n locations; Clone ID: LIB3602-115-Q1-K1-D4
gctgcgggccatcattggcacataccgagngctgttcaaggcgccggcgctcacagaggcggtgctcttctccaattacgcgctgacggcactggtggtggatgaagtgtgcagagagggactggtgngagctgaccgatcggctgagcatacagaaggccattgctatgcggctgcccttacgagccgccggcagagaagagcaagnnggcacgcttggcccaaaagccttccaattggggaaagccccccaaagggcgccccaaaaaaaaaaaaaaaaggggggggngttttttttttttttntnttttnnttcttttttttntttttttttttttttttttttttttttttttnttntnnnnnttntnttttttttttttttttttttttttgttttttttgttttttttttttttttttttttnttgttttttttttttttttttttttttttntttttttttttttttttttttttttttttttttttgtttttttttttttttatttttttttttttttttgttttttttttttttttttttttttttcttt

SEQ ID NO: 6983 - DNA, 369 bp, Chlorella sorokiniana
  Clone ID: LIB3602-115-Q1-K1-D5
caacttcgaccccctgggcctggctgacgaccccgacaccctggctgagctgaaggtgaaggagatcaagaacggccgccttgccatgctgtccatgttcggcttcttcatccaggccatcgtgaccggcgagggccccatcaagaacctgaacgaccacctggctgacgcctcggctaacaacttctacgccctgtacgccaagaacctggcgtaagcacttgtcgtacgaacgtacgaggcccgcgcgcgattgtgcgccccttgagaagatcacacgaccctgtcgcaccgcactgccgcctgtacgcacccaccatgtgtatgtgctagagcctatgaagttttgtgtaagcccttgatactcct

SEQ ID NO: 6984 - DNA, 489 bp, Chlorella sorokiniana
  Clone ID: LIB3602-115-Q1-K1-D6
cccaacctggtgcacgctcagtccatcgtggccatcctgctgacccagttgtgctcatgggcctgattgagggctaccgcgtcaacggcggcccggccggcgaggtggtggaccccatctaccccggtgaggcctttgaccccctgggcctggctgacgaccccgacaccctggctgagctcaaggtgaaggagatcaagaacggccgcctcgccatggtgtccatgtttggcttcttcatccaggccattgtgaccggcaagggccccgtgcagaacctgtccgaccacctggcctccccctccaccgacaacttctactccctgtacgccaagaccctggcgtaagcggcctgcacttgctcctgcttgagcctcgactggcggcgggcgtgaccctgtggcagtgcgctcccgcttgcgcccgctgcctgacttgacttcagctccactgttgcaccgaggggatggtgtaacatgtatgctgggg

SEQ ID NO: 6985 - DNA, 279 bp, Chlorella sorokiniana
  unsure (1)..(279): unsure at all n locations; Clone ID: LIB3602-115-Q1-K1-E1
gtgcgcgtggtggacatgctgccgggcgtgacctgcgagcgcagcgccgccgtcaagacgagctgatcctgaccggcaacgacatcgagctggtgtcccgcagcagcgcgctgatccaccagaagtgcctggtgaagaagaaggacatccgcaagttcctggacggcatctacctcagcgagcgcggcaccctggtgaagcccgagtaagcggagcccgcacgttgcagtagaggtggcggcacgagcgcagcagtgcgcagngctcacgcccgcgccg

SEQ ID NO: 6986 - DNA, 509 bp, Chlorella sorokiniana
  unsure (1)..(509): unsure at all n locations; Clone ID: LIB3602-115-Q1-K1-E2
gccagctggcgtacagggggaggcggagctgcccatgaaccgcttcaggcccaactttgtggttcgcggtgcgcgcgcctttgcggaggacaagtggagcacggtgtgcatcggcgggtcggggccaggcggcgagggcggcatcgagtttgacagcgtgaagccgtgcagccggtgcaaggtgaccaccatcgaccaggccacggcggaggagggaatggagccgctggtcacgctgagggagcagcgcagcgggcgggcactggggtgggagatgccgcccgacttccggggctcgctcttcttctgctggaacctgacggcacgacagcggggtgtggtacgggtgggcgatccggtgctgcccaccgcgctgcgcgacggcccgccgctgcccaacccgcgctgatggtaactttgatcaagtttgtgattcctgtttgcgtgcatgcntnaatgtaaacaggncctggcttannnaaaaaaaaanaaaannaaaaaaagggccg

SEQ ID NO: 6987 - DNA, 557 bp, Chlorella sorokiniana
  Clone ID: LIB3602-115-Q1-K1-E3
gaccggtgcagcagtacatggccgcgcaggcaggctgcgcgttcaaaacgtggccacctttgccccctttgacttcggcctggcatggcgcaagggcgccaacaccagcctggtggatgcatatgacagcctgctgctggcgctgcaggaggacggcactgtttcgcagctgcggacaacgtacatcgatgtgccgcgcaccgagtgcgagagcaatgtgaacgaccagacctccatctcgtttgaccaggtggcaggcctgtggatcattctgggcgcgggcgtgggcgccgccctgctctggctgatctgcctgcggctgtggaagcggcggcggctggcgcagaagcgagcgcgtgcggcggccgaggcggcagcagcggcagccaagctggggcttgaaggcgggcctgatcctctggtgcttggcgagcacagcggcgccgcaaatgggcagcaggccaagccgcggcatcaccagtacaaggcaggggtggccttccggcagacggtcagcatttacggtgcacagattggcacacaccgacgagaggctg

SEQ ID NO: 6988 - DNA, 563 bp, Chlorella sorokiniana
  Clone ID: LIB3602-115-Q1-K1-E4
tgacagcacaagctcaagctgctcacgctagtcagcgcggcggacagcgtgcgcacgctaggatatgaggacctgatacggcggctggagctgcccagcgtgcgtgcgctggaggacctgctcatcaccgagtgcttctacgcggggctgctcaagggcaagctggaccagcgcaacaggtgcctgcatgtggaggaagcgttctgccgggacgtgcaccccgaccagctggcctctgtgtcaggcgccctgggagagtggctggacagcgccaatggcgtgctggcagccattgagcagcgcatcgactggacacaaaacgcctgcgcagcagcggagcggcagcgcgcagaagcaacacagatgctggatgcagagcgcaaatccattcgaaccaccattgagctgcaggcgcaggcggacagcagcggcgtgctgatggatgccgaggcggaaggctttaatctggccgatctggagggcagccaggatgcccggcctggccccactgctggcaagcacaccaagcggcgcaggttatgcggcacatgctgtgcacaaac

SEQ ID NO: 6989 - DNA, 562 bp, Chlorella sorokiniana
  Clone ID: LIB3602-115-Q1-K1-E5
ggctcccgcaccaagagcaggccgccaagccgccaggcggtcaagaagagctccttcaagaagacgaagaagccccgctacagcgtggtgttccaccgccccaagaccctcgttcgcagccgggaccccaagttcccccgcgtcagcgcgccccgccaggcccgcctggatgagcactccgtgatcaagtaccccctgaccactgagtccgccatgaagaagattgaggacaacaacaccctggtcttcatcgtggacgtgcgcgccgacaagaaggcgatcaagaaggctgtggcccgcctgtacgacatccagaccaagaagatcaacaccctcatccggcccgacggccagaagaaggcgtacgtgcggctgaccgccgactacgatgcgctggatgtggccaacaagattggcgtgatctaaagcgtgcggctggagcggggcggctcccgcccctcccaacccacccttggcctggtgccaaggcgccggcagcctgcacggccaccccacgcggccggcggcgccggcgcagcagcggcagcggcgcgtcgggcgc

SEQ ID NO: 6990 - DNA, 573 bp, Chlorella sorokiniana
  unsure (1)..(573): unsure at all n locations; Clone ID: LIB3602-115-Q1-K1-E6
ctcacccagctgctgcgctccatagccggcgccnaccgagttcaggttccttttgccggcggcgaggtcacgctgatggccatccggctgagcgacctgatcgccctgctggacgggtacgaggacgatggctcctggctgcccagcgaggaggaggacgatgactgctggctaaacctcttcactgcctcccaccgctgcagccgcaaatcctatgctgcttccgagagctgggcacccaccgaggccgctgccgcgcaggcggcgggcgccgccaacctgaccagcgacgacgtgaagaccttcgccgccgcgtgctccgacgagaaggagtatacgcaggcagagtttgatgactggcggtctgcgctcatcccacctttcgctgcctggctggccgagcggatcaacggatttctggcccagggagactcactcagcaagatcgtccagcgcacccaaggccacgttaatggcaccaagctggtgcccctggtggacaaggacggcaaggtgatcgtgaacgagcacggcgacccggtgtatgcgcgtgcgggcgagaagggcgcccac

SEQ ID NO: 6991 - DNA, 316 bp, Chlorella sorokiniana; identical to SEQ ID NO: 6436
  Clone ID: LIB3602-115-Q1-K1-F1

SEQ ID NO: 6992 - DNA, 435 bp, Chlorella sorokiniana
  unsure (1)..(435): unsure at all n locations; Clone ID: LIB3602-115-Q1-K1-F3
caccaactttgtgcccggccgcttccggcctgtggtttgcctgcaccttgcagtctcccgcttgtgcgctgcgagcagctgcacacacccatgcttcactcgggtagctctttccagctcctgcccacccacttttgtctcatcggccctagtcatcccctcctgcgttgttcttcaagtcctctgttgcatctgctcagccacgcatgctttccaacaacacacgtagccgactctcgtttttctgtctcctcctgtcctcttgtcatctttactttttgcttttctccatcgattggcggttgatcctgctccctcaacctcacccaatccaacaaacatcgcaccctcattctgcacactcgtcactgcagctaaggtgcctgccttctgtaaatgcttctcagtnnanaaaaanaaanaaaaaaaaanaaa

SEQ ID NO: 6993 - DNA, 511 bp, Chlorella sorokiniana
  unsure (1)..(511): unsure at all n locations; Clone ID: LIB3602-115-Q1-K1-F4
ggacaattgcccacggacctggctgcccctttgtttgcggccttctgcacagcaccgctgctgtccgtcccccctcctgtctgctctccaccccaccctccaatgattgtcccctatctgatctgcatgcactcttgttgtcctcgcggcaatgtgcccatgtcgcctctctcccttcattctgtgggccacacaccccacccgctggtgcaccaccccagcccgacatttttatctgccctgcatgcgtcctgttgccaatgctctgccccattcatttgccccaagttgttggcgtgtcaaaaagtttcgatgcanaaaaaaaaaaaaaaaaaaaaaaaaaaaaaaaaaaaaaaaaaaaaaaaaaaaaaaaaaaaaaaaaaaaaaaaaaaaaaaaaaaaaaaaaaaaaaaaaaaaaaaaaaaaaaaaaaaaaaaaaaaaaaattggggggcgttttttagggaataaagtttttattacgtgttgttttggaagattataaattttttt

SEQ ID NO: 6994 - DNA, 319 bp, Chlorella sorokiniana
  Clone ID: LIB3602-115-Q1-K1-F5
cattcatgcctgcagcaccgctcctgtttcctgcccaggcactgctgctgaggagagctgatccgcctcctgtgcccgcccatgctgccgcagatgcccacgtttgccacgcagcggcagctggagaaccacaagtcggagccgctgctgtttgaggtgcagctgctgcgcgtgggcgggcagaggtgaagggccaccgggagtgccgaacgaagcggcagagcctgtgatctccctccactgctttgcgactgctatttgaactgccattcccgtgtgctgtatcggcgcgtcattgcgagtgtaatgtacaacaagc

SEQ ID NO: 6995 - DNA, 580 bp, Chlorella sorokiniana
  Clone ID: LIB3602-115-Q1-K1-F6
cgccgttcctgccctcctccctgtactccaccagcctgcccctggcggccgtggcggctggccagcgggagcagcagcaggcggtcgcctacagcgtggcggagagcagcctggcccagcgcttcacgatggcgcccgccccggcagagaagaagatagccatgtattctaaggacttttacgtggcgtgcagcctgggcggcatcgtggcctgcggcgccacccacacggccgtgacgccgctggatgtcgtcaagtgcaacatgcagaccgaccccaagaactacaccggcattgtgcagggcttccgcaagattgcgggcgagcagggcttcaagggcctgttccgcggctgggtgcccaccgcctttggctattcggcgcagggcgcgttcaagttcggcctgtacgagtacttcaagaagacctactctgacatggcgggccccgaggcggccaagaagtaccagaacctgatcttcctggcgggctccgcctctgccgagttcttcgccgacattgcgctctgccccttcgaggccgtcaaggtcaaggtgcagacggtgcccggctacgcgcg

SEQ ID NO: 6996 - DNA, 539 bp, Chlorella sorokiniana
  Clone ID: LIB3602-115-Q1-K1-G1
cgccatccacagggcggcggcagcgagggcgacgaccggcatgtgctggtggagcgcagcgacagctacaggggcggcggcggcggcagcagcagcggcgcagccatgtggtgccccatgacggcctgggagacggcagcggtgcgcctgctgcacgagcagccgggcatcacgctgggagagatggcgggcctgcacccgctgccgccctgctgggcgggcacgtttgcggcctatgcagcctacgtgctgcgccgcaagcagctgttcaacgtgcggccctcgggcgggcagcgcgagagcgccgctgtgtacgcctccaagggcgcccgcgcatttttgctgttcaagcgccgcgtgcttcagttcctggcggagcaccggccgcgcaccgatgtgcacgccgtgctggctaatgtgcccgctgagggcatggcgcagcacctgatgagcgagctggagcgcaaccccgtggtgtttttgaccaagtaccttggcggtgagcttgcggttgtggaccctaaacaaggtagtgtgcg

SEQ ID NO: 6997 - DNA, 414 bp, Chlorella sorokiniana
  unsure (1)..(414): unsure at all n locations; Clone ID: LIB3602-115-Q1-K1-G2
cccgggtcgnacccactgcgtccgcgcgcctcgtgcgcaagcgcatgnaagcagcagcacaggcagagcatgatcccaccacgacctgcgtggcagggccggcagggcagcggcagtgcggtagcagcaactgggggtgcggcgctccgaccgcgatggcaagggcaagatgtcggaagattacttcaaaattatggtcgctatggtgctccgtgacgcggttctgcgctgctactcctagtccgtctctggcctactttgattcaacccgcacaggcaccactcgtgctagcacgctcaatccacacacgaatccgaagcttgcgctgctgactgtaaacttgggtctctgcaaaaaaaactttacactaaataaaattaaaaaaaaataaccacttataaacaaatggagta

SEQ ID NO: 6998 - DNA, 251 bp, Chlorella sorokiniana
  unsure (1)..(251): unsure at all n locations; Clone ID: LIB3602-115-Q1-K1-G3
gccgctatttatagaggacgtgtgcttngaanaggcaatcattcgcatctcatggcactgaacggctactatgcatacttggttgctgcttccagcacataactggatttctttacgtgctacttgtctgcttgcccactctgtattgtcctgacattgtcttgattgcaattacaaaaagtatggcacagccgcacgcggcgccatcatgttgctgttctcatcagtctctgtaaagtacttgacctcgc

SEQ ID NO: 6999 - DNA, 404 bp, Chlorella sorokiniana
  unsure (1)..(404): unsure at all n locations; Clone ID: LIB3602-115-Q1-K1-G4
gccgaaggattggttacagcacgtggtgttgcaaccggggtggcgcgccgggctgcgcactgcgcccgacgcgccgctgccgctgctgcgccggcgccgccggccgcgtggggtggccgtgcaggctgccggcgccttggcaccaggccaagggtgggttgggaggggcgggagccgccccgctccagccgcacgctttagatcacgccaatcttgttggccacatccagcgcatcgtagtcggtggtcagccgcacgtacgcctttttntggccgtngggccggatgagggtgttgatctttttggtttggatgtnntacaggcgggccacagnctttttgatcgnctttttgtaggagtgcacttttcctatgaataccaaggtgttgtttggttttttttt

SEQ ID NO: 7000 - DNA, 93 bp, Chlorella sorokiniana
  unsure (1)..(93): unsure at all n locations; Clone ID: LIB3602-115-Q1-K1-G5
naaaaaaaaaaaaaaaaaaaaaaaaaaaaaaaaaaaaagaaaagaaaaatataaaagaaaacaaaaataaaaaacaaaaaaaataaaaaaaaa

SEQ ID NO: 7001 - DNA, 413 bp, Chlorella sorokiniana
  unsure (1)..(413): unsure at all n locations; Clone ID: LIB3602-115-Q1-K1-G6
cccgggtcgnacccacgccgtcacagggcggcggtagtctttccattgcgagtgcaaggatatcagcaacgcttgcaccggcagctgcacaaacgcggctgcagttgctgctgcatggtgcgccgcgtgatgttgcaagctgtctgccgcgctgccctgctccgccgctacgcatagtactgcagcgacgccttcttcttggcctgcacctcagtgatggcctcattaaagtcctgcagatccacagccgcaagatgaacgtcagcccggacgtgaactacgatgagctggcccgcagcacagacgacttcaacgccgcgcagctcaaggcggtgtgcgtagaggcgggcatgctggcgctacggcgggatgccacacangtgaaccacnnagacttnnatgaggncctcact

SEQ ID NO: 7002 - DNA, 595 bp, Chlorella sorokiniana
  unsure (1)..(595): unsure at all n locations; Clone ID: LIB3602-115-Q1-K1-H1
naaaaaaaaaaaaaaaaaaaaaaaaaaaaaaaaaaaaaaaaaaaaaaaaaaaaaaaaaaaaaaaaaaaaaaaaaaaaaaaaaaaaaaaaaaaaaaaaaaaaaaaaaaaaaagaggggcgggccgtttttaggaggatccaaagtttcacgtccccggtgcttggcaacgtttttaagtttctttttatgggtgcccccttaatttaatattcatgtgggccgggggttttaacaacacgtcgggccgggggaaaacccctgggcggttccccaaatttatatcgctttgcagcaaatcccccttttccgccagttgggtttaatagccaaaagggcccgccccgttccgcctttccaaacagttgcccaccctgattggcaattgggcccccccttgtaccggccctttaagcgcggggggtgggggggttccccccagggggcccgttacatttgccagccccttagcccccgttcttttcgtttttttcctttcttttttgccccctttcgccggttttccccgtaaggttttaaatggggggctccttttggggttccgttttagtgttttaggggcccttcccccccaaaa

SEQ ID NO: 7003 - DNA, 69 bp, Chlorella sorokiniana
  Clone ID: LIB3602-115-Q1-K1-H2
ctgctttcgcggtgccctgcgctccccttcgcctttcttgtcggaggtcactctatattcatttagacg

SEQ ID NO: 7004 - DNA, 574 bp, Chlorella sorokiniana
  Clone ID: LIB3602-115-Q1-K1-H3
ggaccgcttcctggccaaggcttcaccctgcgcggcctagaattcatgaacgtgaccaagcagcacgcggagacccactacgccgacctctcctccaagcccttcttcggcggcctggtggagtacatcatcagcggccccgtggtggccatcgctctggagggcaaggacgtggtggcccaggcccgcaagatcatcggcgccaccaaccccctggcctccgaccccggcaccatccgcggcgcgtacgccatcgacattggccgcaacgtgatccacggctccgactctgtggagaacgcgcagaaggagctggcgctctggttctccgagggcctggtggacaacacccccgtgctgcgcggccagatctacgagtgaaccgcgcacagcaggctgtgagggcgcccaagcactgggcgcctggcagctagcagcggcaggcttgcgcccgagactcggtccggctccaaaaattgaatcgaaaaagctgacttgtcacattccattctggtccccttgtttcatgctgcatgccccacttggaattggcaagcaggaaccaatcagcctt

SEQ ID NO: 7005 - DNA, 593 bp, Chlorella sorokiniana
  unsure (1)..(593): unsure at all n locations; Clone ID: LIB3602-115-Q1-K1-H4
ggcgcctgccgtgatgccacaccaagncactgtgtattacaatcgagggtttgagttcgtcaaccttggtgtgctggcgtacctgggagacgacaaggcgctcacccaaatcgagctgcctggcacaagtattcgcctcacgggcgcgctgggcaacctgatctacaaatcagtgtacattacgaagcaggtgtccttccgcaaccgcgtcctcatcctatttgactggctcaaggcccaggtcttcggccgcgacctgtccaactactgatggcaagccacggtggaagccctgcagaacaacatgcagggcagaacgactgtcaagccgagcgcggatagactcccgatcctcatcccaacctccaacaacagaatgtgcgctcccgtcctgcttttcaaccaaccctccttgcaatcaacctcccctctctcaacccctccccccatgccagccgtgctgcgcctgggcatgatagatactaagtagtgctgctggacggcaccgtttttccttgttccccgtctcgtgctgcgcatttgatgtctgtatcaaccccgcatttgatgcctgtactaatccccgctgcggc

SEQ ID NO: 7006 - DNA, 582 bp, Chlorella sorokiniana
  unsure (1)..(582): unsure at all n locations; Clone ID: LIB3602-115-Q1-K1-H5
cggnagcgtgggccggcagcagcagcagcatgagcaggagggcagcgccggcggcagggcaggcgtccggcagcgcaaacagggcccagcccaaaagcagcggcagcgtcggtaaacgtcaaagttgaagcagaggacgccgcagtggcactggagacaccagggcgggcggcaccctgtgagccaagctcccctggcggccagtctgcagacaacggcctggtgggccgggcgggggctggcgctacacccgccgccgccgcaccagccgcagcagcaacctctgggctggcgggcaactcagacgaaggcgacctgtttgacttgctgatggcttgcgctgaggcaccaggggctgaggatgcgggcctcaccggcgagctggtgtgccagtaccaggaggtgctggatgcgctgccgccgccggcacgagccaccaaggaggagcgcctgcggaagcagctggctgcacagaagattggcaatgcagtggctatgatgcagatggcggtgaagctagcactgggcggagggctgaagagctgaggcgctggcctgtctacagtgcgcagcggccgctct

SEQ ID NO: 7007 - DNA, 477 bp, Chlorella sorokiniana
  unsure (1)..(477): unsure at all n locations; Clone ID: LIB3602-115-Q1-K1-H6
ggcctgtccctggnagcttgcggcatcagcgatgactcccagtagtacatcctgatgcgcctgctgggtggtgccaagaagcgcaagaagaagacctacaccaagccgaagaagcagaagcacaagcacaagaaggtgaagctgcgggtgctcaagttctacaaggtggacgacagcggcaaggtgcagcgcctgcgcaaggtgtgcccccagtgcggccccggcatcttcatggccacccacttcaaccgcgtgtactgcggcaagtgccacctgacgtacgtgtacgacaaggagggccagaccgcctaagcgccccgctcccccctgcggatgcacgcttagcagcagcacacgcggcgggtgcgcccggcatgccggcacaccagccacggagcggcggggcgtccctggcagcggcgcagcgcctgcaagcccttctgttgtgttctgtgccgctgtaatacccctgctgca

SEQ ID NO: 7008 - DNA, 383 bp, Chlorella sorokiniana
  unsure (1)..(383): unsure at all n locations; Clone ID: LIB3602-063-Q1-K6-A1
ccagcaccacctacccccacctggcagnaagtcgatcgccacctcggcgcccgcccgccaggagggtgacaactccaccttcatcgaccagaagttcgccagcgctgccgccgacgagctgaagcagatccgggagaagctggaggagaagtaccaggctgtgcgcccctgagcgcgcctgacaggctgagccctgcgatgctcaaacgctccgagccggcggcgcgccgccgtcggccggcggctgccccgcctcgcggcgccggtgccggccgcagccgcagcccatgcacctctgtacgctgcccctcgccaaccttttggaaccctactttttagccttcttctttgcaagcctacaacccgaccccaaaccaaccagc

SEQ ID NO: 7009 - DNA, 397 bp, Chlorella sorokiniana
  unsure (1)..(397): unsure at all n locations; Clone ID: LIB3602-063-Q1-K6-A10
cgngctttgnaaacccctctttgattgactcatttggatgatgcattctttccggtccccacgtcctcccgtcctgtccgctgtaccaccacgccatgccatcccatccatccatccatcttgcgccgcgtgcccaagctctgccagcagcagcccacgtgcccgcagctgcccctgtgcccacctgtgcgcactttaattgagcgtgcctgcccgctcctgtcccgctctcgctcccagtccagtcgcgtgcctgtgtcggtgttgtgttgaatgtttagtggaaaacgaactgccgcgcccctagccctttcttcctgtttctctgtgcatgcctgcctgaaacgaactctttatgccttttgctgtgccacaatcgggtaatcagcctctggag

SEQ ID NO: 7010 - DNA, 590 bp, Chlorella sorokiniana
  Clone ID: LIB3602-063-Q1-K6-A11
cgccatcatgcgggccctggtcgcgatcctcctgcttgtgctggtcgtcggagcgctggccaggaagtacgaagaccctgtgaccagctgcatcaagaggtcgaagtgcgcgtccaagaagttcaagccggtctgcgctcgcaacgccgccactcaggacacctggggaggtttccccaacgattgctacaggaagtgcgccaatgccgcccatgactttggtgtggattgggtgaagggccactactaccgcgtgcccaagtactgcaagaccaagtggctggcctaccccgtggagtgctccacttgctccggctactactaggcaactagctgagcaaggcagggcagcctgaaacaggctcccatgtgccgacgctgctggcggcatgaggcacagcaccaagaaaggcagctttcaagggcggcgttgtgctggagcaggcatggccgccagtctggagcgccagctacagcacgttgccgcgctcgatggccctgccaaccagcctcgacgcacagctgaagcgctgcaacacacccgtgacaaaccgtgcaacagcagccacacactgcgttgcttgaacccc

SEQ ID NO: 7011 - DNA, 535 bp, Chlorella sorokiniana
  unsure (1)..(535): unsure at all n locations; Clone ID: LIB3602-063-Q1-K6-A12
caaggttcgccnacccggnttgtgtactacatagcaccgcgaggctcggngtggcgaacgagtatgtgaaggttgcagaggccaagctcatccgccagaagctgaagaagtgctacaaggagtcgggggtgaacttccagcagaactgccgcgagctggcgcaggagtaccttgaatcgattaagggcgtgggcgtgtaccgcgcaaactccgggccgcacgacgagccgcggtgggagtactacaatgcagagcggaagcagtgaggcagcatgggccgctgcctgccagctgcgcatgtgcgggcgccgctgtgtgcggttcgcgcacagcccactgcggccgggctgcggggcgccgtgaggctggttgatccagctggcgccacctgccatgtactcgcctgccagcctggctgtagctgtgctgctgtggccgcaggcaccagctgcgtgctctgttgcagcctcattttttcctgcttgaggcatgcttcccttgctccacactgtcaatcctgtgtaacctctcactg

SEQ ID NO: 7012 - DNA, 568 bp, Chlorella sorokiniana
  unsure (1)..(568): unsure at all n locations; Clone ID: LIB3602-063-Q1-K6-A2
ggcctatacagtgcccngagtgtttagcgacgatttgttcaagctgctgggcgaggctcggcccgactggcgctggctgattgccgggccttacaagagcggcagcggctggcacaaggaccccaacagcaccagcgcctggaacggcgtggtgagcgggcgcaagaagtggatcctgtacccgccgcacatcacgccgccgggcgtgcggcccagctgcgatggcgctgatgtggcgagcccagtgtcaatcatggaatggttcatgtccttctacgagcacaaggagtcggtgggctacacccccgcggagtgcatcctcaaggagggagagatcatgtttgtgccgcgcaattggtggcacatcgtgctgaacctggacgagtgcgtggcggtcacccagaactttgtcagcgaggtcaccctaccgcatgtgctgtcccacctgcgctcccgctcccccgccctggtgtcgggctgcgccaaggaggcgcgctccggactgtacgaccgctttgtcaaggctctgaaagagcaccggccggagctgctggaacgggtggcagca

SEQ ID NO: 7013 - DNA, 240 bp, Chlorella sorokiniana
  unsure (1)..(240): unsure at all n locations; Clone ID: LIB3602-063-Q1-K6-A3
ttttaaaaaaaaaaaaaaaaaaaaaaaaaaagaaaaggggngggcggaactaaaaaaacaaaaaattgcgaacaacaatacatacaaaaaaaatagctaaatctataaaagggcccgtaacttcaaaaaactggcgccgctttttttctccgtcctttccttggttttcccctgccgtgtcttttcccctnttgggggggggggggcccnnntttcccctcctggcgctttgggctcccc

SEQ ID NO: 7014 - DNA, 579 bp, Chlorella sorokiniana
  unsure (1)..(579): unsure at all n locations; Clone ID: LIB3602-063-Q1-K6-A4
gcagcagcagcagcagcagcggggcaagggcgatgcgggaggggcggcagaggggcaggaagcaggtggggtcaaggtgctacgcacgtatggccagcggcgacccaaggcagatccggtgacagatgccgccgccccgacgctctcaaagggctgctgcagctgatcgcaggcaagaagggcagaggcggcggcggcggcagcggcggcgcggactgagggtcgtgcaagcacgatgtcactgtgtctgagcagtacaacgctcatactaatttctgtgtgcagcagtttgtgtaaggtcgccgctttaaaaaaaaaaaaaaaaaaaaaaaaaagcaaaaaaaanaaaaaaaaaaaataananaaaaannataaaatttttaatnaaatataaaaaaaaaaaaaaaaaaaaaagggggggcccgttttgggggttccaggtttacttccccttgcttgcgacgtattactttttttttggggtcccctaatttcaattaattggccgtttttttaaaactttgggtttggaaaaacctggctttacccccttttttcgtctttgcacattttcccctt

SEQ ID NO: 7015 - DNA, 643 bp, Chlorella sorokiniana
  Clone ID: LIB3602-063-Q1-K6-A6
ccgggttcgacccacgccgtccggtcttggtcgcacttacgtctccatcttgcttctggtcgtactcagccatgatgatcaacgagatgtcggccatcaagatcgactttgagctgcaaggctatgccgccgccagcaacgtgcgcggcacggtcttcctggaaaccatcggcatcaatccaagcgaactgacgctggacatcatcatttgtgacgtcttttgggccggactggtggtgcttgcctttgcgatgctctatctggtcatgccccgccctcgcagcctggcccgcgtgctgcccaccagcagcccgcccgccagcaagtgaagtagcacaatgcccctgccagtgatgcacagcgcctgacgcactctccctgactttagcactacctgcccttatcgagtgtttcacaatgccaccatctcaccatcaccgcattacctttgcatgcatcctcacattgactgttgccccatcagcgattgcatcctgccgattcgtcttgacttggcactcgccgcatcgcactctcttcctactgactgcgcctccagctgcaaggaccactttctcccatcttcctccctgctgcccgctgcatacgttgcaccacagctcatgtgcattttgttacacgt

SEQ ID NO: 7016 - DNA, 444 bp, Chlorella sorokiniana
  unsure (1)..(444): unsure at all n locations; Clone ID: LIB3602-063-Q1-K6-A7
cttggcggcagcaggccagccaacccagccctgcagggcgacatctgcctggcttgatgtcagctaagaggctcttttcttgcagctgcactcgcgcccctccgcatcttgttccttgacgcttttttcccctccccccggtgccaaattgtggctgcgcctctgcctcctatcctcttgattcctcggccgtgtcccccgacccgatctattctacgcagcacccccgtccgtaccctgcgagcgtgtgtatgtgtgcccccgcgctgcgtacctctgcctaaacccaccaccgtgcaacaagcatgctcgcnnaananaaaaaaaanntaaaaaaaaaaaaaaaaaaaaanaaaaaaaaaaaaanaaaaaannnaaaaaaaaaaaaaaaaaaaaaaaaaaaaaaaaaggccgccctttttgggggtcccaaccttccttccc

SEQ ID NO: 7017 - DNA, 439 bp, Chlorella sorokiniana
  unsure (1)..(439): unsure at all n locations; Clone ID: LIB3602-063-Q1-K6-A8
ggnaaactgagggcctggccatcctgcaggagtacctgaagagccggtaaacggccaggctgggaacaggcggctaaattcgggcggcttgaaggagccacctgagtgccgcctggccctgcctcgcggctgccagctccaggtgccgcccggcccggctgcgtcagcctggccctgctgggcgccagccgggcaccggcttgcacctggcactcggtcgtcgcctttgctgacagagctgcggcggcgcgaaatggagcgggcgtgcagctgaccctgcgcgcccacacctgcttgcaccgttgcccgcctgccggcgagccgcgcctcgtcacccctggctgtgttgtgttgttgcctgcctggcctccgccggggaggcacctgtaacaggcctgccngannaaaaaaaaaaaaaaaaaaaanaaaaanannnnna

SEQ ID NO: 7018 - DNA, 614 bp, Chlorella sorokiniana
  unsure (1)..(614): unsure at all n locations; Clone ID: LIB3602-063-Q1-K6-A9
cggncgcgtggggggacacagnacccggctacaaccccacatggccaagacggggcgcagctactacgacacggtagagaacaagaaggcttcgcccggcatctgggactaccacctgcagtctgagaaggctgagcgggaggcgagccacgacgtggcgcgcgccgccttcaagtccatgggcgcctccaccactccccaaggcgatgtgctggatgcctctgccctgcgcaagatgtttgcctcggaccgcgtggaccagctgatggccatggccgacaagaacaaggacggcaagatcgacttcaaggagttctgcgacctgatccgcaagtacccctgcgactgagcgatacataaggcagatgcacggaccaatccctgcaataaatgcaccgtttcacaccgggccacgggcgcggcgctgattgacgcgtccccaagtaaactcctctcccaagccagtggcgccacggcacagcaccacgtgcggctgaagctgctgctgccctcagccacttcctctgttttccccgtcctcagttttccagttcttctggctttcagactttcagatgattgtgctttcatcctgtccctacgccacagcctgc

SEQ ID NO: 7019 - DNA, 399 bp, Chlorella sorokiniana
  unsure (1)..(399): unsure at all n locations; Clone ID: LIB3602-063-Q1-K6-B1
agnacattttgggcgacgttatgcaccgtgactacatgcccccagggcgaggacaagttcgacaaggagatgctgcccaaaatcatgcaggtgcgcaactttgggcggcgtgggcgcacgaagtggacgcacctcctggcagaggacacaagtgcgcaggctgtggaagggttggccgaccgccctcctagccacctccggacacaggagttcagcaagccaaggaagctaaagacatgatggatcgagaaagtgtgtgcacatgttgaacgcatgccttgttgtttgttttgtgcttacaactacagcacggaggcggtgatgggctcatgtgacgcatagcgccaaaaaatatatataattttttttatatttggtgcttttttttttttttttttt

SEQ ID NO: 7020 - DNA, 139 bp, Chlorella sorokiniana
  Clone ID: LIB3602-063-Q1-K6-B10
tcgtaaaaaaaaaaaaaaaaaaaaaaaaaaaaaaaaaaaaaaaaaaaaaaaaaaaaaaaaaaaaaaaaaaaaaaaaaaaaaaaaaaaaaaaaaaaaaaaaaaaaaaaaaaaaaaaaaaggggcgggcctttttgggggt

SEQ ID NO: 7021 - DNA, 532 bp, Chlorella sorokiniana
  unsure (1)..(532): unsure at all n locations; Clone ID: LIB3602-063-Q1-K6-B11
gccaaanatgagataatgttgacccacccacaatgatgctgtacagttgccctttttgcaaaacgaaccttttccgccacgctgcctggcctggcctcgcgcgcggtacgatgcctgccgagggctcgccgcccattttgcatgactccctaggctgctggccagccacgcgcccccaagctgcacctgttttccctgtttcctgcccatctgtgtaccccttcagcccccctgccgacccgttttttcctgcccccatcctcacccaacccacaagccacgcggcccacaaacgcatttggttgcaccgccaccctctcagctgcccttcagagtaccatctgaaagctaagcataacgctaagccactgctcgctcctttcggatcgcccatttggttggttgtcggcccctcttccaatcggccccgcctcgacttgatcctcatcacgtccgcttttgtctgcactcctcaggggcgtgccaattgtgcgcgccgncgttgtatcctgccaactgtaacattaatgac

SEQ ID NO: 7022 - DNA, 560 bp, Chlorella sorokiniana
  Clone ID: LIB3602-063-Q1-K6-B12
gtggtgctggtgggcgacagctccccagcagcgcaggagcagctgggcaagctggcctctgccgcaaccgcctcgctgcagctggccaacgcggtgcatgagggcgcagaccaccctgtgcttgcgtcgctgcagcgcactggcgacgccctccgcgtgaaggtgctgggcgagtgcggcggcgcgtacctggcagggcagcccgccacgctgagcgctctgcgcgctgagctggatgcccccgcctcagcagggcgccccctggtccttgtcctgtgcctgccggcaggcatgggggctgaggagcaggtggaactggtggagggtgcacaggcggcgctggctgctgccgcaccctcccaccttctggtgcacgccgcccgcccgccggctggcgagggcgagcagcggcggcgcctgctggtagaggctggcgatgcagccgccctgggcgtggcggcacagagcgcggggctgcagaaagctgaccgctccaaccagacgggcaactacaccaactgcgacccgctgtgccagaagcatgtgatgtggctggaggg

SEQ ID NO: 7023 - DNA, 531 bp, Chlorella sorokiniana
  unsure (1)..(531): unsure at all n locations; Clone ID: LIB3602-063-Q1-K6-B2
ggnagggcactcccccctgnaccannncagcgcctgnatcttcgcnntggcaagcagctggaggacccggccgcaccctgnngcagactacaacatccagaagggagtcaacgctgcatcttgnnntgctgcgcctgcgcggtcggcatgcangatctttgntcaagacgctnngacgggcaagaccatcacgcntcgagggtggaatcgtcccgaccaccatcgagaacgtgaaggccaagatccaggacaaggagggcatcccccctgaccagcagcgcctgatcttcgcgggcaagcagctggaggacggccgcaccctggccgactacaacatccagaaggagtcaacgctgcacttggtgctgcgcctgcgcggcggcatgcagatctttgtcaagacgctgacgggcaagaccatcaccctcgaggtggagtcaagcgataccattgagaacgtgaaggccaagatccaggacaaggagggcatcccccctgaccagcagcgcctgatctttccgggcaagcagc

SEQ ID NO: 7024 - DNA, 600 bp, Chlorella sorokiniana
  unsure (1)..(600): unsure at all n locations; Clone ID: LIB3602-063-Q1-K6-B3
tcgccctctgcttctcccgcctgcattccagtatctggctgacccttgccctcgtgcattgctcatgttttgcttgcggatgctgcgtgtccctgttctgcttgcaaacggcgccaaccaagcaccagtatctgtcatttcctgtggcaatctaaagccgtcattaggcaaatcaactgttgcggcggctgccacctgtaaatgcccccgaaanaaagaaannnnattatttttacctccctcatctccaatgttcaaaattttcttccttctctcctcctttttcttttttttttttttttccttctctctctctttccttcttttttttttttttttttttcttttctctcttctcctctcttctttccctttttttcccgttttttccttcctttttctctttttcctcttttttttttttttctttttcccccccccttttttcccccccccctctccttttttttttttccattctnncacaacctttcttttttttctttttctttttttttttcttttctttttttttttttttcttttctttttttcctttttttttttttttttgtttctattttcttttttttttttttt

SEQ ID NO: 7025 - DNA, 470 bp, Chlorella sorokiniana
  Clone ID: LIB3602-063-Q1-K6-B4
cttcttcgtgcaggcctggtgaccggcaagtcccccctggaaaacctggctgaccaccttgctgagccgtctgtgaacagtaagccgggaaaatgttggctgtgaattgccggggtgatccagtaaaattggcgacgaagagacacttcgcatcaattagccgggttctctttgctcattgacaactcactgttccacctttgccctccccctgcgtattcttgccacagacggcttcgcgtccgccaccaaggtgagggttggggctttggagtgttggtaggaagtcgactgccagccagggtgcaacgacctcgcgaaaaggctcaagtactcactgctgtcattccacccctgcttcacccctgcagttcctgcccctggcctgaacgccgtcgtcaacctggagcgacctgggcatcccatattaacgggggccagccggttttggacaagcacacacaacatat

SEQ ID NO: 7026 - DNA, 549 bp, Chlorella sorokiniana
  Clone ID: LIB3602-063-Q1-K6-B5
caagagtcttcctctggcgccagccagtggtacggccccgaccgccccagttcctgggcccctacagcacgaacttcgtgcccagctacctgaccggcgagttccccggtgactacggctgggatacctctggcctgtcggccgaccccgccaccttcgctcgctaccgcgagatcgaggtcatccatgcccgctgggccatgctcggcgccctgggctgcgtcgtgcccgagctgctggacggcaccaaccacattgcctggttcaaggccggcgccgagatcttcggcgacgacggcatccagtacctgggcatccccggcctgatcaacgccaagtccatcgtggcgaccctgatcgtgcaggtggtgctcatgtcgtatgttgagggctaccgcgtcaacggcggcccggccggcaccggcctggacgctgtctaccccggcggcaacttcgaccccctgggcctggctgacgaccccgacaccctggctgagctgaaggtgaaggagatcaagaacggcccgcttgccatgctggccatgttcg

SEQ ID NO: 7027 - DNA, 318 bp, Chlorella sorokiniana
  unsure (1)..(318): unsure at all n locations; Clone ID: LIB3602-063-Q1-K6-B6
cccggttctaccccgcgttctttcgcagggcgacggcgtcaagtcgatcatcatccccggcattgtgggcataatcctgggcctggggctgggcatgctcatcttctacaccggccgcaccatcaagagcctcaagtggttcttcatcatctcctgctgcctgctgctcatcatttctgccggactggtgtcccatgggggggggttcttcacctcctccggtctatgtggcaccaccttcccctaccattacctccccttggttcatcaccctccttttttacacctnnnactgctgcggcatgtacaacatccaat

SEQ ID NO: 7028 - DNA, 236 bp, Chlorella sorokiniana
  Clone ID: LIB3602-063-Q1-K6-B7
taaaaaaaaaaaaaaaaaaaaaaaaaaaaaaaggaaagaaaaaaaaaaaagggtcgcaaccttatagaggatccacatcttaagtacatcgtgcttgctatagtcgtcaccttttttttaattgacatgctcaattcatttacatcggccgtgactgttacaacccctggcactggccaaaaccctggcgctttccgaggtaatacccccttgcagcacatggcccttttactcca

SEQ ID NO: 7029 - DNA, 443 bp, Chlorella sorokiniana
  unsure (1)..(443): unsure at all n locations; Clone ID: LIB3602-063-Q1-K6-B8
ttgctgggcttcttcgtgcaggccatcgtgaccggcaagggccccctggacaaccttctgcagcatttggaggagcccggggagttcaacttctacgccctgtacgccaactccctggcgtaagcagcttgtttggagcacctgcggcggccgaggcggcggcgctgagctggcgcaaagcgcggttggcgaccgccgccgcctcacgctgttgcccttgaccctcttccctttacgcgcttgcatgcgttcccgactccgctgcatgttgcctgtgtgtgcaattgtgcatcaggcaaaagaaacgagaagaaaactccacccaaacaccattttgcctgttgtaccatcctgtacgaaaaggaggctgtagtggtgtaaaaacatcnnnnccnnnnnnnnnnnnnnnnnnnnnnnnnnaaaaaaaaaaaaaaaaagggcgg

SEQ ID NO: 7030 - DNA, 352 bp, Chlorella sorokiniana
  unsure (1)..(352): unsure at all n locations; Clone ID: LIB3602-063-Q1-K6-B9
gcttgcacggcaaccgagctgccccagccagctgcagccaaattgcaaggctggctcagcgcatcagggcacaactgctgccgtgccgcccttcgctgctgtgcttgcagtacgttgccatgtaccatatcagttgactgcatcctgtgcagcagcagtcctgtacaggaaatcgctatgctttgtgggctcgtgctaatttgagccggcctggctaccagttgctacccacttgcctctgcttcctgctcatgttttgttgcccctctatgcttctgttagctgctcataatgtaagccttacagaacgcannnnnnnnnnnnnnnnnnnnnnnnnnnnnnntnnnnnana

SEQ ID NO: 7031 - DNA, 470 bp, Chlorella sorokiniana
  unsure (1)..(470): unsure at all n locations; Clone ID: LIB3602-063-Q1-K6-C1
cggcaccccctctctgccttggactccgatgatgcccccggcctccgcccgtcgtgcttcatgcatcagactttcagaccccctcagcgcctgtctcggtcccaatgccctttcgtgtcacatgtccgccatttttcccccttgcccggcagcggcacgctgcagttggtccgttcactttgccttggaaggccgccattcttttcacccgctgcggcgtcttttcttgtggtgtcgcgggatttgcaaccctttgcagtgaannnntnnnnnntnnnnnnnnnnnnnnnnnnnnnnnnnnnnnnnnnnnnttttnnnnnnnnnttttttttttttttttttttttttctttttttttaaaaaaaaggggcgcccctttttggggtccctgtttttcttccccggcctggcgcggggcgggccccttttttggggcccccttggtttcattccactgcgccgtgtttttc

SEQ ID NO: 7032 - DNA, 567 bp, Chlorella sorokiniana
  Clone ID: LIB3602-063-Q1-K6-C10
gtggcggcgcttgtggatgaaaagacttgtgcatgcatggtggcctctcaccggagctcaagtcgttggagcagatcaagcgcattccgcgcccaactgacgtgccagacaccggtctgctatgcgaccttctgtgggccgaccccgacaaggatgttcagggatggggtgagaacgaccgcggtgtcagctacacatttggccctgacagtgtgaccgaatttctgcaaaagcacgacctcgacctcatctgccgtgcacaccaggttgtggaggaagggtacgagttctttgcacgcaggcagctggtcacaatattcagtgcaccaaattactgtggggagttcgacaacgcaggcgccatgatgagcgtagatgacacattgatgtgctccttccagatactgaagccggcagagaagaagcagaagtatctgtatgccatgaaccctcggcctgcaactccgccacgaggatgatgggtggtcatgatcacagccatatgcttgcggcgaactcggaagttcaatcgcagtgaagatgctgctgcgcatgtaaccacgcttg

SEQ ID NO: 7033 - DNA, 103 bp, Chlorella sorokiniana
  Clone ID: LIB3602-063-Q1-K6-C11
taaaaaaaaaaaaaaaaaaaaaaaaaaaaaaaaaaaaaaaaaaaaaaaaaaaaaaaaaaaaaaaaaaaaaaaaaaaaaaaagggcgggccgttattggggttc

SEQ ID NO: 7034 - DNA, 601 bp, Chlorella sorokiniana
  Clone ID: LIB3602-063-Q1-K6-C12
tagacagcggctctgcaacctggcggagtccgtccagactttcggccgcaagaagatgcggtggctgtggcctatgtgaagcgcggcaagggcgagatccgcctcaacggcgccccgctggagctggtgcagcccgagacgctgcgctggaaggcgtttgagccggtgctgctgctgggcaagcagcgcttctccaacgtggacatccgcatccgcgtcaagggcggcggccaggtgtcccagatctacgccatccgccaggccatctccaagggcattgtggccttctaccagaagtacgtggatgagcagagcaagaacgagatcaaggacatcctgctgacctacgaccgcacgctgctggtggccgaccctcgccgctgcgagcccaagaagttcggtggccacggtgcccgcgcgcggtttcagaaatcttacaggtgaaggctgccccgtgggacggttgggcgcctctggaggcttcttctgcgccgctggcgtggcggcagcggcgtctgcggcctaagcagctgccctggagcagcatgccctcagcgaaagcaccatgagtacaccttgcgtgtgtaacaaaacgccacac

SEQ ID NO: 7035 - DNA, 591 bp, Chlorella sorokiniana
  unsure (1)..(591): unsure at all n locations; Clone ID: LIB3602-063-Q1-K6-C2
ggccgccctgttttttgtttttgttttttnttttttntttnntttttttttttttnttttttacaaaaggagctggttggcattggccctaatgtgtaaattaagtgattaatccacacgaataccgggngtaaagtacaggcccagcagggtacaagggtcaagcatacaaagtcagttcgggggggggggggcaccgggggggtcaacaggggccctccaatccagcgggtcgggctaaacaacttttcaggggctatattctctcagggggtgccgtcctccccccccttggggcgcagcagctcccacaggtgcgggtgctgcaccacccccccnccgccgccgttcttgggagagggccccgttttgttgcggtccccattctgccccagcggccgtttttgtggttccatgcttccgtccccgtgcttgcggcgtctttgctcttttttggggccccctaatttcatttccctggccgttctttttccaacttcttgtctgggtaaacccctggcggttccccatcttattcgcctttgcggccttcccctttttttcccgtttggggtttttgcggtgggggcc

SEQ ID NO: 7036 - DNA, 370 bp, Chlorella sorokiniana
  unsure (1)..(370): unsure at all n locations; Clone ID: LIB3602-063-Q1-K6-C3
aaaaaaaaatttaaaaaaaaaggggggggaggggggggggagagaaaaaaaaaaaaanaaaaaatgggggaattaaaataaaaaaattaaaaaactattttggggtggccgctcctngcggtcccccggcccttccgcaccgcctttttctcttctttttttcctttcttttttccttttccccccgccccgcccnncccggggggggggggggggggcccntccccctggggggggcccccttttntcccccttgctttttgggcctcccccctctctcccccctctctccctcttcgctttttcccccttttggtttcttccttnctcgcccttccccccctgggtgccctcttttgtttggcccttt

SEQ ID NO: 7037 - DNA, 433 bp, Chlorella sorokiniana
  unsure (1)..(433): unsure at all n locations; Clone ID: LIB3602-063-Q1-K6-C4
cggccgcgtgggctgcgtttcacgagcgggtggagaatgcgcggcacaggcgcggctgcgcagaggagtgttactacctcattgtgccgcgccacccggccgccccgcgggcgctcgtgtccacaggcaccatccagggcgatgacgccaaatcagcggtgcccgccgctgtggcgctgcccacgcggcggtggaccacggacggagccggcacggcgcagtgagcggtggagcagctgaacatgtgtgctgccccctcggcttgggttggcgtaggtggctgcgttgcagcggcggtaggcggcagcgaagcgacagcaaagtttgggcgccggcccgtgcagcactctttggtagcttagcgcgacttagtcttgttttggaggcctgacgcaaggcagaacctgtgatgcattccaagcnnnnnanaana

SEQ ID NO: 7038 - DNA, 201 bp, Chlorella sorokiniana
  unsure (1)..(201): unsure at all n locations; Clone ID: LIB3602-063-Q1-K6-C6
ccgggttcgacccacgccgtccgtagcaggcgtacatgcaatacgcaaacgactgaaagggctgccatccgcaacctgaaaaccacatgcggcgcgtattctttagacaactactggcacacgccgcgcccgcccttccccgggggtcgcgctgtccccgtgcggcgccgacctcaaagnacttctgcacagcctgtctgg

SEQ ID NO: 7039 - DNA, 502 bp, Chlorella sorokiniana
  Clone ID: LIB3602-063-Q1-K6-C7
ggcacaacacctgtcagctggagcgtgggtcgaatggcccacgaatattcgctgtcccacataatcatctggctgctgacgttcagggacaccggacgcgtaatacatgctgctacgccgtcgtgtggtggtccgtgttcctcaccgccaccggcaagggtgtgatgcacatactaccgcgccggcttattgttgtggaagctgtccaccccgatgatgcctgtacgggggctgatgctcatcggcggcctgggcaaatcgcgtttaataccgctgggcaatggacccttaatactactatttttatgttgacttaaccagtggggacctatcatgacactgcgcttctggcgcgacggccacctacacctgggctcctccgcccctgcactggcaaacaccggcatgcacgtcattccggtgatggccatcgcgctcaactgccttaaaacctactgtgtatctcagatggtccgcattgctgcaaatggcgcaaagccga

SEQ ID NO: 7040 - DNA, 538 bp, Chlorella sorokiniana
  unsure (1)..(538): unsure at all n locations; Clone ID: LIB3602-063-Q1-K6-C8
gcagtcggngcggccagcaaggcgccggcagcgttcagcaagtgctgacgcggcatcgccgcagcttgacatcacagcctgcgatccattcacccaacaggcgtatgaacggcggacggggcgcagcgcccacggctggtccttccagaacattgctgacggctgcttggcggcccgctccttcgacctgtgcgtgtgcagctttgcgctgcacctgtgcgactcctcgagccttttcatcacgctctaccagctggcctgccactgccgctggctggccattttggcgccacacaagcagccggcgatccgggaggagcacggctggtcggcggcagaggcttggaaggtggaccgagtgcacgtgcgcctgtacgcctccctcaactttggccagccgctggagtgaggcaggcagatgtcattgaaaaattgcatactatgcattttgagaggccgctggttcgagttgcttgcaatttgataggctctctcagatggcagcacacaaaatgccatcatgtgaaacgttcttggt

SEQ ID NO: 7041 - DNA, 299 bp, Chlorella sorokiniana
  unsure (1)..(299): unsure at all n locations; Clone ID: LIB3602-063-Q1-K6-C9
ttgcaaagcttgctttcatttcacgtgcatgccaaacactagtgttgcgcgccagctgcatggctgcccagtgacggcagccttgcagcccgccgcaagcccgcgtatgcgtttgcgacatgtgtgcccccctgccatgaccccactggaccctccctgcgttcatttcatcccaaggaccccctttgcatgcgcttctgtgtcccctttgcgctgcctgcctgtgccacaacgccggctcgcttgactgcgcatgtgccagttcacctctgccaggccccgttgtaaatgtgcanatg

SEQ ID NO: 7042 - DNA, 452 bp, Chlorella sorokiniana
  unsure (1)..(452): unsure at all n locations; Clone ID: LIB3602-063-Q1-K6-D10
tgcggcatcagcgatgactcccanagtacatcctgatgcgcctgctgggtggtgccaagaagcgcaagaagaagacctacaccaagccgaagaagcagaagcacaagcacaagaaggtgaagctgcgggtgctcaagttctacaaggtggacgacagcggcaaggtgcagcgcctgcgcaaggtgtgcccccagtgcggccccggcatcttcatggccacccacttcaaccgcgtgtactgcggcaagtgccacctgacgtacgtgtacgacaaggagggccagaccgcctaagcgccccgctcccccctgcggatgcacgcttagcagcagcacacgcggcgggtgcgcccggcatgccggcacaccagccacggagcgggggggcgttcctggcagcggcgcagcgcctgcaagcccttttgttgtgttctgtgccgctgtaatacccct

SEQ ID NO: 7043 - DNA, 212 bp, Chlorella sorokiniana
  Clone ID: LIB3602-063-Q1-K6-D11
cacttatgcataccatcccgcgtctgccttgcacccatgaaccgcttccatccggactacccttctcccaggaaacttcctgttgcgcttaccctgtctgcttttccacccaccaccgcctttttgtgcgagcaataaagtagtgtttgcagtagagagcccataactgagcgggcgaaatgtgaccgcgatcaatgtaagcgaagcaatct

SEQ ID NO: 7044 - DNA, 527 bp, Chlorella sorokiniana
  Clone ID: LIB3602-063-Q1-K6-D12
cggccgcgtgggttcgggagctggtggatgaggtggtttgggaggagcactgcacggggcacgcggctgatgccgacctggacatcaaggaggtgaagccgaagcagctgtgcctggtggccttcctgccccacatcctggactccaaggcggcgggccgcgaagcatacctgcagatccttcgagacctagcggtcaagtacaaggaccgccccttctcctacctgtgggccgagggcggcgcacagccaaagctggaggccaactttggtgtgggaggctacggctaccccgcgctcatcgccttcaacccggccaaggccaagtacgccaccagcaagtcggcgtttgaggacaagcacgtgaagcagttcctggagtcggtccgcttgggctttgagagcgtgtcggatgtgagcggcactctggccaagatcgaaaaccgcgcacccttggacggcggcgagggcactgtggatgcagcggacgagtttgacttggcggatttgatgggagatgatgacaag

SEQ ID NO: 7045 - DNA, 456 bp, Chlorella sorokiniana
  unsure (1)..(456): unsure at all n locations; Clone ID: LIB3602-063-Q1-K6-D2
tcgtngacaaccaccctgctgcaagccagccctctggcagactgcgccagcagcagcctagccgccttcgggtgttcagccgaacggtgggggtcgagcgccggcacgtgccggccgccttgcctctttgaaacttgaatccttgccgcgcagcatcacactgtttctacctgcttcctctctgcattttatgtgccgcaacactccgctggccttttcttttgatccttgatctttccgtgctgcgcccaccgaggcgcccgccgcccgtccccgcccgacccatcccgggccttccccgcccgctttgcggcctgcccagcgcggcccgcattgcatgtaacgctgttgcgtgcaaannntntntttttttttttttttttntttttttttttttttctttttttcttcttttctttccttctttttttaaaaaaaaaaaaaagggcgggccgt

SEQ ID NO: 7046 - DNA, 601 bp, Chlorella sorokiniana
  unsure (1)..(601): unsure at all n locations; Clone ID: LIB3602-063-Q1-K6-D3
ccgggttgtacccacgcgttcgcgccacagttgtggnaaccaggggctggngtagcatgcagnagcngtgcggcggcctgcacaaccggcctcagcgccgaggccaccgcctttgtgccgagcgtgcacagcagcagcagcatggacaagcacgctgctgtggccgctgctgcgcctgctgagcccgctgcggaggaccagccgcagggggagggagcggcctangaagggcggcggtgcggcctgagcgggggctaagcccctcggatcagagccgccgccctgcaatggcagcagcagcgcggcacgcctgctgcctgctgcacccatgagagtgatacatacaaattggatccatccccgctattgattcccgctctgtcttgagcttcaacattcccagtcttgcttgtttttccccctgcttttcccttttctggtcccccccgcttgggacctgctcggncctgctttgattttttaacgcttgggagttttttttttttttttttttttttgtttttttttttttttttttttttttttttatttttttttttttttttttttgttgcntntgtttttttttttttttattttt

SEQ ID NO: 7047 - DNA, 449 bp, Chlorella sorokiniana
  Clone ID: LIB3602-063-Q1-K6-D4
gtcgacccagcgtccggcacgcagggccccctggtggtctacggcaacgacgccggcatcagcaaggccttccgcaacctgcccggcgtggaggttgcctccgtggagcgcctgaacctgctgcagctggcgcccggcggccacctgggccgcttctgcatctggaccaagtctgctgtggagaagctggacaagatcttcggcaccaccgagaccgcgtccgagcagaagaagggctacaagctgccgcgccacatcatggccaacggcgacctggcccgcctcatcaactctgatgagatccagtcggtggtcaagccgcagaagaccggcaccgcccgcgccgcgctgaagaagaacccgctgcgcaacctgggcgcgctgctcaagctcaacccctacgccaaagtggcgcgccgcgccgagctgctggccgcgcataaaggcgc

SEQ ID NO: 7048 - DNA, 472 bp, Chlorella sorokiniana
  unsure (1)..(472): unsure at all n locations; Clone ID: LIB3602-063-Q1-K6-D5
gcgtntcgagcgctgggccgcattgtngaaggagagggcgtngagggcctgttcaccggcgccggccccaccgtcgtgcgcgcctgcgcgctcaacatgggcatgcttgcgtccaacgaccaggccaaggagatgctggaggacatgggctttgccaagggcggcaccgccgtggttgtgggcggcgccaccattgccggcttcttcgccgccgcctgctcgctgccctttgactatgtgaagacccagatgcagaagatgaagcccgaccccatcaccggcgagctgcccttcagcagctccatggactgtgtgttcaagacgctacgcaccaagggccccctggagttctacaccggcttccccacgtactgggtgcgcatctccccccacgccgggctcaccctgatgttcgtggggtggctgccgaagctgcaggccaaggggggcctttaagcaaccaccaacgcgc

SEQ ID NO: 7049 - DNA, 357 bp, Chlorella sorokiniana
  Clone ID: LIB3602-063-Q1-K6-D6
aaaaaaaaaaaaaaaaaaaaaggagggggggggggagggggaaaaaaaaaaaaaaaaaaaaaaaaaaaaaaaaaagggcgcccacttctacagggctctccgcttccttccgtctttcttgcgcgcgtccttcgcttttttttcagtgtcccctttttttatttcactcgcccctccgtttaacaccgggtttgcttggtgaaaccctgggggtaacccatcttatttcgccttctcctcctttcctctttccccggctggcgtctttgccgcttggccccccccgttcccccttcctcccccttggcccccctttttgccttttgggtcgcccccctgtacggccctttccccccg

SEQ ID NO: 7050 - DNA, 375 bp, Chlorella sorokiniana
  unsure (1)..(375): unsure at all n locations; Clone ID: LIB3602-063-Q1-K6-D7
gcgttcgcggccgcgtgggggcgctngacggtagtgctgcccttttaaggtgatgctgctgctgcagtgcccctgggctgaggcttggcttgcatgctgcgtgcagcaggagctgtggcctcctgccctcacgcccacttgacaattgtaggaaaagggtcagggcactctaggctgggctggaggggcacgcggctcagcttaggcttgatttaccgcaggcgggagggcacggcagcgcgagctggcgtgctgcaaacaacacttcccaacctgccttgcgtgctgctgcagcctgcctgtgcatactgccttgcgtgcccttgcttacatgttgctgcccacagggtgtaaatagctgctcagcnnnnnnna

SEQ ID NO: 7051 - DNA, 442 bp, Chlorella sorokiniana
  unsure (1)..(442): unsure at all n locations; Clone ID: LIB3602-063-Q1-K6-D8
cctcggtcaaggagtggcaaccatgnaaaaacgacgagggcgagattgtcgatctgtacatcccccgcaagtgctcgtggaccaacaagctgatcacggccaaggaccacggcagcgtgcagatcaacattggccacctggacgagagcggcgtgtacaccaactcgttctccaccttcgcgctctgcggccaggtccgcgtcaagggcgaggctgacagcgctctggaccatctgtgggccaagaagcgggctgagatcggccagtgaagcgctgctgagttctagccgccagccggctgggctacacagctgccagccggcggtgggccagccagccttgggtcggccagtgatgcgctgcgaagcaaagtgctgagcgggcgggcgctccggcgcgccgncgncagccacgcagtgcaagctgtaacgcgcctccttgc

SEQ ID NO: 7052 - DNA, 552 bp, Chlorella sorokiniana
  unsure (1)..(552): unsure at all n locations; Clone ID: LIB3602-063-Q1-K6-E1
ccggtcgacccagcgtccggtgaggccttcgaccccctgggcctggctgacgaccccgtcaccttcgctgagctgaaggttaaggagctgaagaacggccgcctggccatggtgtccatgctcggcttcggcgtgcagggcctgatcacccgcaagggccccattgagaacctggctgaccacctggcggcccccgacgccaccaacttctgggtggactacgcccccaagtccgccggcatcggctactaagctgtttccgtcgcttgactggcgccgcccgctcgcccgcccgctgagtttacggccactcgcggcaacaggcagcagcggcgtctgtactttctgactcctccggcgattgctggtggcgcaccttgcttgctttgatgcttgcttcgggggcctaggcaccctcccatgcaacacatgaacccccaccacccctgccaacccaagtcttagcctgtgtttgcgcgcggtgaaggcnntgagaagaacagacccttgtaccctgcctcgctgctgcgtttttgctgcgngacatgagcc

SEQ ID NO: 7053 - DNA, 500 bp, Chlorella sorokiniana
  unsure (1)..(500): unsure at all n locations; Clone ID: LIB3602-063-Q1-K6-E10
atgcgttccaggcggnttatggcacacacctgctgccgggagaggggcaggccatggcggcctatgtgcaggcgggcaagcgtatccctcgccgtggtgaggtgggcctggactcggagcagattgagaagtttgagaacatcggatacgtgatgagcggcagccggcactcgcgcatgaatgccgtgcgcatcaggaaggagaaccaggtgtacacggctgaggagaaggctgcgctggccatgttcaactttgaggagaacaagcgcaaggaggccaagatcctggaggagatgcggcgcctggtggaccgaacgctgggagggccggaggacgaggcgggccccccgccgccgcccgcctgagctgcagcagctgaacgtcgatgcattcgattggcgctgcccgagtcagccggcggcagcgcagctgtatttgttgaatgacctgcttgcctggcgtgtgcacgcaacctgtaatcatgtaactggctgcacgtt

SEQ ID NO: 7054 - DNA, 340 bp, Chlorella sorokiniana
  Clone ID: LIB3602-063-Q1-K6-E11
gtgctttactagcccctcgctcgctgccaagttttcccggctgcttttcccggctctgttgtacccgctgccttccgcttcaggctcccaagtaagcccgcttttccttgcctcccagccggccctctgcccctgcctgctggctgccttgccttgagtgccgccaacctgcggcctgcaccaatccctcccaatcctggtcacgtgtatcctccaatttcgttgcatgcaacccctgcctttgaacgcacctaccaatgatacgcctgccctcaacatctccgtttgatgagcgatgcactgccgagcgatcaatgccgactgtaagcaatttttcggc

SEQ ID NO: 7055 - DNA, 605 bp, Chlorella sorokiniana
  Clone ID: LIB3602-063-Q1-K6-E12
ggcaatccgctgccgcaaccctgagttcttttccctccccacaagccacctgccggcgtgccctcagtatcgccgtgcgccggcgcgactctggggaaaccggcggccgctaagcgcgtgccgcggccgcccttcccccgcgaaatcgttcaaagcccacccctctggcgcccgcccgcccggcccatgaatggcatacggcggccgggcggcgcccgcgcacttttgttggtttgcgtccctcattcccttcactcccctcagcgcaccccttccccctgcccctcagcataccctgcttggcaccgctgcccttcgtcgtcaccctcctcggcagtactcgctttgtcctgaaccccctccggccctgcatgcaccctcgtacgattgttcgcacccccttcccctctcaatcacaccacccccgtttggcccgcatctctggtaccctctgattggcccagtgtctgcactcgtcgtcttatcgcaccctcacccctgcccctgcctctcgctcacccatcacccctgttccacatccgtctttagccccccttgctccatcactgccacccttcatttgtgccctgccatcccaatcacgc

SEQ ID NO: 7056 - DNA, 226 bp, Chlorella sorokiniana
  unsure (1)..(226): unsure at all n locations; Clone ID: LIB3602-063-Q1-K6-E2
tnattaaaaaaaaaaaaaaaaaaaaggaggggacagaaaaaaggggaatcctaacaaacaaaacaacgggggagcaaaaacaaaaaacacatttacaacgcatctcaaggttttttttatttttttctctccttttttccccttcgncggcccgcgccccgcccccggcccnnnccccaacnnncccccccctnnncaggcccggggggggggggcgtttcttttt

SEQ ID NO: 7057 - DNA, 372 bp, Chlorella sorokiniana
  unsure (1)..(372): unsure at all n locations; Clone ID: LIB3602-063-Q1-K6-E3
tcgccccgncaccctggctgagctgtaggtgaaggaggacaagaacggccgcctcgccatgttctccatgttcggcttcttcgtgcagggcctggtgaccggcaagtcccccctggaaaacctggctgaccaccttgctgagccgtctgtgaacaacggcttcgcgtccgccaccaaggggcgggcgctggcctngacgccggcgtcaacctggagcgacctgggcatcccatattaacggcggccagccggttttgggcatgctcacacaacatatgatattcccaacctccctgcgcactgcttgtaacattcctggctccctcttgttcccttgacccgctctccggcgtggctctgtaacgttccgcg

SEQ ID NO: 7058 - DNA, 522 bp, Chlorella sorokiniana
  Clone ID: LIB3602-063-Q1-K6-E4
gccccacaggtgctgcccgtcaacagtgacgcggcgcatgcctacgtgccccgcctgctcatggcgctgcacatgcagggctggcattacagcgtggcgacccccgccgttcgcagcaccgtggaagcgctgctgcgcaagcagcgggtgcagacggagcggatcgtgtcggtgcagcaccccacaccagaggagctgcgcggcaatttgggtctgctggcccacaacctgcagctgctggcagcggtgggcatccgccccacagaccaggacctcaccatggtcctgcgctacctgcggcggcaccagagcgcgctctcgcggccacagatggagcggttgaaggaggccttcgatgcctggcagctgtccagcacggtgcgcaagctgcgcgtgctgcgccgctgagcgcgccgtgcatgctacgtcttttgacctgggcaactgccaaccgcccattgcccacacatgatagtgaattgttttgcatgtctactgagtgtgtgaccttttgtgcatgtt

SEQ ID NO: 7059 - DNA, 367 bp, Chlorella sorokiniana
  unsure (1)..(367): unsure at all n locations; Clone ID: LIB3602-063-Q1-K6-E5
gcacctccgcgatgaacctgagcgaggaggtggacctggaggactatgtggcccgccccgacaagatcaacaacgcggaaatcgcgtccatctgccaggaggcgggcatgctggcggtgcgcaagaaccgctacgtcatcctgcccaaggactttgagaaggcgtacaagaacgtggtccgcgagcagtcggacagctttgagttctacaagtgagagcgggcggctgtgcgccggcgcagggcaaaggaggaaaaaatcggcgtgcggcggtatcctccgcctgtgcacttgcacccctgcggcccttgcacccacctgccatgcatgcctgcaccgtttgtaagccaggagcacgannnnanaaa

SEQ ID NO: 7060 - DNA, 386 bp, Chlorella sorokiniana
  Clone ID: LIB3602-063-Q1-K6-E6
catcatcccgctgcagctgctgtcctaccacctcaccacgctgcgcggcttcaacgtggaccagccgcgcaacctggccaagagcgtcaccgtcaccgaggagtgatgcgggtcgccagcaactccagctagcaatatcccccggacaggcccgtgcgccattcagcttcagcccctgtctccaatgtagccaagctagcgtagccaataggcagtgtcagtgtcagctagtcacggttaggtgtcttttgaggcccgggccaccatttgcaggcagcggccactgtagtgcttgccgcggcgcaacgccgcatgtttgcttcgttatcgtgcctcattcaattcctcggagcgcaataagctcacctgtaaaataattttgataa

SEQ ID NO: 7061 - DNA, 542 bp, Chlorella sorokiniana
  Clone ID: LIB3602-063-Q1-K6-E7
gcatttccgtgcgccctgactgcgtgggccgcagggctccgcctacttccgccgccggccgcagtacaagatcgaggccacctttgaggtgggccagagccccaccatcaaggaggcgcaggccatcgccgacgacatcttcgccgactttgtgtccgaggaggtggacaaggtggagatgatctacaccaagtttgtgtccctcatctcctccacccccgtcgtccagacgctgctgccgctgtccccctccggcgagatctgcgacatcaacggcaactgcgtggatgccgccgaggacgaggttttcaagctcaccacccgcgagggccagctggtggtcgaggccgagaaggtgcgcaccgagaccggcgactttgacgccggcctgatctttgagcaggaccccgtccagattgtggacgcgctgctgccgctgtacatgaacgccaccctgctgcgctcgctgcaagaggcgctggcctcggagctggcggcgcgcatgaacgccatgaacaacgcctcggacaacgccggcgagc

SEQ ID NO: 7062 - DNA, 364 bp, Chlorella sorokiniana
  Clone ID: LIB3602-063-Q1-K6-E8
agcaaccaaaccaaccctatgtccccatcgtgtgaactgctgggcgaccacccaaaatcacccactgaccagcccgccaattttgcaacaactcttggcatattccccttccttcaccccgcacctcctttgctgccgacccaactttgacaccctgcccatgtcctgatctctctcttgcacagcacacacattttctgttacctgacgcctcgcaaaccaacggaacgactccacctgcctatgatgccactgattctccccctgaagcctgcagcccctttgcgttgacgtgcagacatgaccctgtttatgtaatcagtaatatgatgaaaaaaaaaaaaaaaaagaaaaaaaaaataaa

SEQ ID NO: 7063 - DNA, 449 bp, Chlorella sorokiniana
  unsure (1)..(449): unsure at all n locations; Clone ID: LIB3602-063-Q1-K6-E9
nagacaggacaccacccagnacctagcgacatatcgcagctgccggaggtcgcctgcgtgccgctgcagtacctgctgggcatctggggcgtggctgaggtggactttatgagcatcgatgtgggcggcgcagagctggaggtgctgcaagcggcggactttggccagctgcaagtcaaggtggtgctcgtgcagacggacggcagcagccccgagcgagaccgcgccgcagcggagctgctggctgctgccggcttcgagccggtgcgcaagttgaacgacccgccagccagcgagatggcgcgggtcagcagcgtgtttgtgcaccgcgatgcatggccgcacctggcgcacagcccgcaaatctccgaggtgttcctggagtagccctggtggccctgggtttgtactgcaatttaattcttgtctgatcttgtgatgctcatttg

SEQ ID NO: 7064 - DNA, 379 bp, Chlorella sorokiniana
  unsure (1)..(379): unsure at all n locations; Clone ID: LIB3602-063-Q1-K6-F1
tcgtagnaacatggccgagagcctgttcaagctgctgatgaagtaccggcccgaggacaaggcggccaagaaggagcggctgctgaaggaggcggaggcgcgcgaggctggccaggaggttgagaagaagaagcctgtggtggtcaagtacggcatcaaccacatcacgcagctggtggagagcggcaaggcgcagtgcgtggtgattgcgcacgacgtggaccccattgagattgtggtgtggctgcccgcgctgtgcaagaagatgggcgtgccctactgcatcgtcaagggcnnggcgcggctgggcaccgtggtgcccaagaagacggcctccgcgcttgcgctgtctgcggtgtttaacgtggaccagcgcgag

SEQ ID NO: 7065 - DNA, 434 bp, Chlorella sorokiniana
  unsure (1)..(434): unsure at all n locations; Clone ID: LIB3602-063-Q1-K6-F10
gaccganaactgggctggtggaagggtgtggacgctgtcgccgccgacaactccaccgtgcacatcgacaccctgctggacgcgctgaacaactacgtgaaggtgcctgagcgcaagaccgacgcggccctgcgcctgcccatctccggcatctacaagatcaagggtgtgggtgatgtgctggcgggccgcgtggagcagggcatcgtcaagcccggcgatgaggtcatcttcatgcccacccacaccgccgccaacaagtgcgagggcaaggtgttcaccgtggagatgcaccacaagcgcgtggacaaggccggccccggcgacaacgtgggcatgaacatcaagggcctggacaagggcaacatgccccgcaccggcgatgtcatgatcctcaagtcggacgccaccctgaagcaggtgaaggactttac

SEQ ID NO: 7066 - DNA, 586 bp, Chlorella sorokiniana
  unsure (1)..(586): unsure at all n locations; Clone ID: LIB3602-063-Q1-K6-F12
caaggctggcaccaaggccggcaccaaggagggcacccagnaacaggccaccaccaagaaggctgcccccaagaagtcttcctctggcgccagccagtggtacggccccgaccgccccaagttcctgggcccctacagcacgaacttcgtgcccagctacctgaccggcgagttccccggtgactacggctgggatacctctggcctgtcggccgaccccgccaccttcgctcgctaccgcgagatcgaggtcatccatgcccgctgggccatgctcggcgccctgggctgcgtcgtgcccgagctgctggacggcaccaaccacattgcctggttcaaggccggcgccgngatcttcggcgacgacggcatccagtacctgggcatccccggcctgatcaacgccaagtccatcgtggcgaccctgatcgtgcaggtggtgctcatgtcgtatgttgagggctaccgcgtcaacggcggcccggccggcccccggcctggacgctgtctacccccgggggcaactttctaccccctgggccttgctgacaaccccgacaccttgtctgtcctgaaggtgaaggga

SEQ ID NO: 7067 - DNA, 271 bp, Chlorella sorokiniana
  unsure (1)..(271): unsure at all n locations; Clone ID: LIB3602-063-Q1-K6-F2
catgactctactgcttgttcagnatactgttaagctgtgccgttaaaaaaaaaaaaaaaaaaaaaaaaaaaaaaaaaaaaaaaaaaacttttatagagatataggtgattatttttttatagcttccaancccccctcccccccccccggtgtccccctnnnnncnnnncnngggcccccctcttggggggggggggctcggcggcttccctcgttttcccccgctttcccctgggggggccgctcttcggtggccgggcgcttcttcccc

SEQ ID NO: 7068 - DNA, 292 bp, Chlorella sorokiniana
  unsure (1)..(292): unsure at all n locations; Clone ID: LIB3602-063-Q1-K6-F3
cccacgcgttttcggtcggcagcagcagcagtggcagcggcagcgagcgggggcggncttgttcaagagcagcagcggcagcagcaggatacgggtgttcctggctgacgagcgaggcagcacgatgcaggcgcggcaggagctggcggccagcggccggcgcttggcggtggtcatcatggtcaaggacagcgtgggtgctgtcgtcattctcaaggcgnncnnngaggatcccggagctgcgctgctggtgaagactgtcataacgcgcatgctgcctttcttcatgcct

SEQ ID NO: 7069 - DNA, 300 bp, Chlorella sorokiniana
  Clone ID: LIB3602-063-Q1-K6-F4
ggcagcccgccgctccgtggtggtgcgcgccgaggaggccgctgcgccagctgccgcccccaagaagccggacgtcggccccaagcgcggcactcaggtgcgcattctgcggcctgagtcctactggttccgcgagaccggcaaggtggtgtctgtggaccagagcggcatccgctaccccgtggtggtgcgcttcgagaaggtcaactacgccggcgtgagcaccaacaactacgcgctggacgaggttgaggaggtgaaggcgtgagcagcccctggaggcagccgcagcagctgggg

SEQ ID NO: 7070 - DNA, 579 bp, Chlorella sorokiniana
  unsure (1)..(579): unsure at all n locations; Clone ID: LIB3602-063-Q1-K6-F5
acgcggcggccgctcgcgatctagnaactagtggctggcagcaaggaagtcaaaccttcccatcaaaccacctcccactcgctctgcccaggtggtcggacgattacccggagacctgggagcctgaggagcacgtgtcgcctgatctcattcggcagtgggaggagcagcagcaggtgggatgcctggttgaaaccacgggcgggcctgtatgttgcatagggtcgagtgctgcttgcaaaccggcaagggccaccccaactggccttatcgatgcatgctgcgcaaactgcacagtctgggcgatttgccgtagtgtgtaccaacgcactacgggctcatgggcacccacgtccacgcctgactgcaccgctgttatccaaccacccctcttgccgtctgcctttcccgctgcagggctcgtctgatgcctccagcaacggcacacaggcgggcagcaatggcagccagggcagcgcggcagcgggcacagcagcagcgccagcgcccaacatgcagctgcagggcagcgccgcataagcgtatgccacagctggtggtcttatactgggggtttct

SEQ ID NO: 7071 - DNA, 303 bp, Chlorella sorokiniana
  unsure (1)..(303): unsure at all n locations; Clone ID: LIB3602-063-Q1-K6-F6
cccaccccccctttttcccccccctttgggggggggggctttttttgggggcccttttaaaggaacaaactttttccttcccggttcccttttttttgtcttttttttttttnngcncngggcaccaacggtggggggggccgggaaaaaccnaaggggggccctcttttctccccccttcngnncctttttttaaaaactccccccnaaccccctgtcttatattncaaaccttaagtcggggcgggttgcctctttttctttgcgcgttttttttttttttttttcccccccccccccccc

SEQ ID NO: 7072 - DNA, 405 bp, Chlorella sorokiniana
  unsure (1)..(405): unsure at all n locations; Clone ID: LIB3602-063-Q1-K6-F7
ccctcccacatggnagcccaccctgctgaagcagtgaaggctcagctggacgtgccctggctgagctgcagcacgctggttcacccatggatgccatgcaccctgcttgcctgccaggcgcctgccccctgctgcctctgccacaccacttactcggcggcagcttgagatgaatatgctgtccgaggcaagctgccactctggctcgccgcagcagccgcttggtcccccacacagtacctacctacccattgattcccccattctttttggcggctctcgctgctcctccttcccttgccctgccccccgcatttactcctctctctccctcggtgcgcctgcgtgtttttgtgtgactacgtttcatccagaccgttcaacgcatctgcaaggagggaacaa

SEQ ID NO: 7073 - DNA, 591 bp, Chlorella sorokiniana
  unsure (1)..(591): unsure at all n locations; Clone ID: LIB3602-063-Q1-K6-F8
ggagcagctggcctggggctccacgcggcgcgctcggcggtgactgtgcgcgacgtggaccccacggccccgctgggcgtgcggcgcggcatccagacgcagatcgaggtgcgggagcacgagacgggctcccactccgtgctgctggtgaacaccgtggaccggccaggcctgctcacagacattgtgcgcgtgctgaaggacatcaacctgaacgtggtcagcgcggaggtggacacgattggccgcaacgcctttgaccgcttcaacgtcacctaccacggcgagccgctggaggagcccatggcgcagctggcggtgaacgcgctgcagtactatctcagccagggcgaggtggagaaggagtggagcgagtcgtactgagcggccctgcctgctcggccggggtggctcacaagggactcttaccagcatgcggcgccgccgccgccgtgcttttgcagttcactccctggctttgccgcacccggctctggcccccgacccgccctcaccccgtntaacacccccgccgcaatccatagtttgagcgagtcagctgcgcgttcacatcccaaatttcagtgcccg

SEQ ID NO: 7074 - DNA, 278 bp, Chlorella sorokiniana
  unsure (1)..(278): unsure at all n locations; Clone ID: LIB3602-063-Q1-K6-F9
ccggttcgaccccgcgttcggtcggcggcgcataataataagagcgggctctggccaggacgccggcctccgcgtgtaagcgggcagcacccacctgccgctcaccgcgcgccgggccgggacagcccggccagcagggtcggcgtgccgcgcgtgggcgcgggcgccggccgggtgttgacagccgattgcgccgggcggcggccgcngctgggccagcgccgccncccncnattctcctactgctcttgcgccggctgtggcacccatactcncaa

SEQ ID NO: 7075 - DNA, 641 bp, Chlorella sorokiniana
  Clone ID: LIB3602-063-Q1-K6-G1
gcgttcttccagcgtccgcccacgcgttccgataaaaaaaaaaaaaaaaaaaaaaaaaaaaaaaaaaaaaaaaaaaaaaaaaaaaaaaaaaaaaaaaaaaaaaaaaaaaaaaaaaaaaaaaaaaaaaaaaaaaaaaaaaaaaaatataaaaatatttttttatttaaaaaaaaaaaaggggggggctttttttttgggggggggttttgcgccccctttttttgttttttttttttttttttttttggggcctttttttttttttttgggggggttttttcttctctttttttttgtgttaaaccttggggttctcctttttttttttttttgccctttctctttttttttttgttgtgttttttgttgttgtgcccccccgggttgttttttttttttttttttttttttttttttttttttggccctcttttttggggggtttttgggggggtttgtttttttgttttttggttggtggctgttctttttttttggttctttttttctttttttcttttttttttttttttttttttctttctcctctccttttttttctggttttttttctttttggtttttttttttgggggggttttttttttttttggggctcctttttttgtttttttgggtgg

SEQ ID NO: 7076 - DNA, 615 bp, Chlorella sorokiniana
  unsure (1)..(615): unsure at all n locations; Clone ID: LIB3602-063-Q1-K6-G10
ttcaagctgggcaccaagttgccagtgcnagagccacccacgacggcgtgaacctcacactgcagcccgcgaagggcaatggctccacggagatgatgtctgctgatgttgtgctggtctcgacaggccggcggccctacacacaaggcctgaacctggaaggcgtgggcgttgccaccgacaagcgtggctgcatcgttgttgacaagcacttccagacttcggtgccgggcatccatgccattggcgacgtcatccctggtcccatgctggcccacaaagcagaggaggatggtgtggcttgcgtggagctgctggcaggccgcagcggccatgtgaactatgacactgtgccgtccattgtttacacttggccggaggtggccagtgttggaaaaacagaggagcaggtcaaggctgacggcctagcatacaagtgtggacgatacggaaggcatggtcaagttcattgctgatgccaagaccgacaaaatcctgggcgtgcacattatggggcccaatgcangcgagctgatcggcgagtgtgtgctggccatggagtatggcgcctccgccgaggacatcgctcggacttgccatggacacccaaccctg

SEQ ID NO: 7077 - DNA, 513 bp, Chlorella sorokiniana
  unsure (1)..(513): unsure at all n locations; Clone ID: LIB3602-063-Q1-K6-G11
gtggngtcctttatgacactcgctccggnaaagcagccgcagaggatgacagcgtggcggcagccctgctggccggcccttggacggcagccacggctggtgcggctggtgcggccagcagtgcagcaacgcccctgcgcgggcagggagaggcatcgccgcctgtgcacgcccagcagcagcagcagcagcagcagcctcagcagcaatctccacagcagcgggtgtggataggattcctgggcgggccgccggcaccagagccgacgggagcagacggctgggatgcccagcagccgcggcggcagcagcagtcgccgtggcagcagccgcagcagcatggaggggcacaacagccaggccagagccccagcaagtttgtgcggctggcgggtggcgcctcgccgggaccgcggaaagtgctggtcagctgagctggcctgcttgcttgctgctgcgacgtgtaacaaaagctgcgcntnnnacaaaaaattnaatgnnnaacaaatttaa

SEQ ID NO: 7078 - DNA, 491 bp, Chlorella sorokiniana
  unsure (1)..(491): unsure at all n locations; Clone ID: LIB3602-063-Q1-K6-G12
ccgggttcgacccacgccgttcgcccaaactgggcgcaccaactggggcgtcaggtgtgggtccagctggccccacggaagcccagcggtccttgctcctgacgccccatacttctctgtatcatactgtcccttaccctttggtattatcgatctcctggccttgcctgactcgttagctgttccacgcccttttgaaaaaactgtctgaaccatctgtgactccctgccacgctgctgctctttgcccccatgcccttgatgccaatgcgattcgacctctcctctgcctctcttctgcctgctttggtccaccctgtctgcctgcttttctaatcgcgcccacaatgaatgacctgcccacatacctgcctgcctgagcgatttttttgtcagctgtccttcctgttttccttctacaagcatgctgtctgtaccaacaccggcaatgccttaaccagtggtaaactctgaatgtttctntgaatgtt

SEQ ID NO: 7079 - DNA, 543 bp, Chlorella sorokiniana
  unsure (1)..(543): unsure at all n locations; Clone ID: LIB3602-063-Q1-K6-G2
acccacgcgttcggaggctctcagcacacgggcctggtcggcgtgccgcgggcaccgcgcttgctgcaccatgctgtgctagcaccgccagctggtgcccgaaagggccgcgtccgtgccggcagcttgaactacgggtctgtggcgcgcggctagccagccggtacggagcgcaccgcgcgnacacgcctgcttgaatgcgcgctgcgcacgctcagtagcgtgcgaggctgccgactttgggtaagggctcttctccagtctccggctgtcggcgtgagcgcatgcatttggattgtcgactcgttgtatgacgccgcttacactgctgggcgccagacctggctcagcctcatcactgctgcccgtgcgaggctntttggcctcatattccagttcgccaatgtggttgccaacacactgctgctgcagcgtgcntccttgcttgcggtcgctgtctcttaagcctgccctttcctttctggagctgccgctctgcctggtccacgctttccttctcctgcttgcctccttctctctctt

SEQ ID NO: 7080 - DNA, 548 bp, Chlorella sorokiniana
  unsure (1)..(548): unsure at all n locations; Clone ID: LIB3602-063-Q1-K6-G3
ttttgcctcggnccccctgctcgcccagctggcgaccactcttgagaaggatgagtggtgcagcgcatggtagctttgattggaaagtatcaagggcatcgtgctgtttgtgattgatggagagaagtggacgctggatctacgcgagggcaagggcagcctgaccaaggggcgcctgcttacggcggtggggccgatnttnctctcacaatcagtggcgacacctttgtgatgatggtcttggggaagctgggcccgctgcttgctttcttgatgcgcaagctcaaaatcagctgctgcttgggcctggccatgantctgctncccatcctgnatgcntcttctcctcatgccattctgtgttggctctccgctcactgtggagcgactcatggcctgacctgtgcccttttttctcttgtttagtggtttcttggcgtgcttcccctgtcctttgttcccacctncttctttttttttctgtntctctttcttttttttttttttttctttttttttttttggccttttctgtctttcctttttgt

SEQ ID NO: 7081 - DNA, 485 bp, Chlorella sorokiniana
  unsure (1)..(485): unsure at all n locations; Clone ID: LIB3602-063-Q1-K6-G4
ctgggctggcagcggctgacgccctgcctcacgtccccgggagcctgatgtggcaccccggccgccgcccctgaggggctgcttgtacccccaccccccaacttgctcacttgtgcttgtgctttcgaccctctctatacataccgtagagcagctgtcccgctccccaacccaatgatgtaagctgaacgctctnganaaaattaataatnncacttnttaatanccatactctcctatttcctccccataaaaattnntnaacnnnnnaaacnannaaaaaaaaagggcngccgttttttgggttccaaccttccctccccctccttgcgccgtgttttttttttttttgtttccctttttttcttttcttttccctttttttttcaccctttttctttgggaaaccctttcctttcccccctctttttttgctttggcttctttccccttttctccctttttngtttttttntanttgcccc

SEQ ID NO: 7082 - DNA, 571 bp, Chlorella sorokiniana
  unsure (1)..(571): unsure at all n locations; Clone ID: LIB3602-063-Q1-K6-G5
tcgaaaaaaaaaaaaaaaacataatacttgaataaacacggacacaaaaaagaaaaaaatgaaaaaaaaaataaaaaattgcccctgaacaatactaaaaactaataaaaaatggccgtgacgtttctcaaggctccaatgttgtgtacagtgcgtgttctttcctttcgttgccctttttttttcccctgggggggggtggaatggcccgtgcgtttcccaactttgttttttggtgaaaccccggcctgttctccccttttttgccttgggtggaattcccctttttccctctccttgttgttcccncttgccccccccctggcggcctgttttcccccttgttcggcttttttgtgttcggggcctccccttttctcgctcctttttcccccttggtttggtggttcccttccgcccttcctttcccttttttttcctttcttttccccccttttttcgttttttttcctgcctttttttccccctttccttcgtttttccctgtccgggttttttttttccgcctcccctttcgtgggcccttttctttttttttttccgtcccttt

SEQ ID NO: 7083 - DNA, 509 bp, Chlorella sorokiniana
  Clone ID: LIB3602-063-Q1-K6-G7
tgacggcccagcagggccacagcgcggcagcgtgccgccacccggtgccgagccgcacggctgggaggcggcgcaggaggcgagccgcgacgccgggcgcaagattgcccgcgcgtttgccgcgtccgctgaggagctggacattcctcccggggaggtgcccaaaccttacaccgtgcctccggggtacaaggcgcccacgctgggggagcagttccgttacgcggctaccaagcacccgtacgcgcgctttggatatgcgggcgccgtgctgcttggcctgctgggctgggcaattgcaactgaggagaagaagcacccacatgagcccctgggcgcacacaagcggcagcagcagcacgagggtggcggcatcggcagcaagtaggggcggcagcctcagttctgctagcctcagttctgctcaaagcccgactgctctttccttgtttatttgatgtgatgcagacgctaacatggcgctgcacatgtgttacagtttgcaatgt

SEQ ID NO: 7084 - DNA, 321 bp, Chlorella sorokiniana
  unsure (1)..(321): unsure at all n locations; Clone ID: LIB3602-063-Q1-K6-G8
cccacgcctccctcggtgcccggctgcgacgccaggtagccaataaggcatatgattcaacaaatgaagtctggcttggcgggccaccccggagcgtgccgccgatccaacatctgctgataccttcaccccatactgtctgtcctgctttctgtgttcctcttgacgcttatcttgggggctagcgcttggtgttgtcccctgcctgttttcgttgcacatactttgttgctaatgcccttgatgccttcccagtatgcctctcaagaacccacttcgtgctttacttgtaccaggatgtgcacgtagtcgggcnnnnna

SEQ ID NO: 7085 - DNA, 228 bp, Chlorella sorokiniana
  unsure (1)..(228): unsure at all n locations; Clone ID: LIB3602-063-Q1-K6-H1
gcggcgagtgggtgcaggcttgcaagctgttgctggcgggtgcagctggcggcgacggcgcagctgggcgtttccttggcggcttgctgtgggcttttcctgttcttgactgctggcgtcagccgctgagttggcacttgcacaggtggcggctggcgcctcttgaccttgcatatgatttgttgtttctcgggatgccatgcgttggtgtaaagcgctcagnccana

SEQ ID NO: 7086 - DNA, 238 bp, Chlorella sorokiniana
  unsure (1)..(238): unsure at all n locations; Clone ID: LIB3602-063-Q1-K6-H10
ggnaacaggccccgggctggcggcagtgctggcggcggcggcggcggatgcagccaggctgcaggcggcggcaggcggcgcagctgggacctgaaggttggtgcactgaatgccgatctttgagccttttgtctgtgcccttttgattactttccaacaccagcctgtgcttcacatgtcaaatgccaacanntcanannaaaaaaaaaaaaaaaaaaaaaaaaaaaaaggggcggnc

SEQ ID NO: 7087 - DNA, 563 bp, Chlorella sorokiniana
  Clone ID: LIB3602-063-Q1-K6-H11
caacatcgagtgcccggccaacaacggcttcaaggtcaagtacgagaccaagggcacgatcacctctgaggagtctgacaagctggaggacccgaaccacgctttgtctgcgtcttcgacagcaccttcgtctaggcgaacagccccccccatctgcccccggggcaacaaccggcaaccgcaaccctccctcgccaaaccgcatgccccgcaagccacggccgcgccctgctgcgccagcctttgcacacaacccctagccgtcagttcatgcaaccccaaccatcagccgtcgcaccgtgatacccccgttgcaccaatcctccccgccagagagcgcgctgctctcacgcccacatttcaagctaacacttgaccctgcactttttgccgcccataatcccctccgtcaatgaaacgaatgttatactgcccttctgcacccttcattttgcgcactggcacagttttgccctgatgctctcaattcgcgagcgcttcgatccgtctgtcctttgtttcgtgtgagtggtcctttttttcccgctcctcctaccatgtgt

SEQ ID NO: 7088 - DNA, 328 bp, Chlorella sorokiniana
  Clone ID: LIB3602-063-Q1-K6-H12
tcgcttccacccgccacctttcctgccgctcaccgccgcacatcctacctcccacacctcactccatgtccacccttcacccgcgcttcacacagcggctgctgccatgcaaagctgctgccaaacccatccatcatgctcgcacacccactcacccacacgtccaacgtatccagacccattttcaaggcccgactgtacagtgcctttttgcgtccttatgccgatctggtaccaggacttaatgtgtaacaaatggtatgttaactaataaatacaactttaatacaccctaacttccttcttttctaattaatcccataaacct

SEQ ID NO: 7089 - DNA, 512 bp, Chlorella sorokiniana
  unsure (1)..(512): unsure at all n locations; Clone ID: LIB3602-063-Q1-K6-H2
ctgcaatggctcgcgcctctccgcccntacggcgcgcctgacaaccggtgcacgttncccgtgncaaaccagctgtattggcattttggatgcctcataatgcaaccatgtggnaagnntgcttggttacgggacacccaaagtatgccaaagggccnngttgatcagcgaacaaggggaatgaggagaaagcagctgcgagcggcatgnnccaccgatgcccgttgcattggtgccgtggatgcnggcncactgcttattgagaaccacgccgacttccattgtgtatggtgcacgactgtccgaataagaccccattccttcacacgggctgcccaaacttcatgccnttccacttaccttttcatgtacctcgtcaagtcaaccttgctcacgattttcatttagagggctgtggcncgcctcgcctgccctgccctctttggcttccctcacactggtccacccctttgccggcctcttcttttcttgggttttggtggtttcaatcg

SEQ ID NO: 7090 - DNA, 584 bp, Chlorella sorokiniana
  unsure (1)..(584): unsure at all n locations; Clone ID: LIB3602-063-Q1-K6-H3
ccggtcaccatggtgcagcgcctcacctaccgccggcgtcacagctacgccaccaagtccaacaagcagcggatcctgcggacccctggcggcaagctggtgttccagctggcctagatgaagacctcccaccccacctgccccatctccggccagcggctcaatgggctgcccgcggggcgccccaacagcctgcaccgcgtgaacaagagcaagaagacggtgcaccgcgcgttcggcggccacctggcggcgggcgtggtcaaggagcgcatcgtgcgcgccttcctggtggnggagcatattatcgttaagaatgtgctgtagctgcntgctgccattgaggctgcgcaggtccttgccgcggcggccggcagctttggcttgaataagtccatgaattgatcggttcncgctagcggaccgttgcgccccatgctcccgcttttttgcacccttcttggtnnntnttttttttttttttttttttttttttgttttttttttttttttttttttttttttgttttttttttttttttttttttttttttttttttttttttttttttttttttgatttg

SEQ ID NO: 7091 - DNA, 531 bp, Chlorella sorokiniana
  Clone ID: LIB3602-063-Q1-K6-H4
cccggtcgacccagcgtccgcggccgcgtgggttcgcactgaccggcggctaggagacaaacaccgttctgcggagacccggcgccgctcggtcgcattgtggtggatttgtatggcaaggcggcgcctggcagcgtggcaacgctggtggcagcggcacaggcgggcgcgtacgccagcacgagcatcaccaaggtgctgcccggccgcttcctgctgctgggcacgcaaggccccaagcgcagcggcctggtgcaggcgccccccggcctgccagaaagcaatccagacctgctgagctcagccgccttccgcctgccacaccggcggccgggcactgtgtcgctcaatctgtcggaaaatgaggacgatgatttctttcgcttcgacccaaagtaccgcaacctgtcgctgctgatcaccaccgggccaggccccgtgccctcgctggatggagagaacatcgtgattgggcaggtgtcaaaagggcttgaggtggtgacagccatcacgcaagtgcccacctttacg

SEQ ID NO: 7092 - DNA, 363 bp, Chlorella sorokiniana
  unsure (1)..(363): unsure at all n locations; Clone ID: LIB3602-063-Q1-K6-H5
gccgcaccggctcccgcggccaggtgacgcaagtgcgcgtcaagttcctggatgatcagaaccgcctgatcatgcgcaacgtcaagggccccgtgcgcgagggtgacatcctgaccctgctggagtctgagcgcgaggcccgccgcctgcgctaagcggcagtgccgcccagccgcgtcgcacgggagagcggcgtgcgccagcatggcagccgcggcagcgagttagccacgtgttgcagctggtggcccgccctgtgggcgtctgcagcagcagcccgggtggcaggtgtcccgtctggggcgaccagcccccgacccattgggatgtaacacatctgaccgcnnnnnanaaaannanana

SEQ ID NO: 7093 - DNA, 600 bp, Chlorella sorokiniana
  Clone ID: LIB3602-063-Q1-K6-H6
gtcgacccagcgttcgcggccggcggcagcgcacccacagcctggtagaccaccaagtacaccaccagcatccccacgcacgtgcgcgaccctgcggcgcgcgtggtgcccacccgcagcggcgagacggtcagtgcacagctctacatgcggcagctggacatgcacattggcaacgctaggatgcgctctgctggcgcgagcgtggagcacatccagcgccgcctggcggacaactgcggcagcaccagctctgtggacgagttccgctcctccaagctgtgccccctgtgccatgcggtgatggtgcagccgctcatgcggatcaccgacaagcagcggcgcgacctggagcggcagcacggcaagaaggtgggcaagcacgcgcgcgtgaagatgtaccaggtgtggcgctgccccaaccccacctgccgcacctggtggcagcgcgacgtggccgccgccatcaacatcagctacctgggctgggtgcagcagctggagcagttttatgacaacggcgtggacctgcggggcaagttctcgcgctcctacaagcctcgggaggcgcggcagcagaacggggcgcctgctggcgac

SEQ ID NO: 7094 - DNA, 617 bp, Chlorella sorokiniana
  unsure (1)..(617): unsure at all n locations; Clone ID: LIB3602-063-Q1-K6-H7
cttngaatctgcttgcttgctcccctgtgcttatctagttctttcgcccttccgcagcagaccgagcagcatgctgagctgccctgcgtacacttttttttgcctcgcctcacctgccaagctgagcaactccaagctgctctccctactgcttgccgccgccaatgcatgcgctgtgcattgcgcctctactcgtgttcgggttgcaatcaactctcctccccgcccaacaaatgacatgctcccttgattttgaacccgcactcgcccctgaaccgccctagttgcgcactgctttggcctctgggcccatcagtttcaaggcttacataccatccacacaccctccctcttcataccagctggcgcactgcccgcgccagcaagcggctgtccgatcccctgtgtagctcctttaatagagcgccccgacattttttaattcccttgtgctcccgcgcaagccacattacccaccgcaagccgcttttctttcgcacactgctattcttgttttggctgggagaacttaatggggagtngtttttttttttttttttttttaattttttttgttttnnngtttttttttgtggatttttttgtttttttggttg

SEQ ID NO: 7095 - DNA, 317 bp, Chlorella sorokiniana
  unsure (1)..(317): unsure at all n locations; Clone ID: LIB3602-063-Q1-K6-H9
aaaaaaaaaaaaaaaaaaaaaaaaaaaaaaaataaaaaaaaaaagagtccccttttttcnttttccccggtttccttcccccttccttctctccttcctccctcttttttttttttttttggcttcccttttttgcccccttgtgggggggggggccttcgttgtcttttccttcccctttcgtttttttttctcctttcttttttccccctttttcccgtgggcccccctcccattcccccccttccccccccccctccccccccccctttcccccacagggcccttttggccctcccccctttcccgggggcttt

SEQ ID NO: 7096 - DNA, 601 bp, Chlorella sorokiniana
  Clone ID: LIB3602-064-Q1-K6-A10
ggtaccctggccagcctgcacaagcgcaacgcctgaaccaacttcaaggctgcgctcgacaacgtcagcaacaaggtcggcggcgtggcgggagcgcagggcggcgcataggccacccgcctcgatcccttcagccgccgcgccacccggcccatcatttactggagcactggccgcaagcaggctgaggaggctgaagcagcagcagcgcatcagggggcggcggccaacggcgacgccaacggcgcagcggcaggcgcagcggatggcgatgaggatctctctccagaggagcagaagcggcgggcgcggcggggcggcctggatctggatgcgattgtggacctgagccagctggacctgtccatactgcagcggcccgcgcgcatgccgccgctggcgaggaagctgctgggtcccacgtggcggccagcgcagccgcccccaggcgcccgcatcgtttcgctggaagagttcaagcactcgcacggctgggcgtgatcaagcggggaccaggccttgaagtaggccttgatcagccgtcaaaattaaacttgccgaattgcgccgtcgtgccagtgcatttcatgcctgcctgccc

SEQ ID NO: 7097 - DNA, 631 bp, Chlorella sorokiniana
  unsure (1)..(631): unsure at all n locations; Clone ID: LIB3602-064-Q1-K6-A11
ccacgcgtccgtataaaaaaaaaaaaaaaaaaaaaagagggggagagaaaaaaaaaaaaaaaaaaaaaaaaaaaaaaagaaaagggaaaaaaatatattaaaggatccaaattttttttacccgggctgttcttctttctggttctttttttgggtccccttttttcctttttctggccttttttttcctcccccttgggggggggggccttgccttggcccaccttggtcccctcgcgtcttccccccctttcccccccttcctttttccccccggggcccccccttttcgcccttcccctcttttccccctcctttttggcttttggttttccccttttgggcccttttttttccttttttctttccctttctcccttgttttcctttccctttgtcttcgccttttccccccntcctctcntctccttccctttctttttttgcccctttttttttgttttcccttgccccgtttttttccccgggggttcctttttttgcccccctttttttttctttttccgggcccctttctttttgctcccctttttttcgcggttacgggtccctttttgcgggctctttcccccttttggggccttttcttcccccttttggcgcgttttgc

SEQ ID NO: 7098 - DNA, 399 bp, Chlorella sorokiniana
  Clone ID: LIB3602-064-Q1-K6-A12
gcaacataccatttgttacacattaagtcctggtaccagatcggcttaagggacccaaaaaggcactgtacagtcgggccttgaaaaggggggggataccttggacgtgtgggtgagtgggtgtgcgagcatgatggatgggtttggcagcagctttgcatggcagcacccgctgtgtgaagcgcgggtgaagggtggacatggagtgaggtgtgggaggtaggatgtgcggcggtgagcggcatgaaaggtggcgggtggaaaatggttcccgttgagggggcctcaggtggtgcacccgcggaccttcctttggggtggctgtttttttggatggggaggatggggcttggagggcctttacccttttattgttggtgagtgggtggctatggtttt

SEQ ID NO: 7099 - DNA, 570 bp, Chlorella sorokiniana
  Clone ID: LIB3602-064-Q1-K6-A2
gctatgcaatcaagctggacaagcgacctgcggtgtcggttgcttactttggggagggagccgcctcagagggagacttccatgccgccgtcaactttgcagccacgctgtcggtgcccatcatcttcatctgccgcaacaacgggtgggccatctccacccctgccaccgaccagtaccgaggcgacggcattgctggccgcggccccggctacggcatcgccagcctgcgggtggacggcggcgatgctcgggcggtctactgcgcaaccaaggaggcacggcgagtggccaccgagcagcaggcacctgtgctcatcgaggccatgagctaccgcagcggccaccattcaacctcagacgacagctcgcggtaccgcgccgctgaggaaatgaaggcgtggcgggcgcgcgacccggtcacccgcttccagctctggctggtgcagcagggctggtggagcgacgagcaggataaggaggcccgggcagcagcacgcagtgaggtggttctggccctagcggcggcccagaaggagcccaagccgcccctgtctgccatgttcaccg

SEQ ID NO: 7100 - DNA, 618 bp, Chlorella sorokiniana
  unsure (1)..(618): unsure at all n locations; Clone ID: LIB3602-064-Q1-K6-A3
ttcgggtgcacgtgggggacgacgtggcggccagcaacgagtctgacgcggtgtggattgggcgcgtggaagccttcttgtccttcaagggccacggcaactgggcctttgtgcggtggtttgnggaggcgccgcatagccagcgcacagcgccgctggggctgntgcgcctgcgctggtgctgccacgaacgcaccgngcccggcaccagccgccgcgggctggtcccattctatgacttggtgcagctgtcgcacgtggtcttgcctgtgtttgtgcctgaggaccgcttcctgcgctgcgaatcctcggccctcttttttttctncctccgtgttctctgtggctgcctgtttctgcccccttggtgcctgtcctgctggttgtctcctctccgtccccctttttttttttttcttttttggggctctttttttttttttttttnnttgtntttttttttttttttttttttttttntttttttttttttctttttttttttctccttttttttttctttttttctttttttcttttttgggtttttttttttttnngctcttttttgtttttttttttttttttttttttttttttttttttttgtttgatatg

SEQ ID NO: 7101 - DNA, 604 bp, Chlorella sorokiniana
  unsure (1)..(604): unsure at all n locations; Clone ID: LIB3602-064-Q1-K6-A4
gtcttgggcccagnaggtagagcggtgcatcccgcgcggcgacgagcggcgctgggccgcgtcgcgcagcgtgctgcagcaggggctggagcgcaaccgtgacgcgccgccgctgctgcaggcctggggcctcctcgagatgcagcgcggcaacctgctggccgccgtgatgctgctggaccgctctgcggccctggagccgaagaaccgccccgtgctgcgctgggcaccagtggtggaggctcgcaagacggtgggggagcgccgcggcaccaggcgcctacagcgcgacatccgtgtggctgccagtggcggcgagaactgccctgagagcgacgaatgagcacccgagggtagcccgcttccagctgcaagccatcccgcagttgcacccaagttttgcccccgaccggcactgcatatatagctccccttgcctctgtaccatgctgcccaagcttgcaacgagcctgccttgccaccttactgtttgcgaagatgccccccgtgtgcctgtgccccgtgctgcacttgaacccgccttgccaaattcatgacccgcgccgnatgcaactcctttctcttgccgcctgcctcccttgtc

SEQ ID NO: 7102 - DNA, 521 bp, Chlorella sorokiniana
  unsure (1)..(521): unsure at all n locations; Clone ID: LIB3602-064-Q1-K6-A5
cttngaaagagcgatgatgagctgtccaaggccatcatcggcaccatcggagatgtggacgcctaccagctgccggacgccaaggggcgcaccgccttcatgcgccacatcctgggcgtgagcgatgaggagcggcagcagcgcagggacgagattctgggcaccactgtgaaggacttccgccagtttgccgacgtgctggcggcggtgcgggacaagggccaggtggtggccgtcacttcggccgacaagctggaggcggcgaatgcggagcgccccggcttctttgctgccaccaagaaggtgctgtaagcacagatataagcacaagcagcggcatgcccgtccgccttgcaacgacccttccaagcaacgaccgatgccttggctgacccggttgattaatgatcccagctttgcccctcatttcatccctcggtttatctgtacagtcgttttcctcctcggtaacattggcactgctaaaaaannnanannnaaaaaaaaaaaaaaagggcggc

SEQ ID NO: 7103 - DNA, 448 bp, Chlorella sorokiniana
  Clone ID: LIB3602-064-Q1-K6-A7
agcgagttcagcgacgacgactggtaaacagccggccgctcgtaacggctgtggcgccccgttgccggcagcttggttaggttccaacccttccgactgcctgcgctggcgcgagccatcggccagcttggtgcctcgccctgtgggctcctctgaccacctttcagcccaggggaggcacggtagtaggtagacctcccctgcacacactcccggcattttgtgtgtgggcagggagcgtgtcctaactatcacccgcgtctcgtctaacaaagaccaaagcgtgccggcgtgcgcgtgcgccctccaatgcacgacgcccggtgccccacacccagtgtacctccccacctcacccacccctatcctctgccctgcaaatgtgattttgttgcgatgctgtttattctcaagacccaaaacgaaccaacatgagtgtgtaagatat

SEQ ID NO: 7104 - DNA, 552 bp, Chlorella sorokiniana
  Clone ID: LIB3602-064-Q1-K6-A8
ctagctctaggacgcgagcggtcgatcgcgcccacgcgtccgcccacgcgtacgcgatcacataactgtgcacaggagcagaggcagcacgagccatgctcgcggcccaagcgcccgcgctttgcagcaccgccagtcaacacacgcccgcgacggcccagtacactcacagccggtgctggaatcgtgtacaggcattgcgcggcaggctaccaccccgccggcggcggtcagtggcggcagcggcggcggcggcggcttcaagtggtgcagctgctccacaggctggctcatccagccggccagcagatgagtactttgctggtggagatgtcacgcctgtcgttctgttcgatggcgtgtgcaacctgtgcaacggtggtgtcaacacgatgctggccctggaccgcaaaggcgtgttccggtttgcggccctgcaatcagactgcgggcgtgcgctgctgcagcggtcgggccgcgctcccgacgacatatcgtccattgtgctagtagagcgggagggcagctacatcaagtccgatgcaattttgc

SEQ ID NO: 7105 - DNA, 548 bp, Chlorella sorokiniana
  unsure (1)..(548): unsure at all n locations; Clone ID: LIB3602-064-Q1-K6-A9
gcgttcggcgcggtgtnatgggcaatctcttcgcctggtgaacgttcccgaacacaagaaggccttctgcacgggtcaaggagtgccgcatgcacaccatgcacaaggttactctattacaataccggtaaggcgtcgctctacgctcatggcaagcggcgttacgaccgcaagcattccgcttatggtggccagaccaagcccgttttccacagtaaggccaagaccaccaagaagattgtgcttcgtctggcctgcaccgtgtgcaatgtccagcacatgcacgccatcaagcgctgcaagcacttcgagattcccggtgacaagaaggtcaaggggttatactagtaaaaaaaatgagagcggcagtccgagagcatgaccgaaaaatggaggcagcggcgctcgctcaccctgggcggtctgctccccgcccggcgcctctcttttgccgcctctggccactcgtacgcctccttgttcatgcccttgtgcttactgagctgcccaacctgctatgcaaccagcctgcccttctgtaatgccat

SEQ ID NO: 7106 - DNA, 507 bp, Chlorella sorokiniana
  unsure (1)..(507): unsure at all n locations; Clone ID: LIB3602-064-Q1-K6-B1
tccacttgctccggctactactaggcaactagctgagcaaggcagggcagcctgaaacaggctcccatgtgccgacgctgctggcggcatgaggcacagcaccaagaaaggcagctttcaagggcggcgttgtgctggagcaggcatggccgccagtctggagcgccagctacagcacgttgccgcgctcgatggccctgccaaccagcctcgacgcacagctgaagcgctgcaacacacccgtgacaaaccgtgcaacagcagccacacactgcgttgcttgaaccccctttccgtgacccaagacccgatccattccgtgatctctcccatctgcaacccagcacactcccccattccctggaccccatgcatgaccctcccccctccctgaccccgaaccattccgatgaatgaaaccacccccccgccgctgtgcttgccccacacatgtgttcagatgtaagcacacattccaaggaaanttttgtctcctctttttttatt

SEQ ID NO: 7107 - DNA, 453 bp, Chlorella sorokiniana
  Clone ID: LIB3602-064-Q1-K6-B10
cttgccgactgcagcagaaatctgagcaaccatgggtaaggtgcacggctcccttgctcgtgccggtaaggtgcgcggccaccgcccaagtgcccaagcaggagaggcgaagaccccaaggccgcgcccgcaagcggctgcagtacaaccgccgcttcgtgaacgtggtggtgggcttcggcaagaagcgcggccccaacagccagtaagctgactgcggcgccagcagcagcggcaggcatgtgctgaacgcacggagcgtaagcgcgtcccgcgcacagccgccaccgaagcggcctgccagcgtcgacggcagcgaggcagcaaggcgcggcctggcatgctagcagcgcgtactgcgcgccacggcgctagcagccgcaccctggaacagcatcagcagtaattcagcagcccacctgcatgccgaacgctccgctgtaacaagttctc

SEQ ID NO: 7108 - DNA, 509 bp, Chlorella sorokiniana
  unsure (1)..(509): unsure at all n locations; Clone ID: LIB3602-064-Q1-K6-B11
cacaagtacccaggaagcacacgaggcgctcgcctgggtctcaaggaggatttcgacaaggctgctgaggaggccaagggcctgcccgacaacaccagcaacgacgacaagctggcgctgtacggcctgtttaaacaggcaaccgtgggcgacaacaccaccgaccgccccggcttctttgaccccaagggcaaggccaagtgggacgcatggaagaaggaggagggcaagagcaaggagcaggccatgcaggagtacattgagctggtggcgcagctgaaggccaagtacgccgcatagatgggctgacgagtgcggctatggtgtgcccagcagccagccaattgcaatttggccaaggtcagctgggccacgcagcggctgcgccttccgctagtctaatgtgttttcctatgccgcttctgctctgatattcttacagttgctgcgctgtatagcttcccgcgtttgtgagaccgagacagtntttttttttttttttatttttt

SEQ ID NO: 7109 - DNA, 596 bp, Chlorella sorokiniana
  unsure (1)..(596): unsure at all n locations; Clone ID: LIB3602-064-Q1-K6-B12
cacgcgtttcgctgcctcccaggcggctcatggcagacctgtgctgccattagaggggcgccccatgcggggccttgtgcgcgcggccaagggtctacctgctcgacgggatgccaacacatccgcccggagcatgtggtgcagtttgcgaacctggtgtacgtcatgatgcgcaatgctggactagcgcatgtgtgccgtgcctcatagccgaatgcggaaccaggtgcgcacggctgccgaaacagactccgctggcttgtgtcacttcttgggaataaaaccgcancgcaggcactatccatgccgacctgccacgcctgggcctccctaccctcggagggccagcagtcgacgcctgcaccacctcgccggctgcttgtcattctgccaatcaccgttgcaggcatccctggcgaccttgccgactcagtccacctgagcggcacctgttctgtttgatgaccaccctgcctgcttttttctcccgacctgcggtcttgtgactagctaggcgcccacccctgcancgcaacctgaacaaactggcagccgcccttgacttgccaagctacgcaccccgggcatgcggtgtt

SEQ ID NO: 7110 - DNA, 453 bp, Chlorella sorokiniana
  unsure (1)..(453): unsure at all n locations; Clone ID: LIB3602-064-Q1-K6-B2
cccacccccgccgcctgggcagccgctgcgctcaagcagattgggcgggagacgagcttcactccctactggttccacggcctgcagcaagcggtgatccggctggcgcccgagtggctggtcaaccgccaggtcatgcgcatgcaccagggcttccgctcccgttactaccgccgcctggcgcggcagcaggcggaggcggcggccgctgctgcgggcgaggcctcggcgggtgagggccaggaggaggcgcctaagcgcgagctgcgccgccgcaagtgaagtgcacaccgcgagctcaagcccttgccagccttgagatggggcatgcagcgggccatcggcgacagtcagcagcaatgaccaatggtggcgttgtgctgtactagagtgtgcatggcagcgaatccttatgtnntgtctgtcattagctggcacggggtgatttgacac

SEQ ID NO: 7111 - DNA, 594 bp, Chlorella sorokiniana
  unsure (1)..(594): unsure at all n locations; Clone ID: LIB3602-064-Q1-K6-B3
acccagcgttttcggccggcggcagcgcaccaccaggctggggggggggggggacaccatcatcatccccacgcacgtgcgcnaccctgctgcgcgcgtggtgcccaccctcttcnnctattcggtctgtgcacagctcttcctgccncttctgttcttgctcattttcnncncttggttgctctctggtggggggggcgtcccgcncctccggcnccncctggcgggcccctgcggttgctcctgctcttcgttctatttccgctcctccgtgcttttccccctctgccctcctgtttttgtgcccccgcttctcccttttcttttctttctttttttcttcctttttcgtccccctttttatcgtggtccttctcctccctttcttttttttccttctttttctcttttcttttttcttcttttttncgtggttggttccttttcttttttcgcctttttctttttcttttttcttttgcttgttttttcttttttttgttttttttttttgtttgtttttgtttttttctttttttgtttttgtcnttctttttttttcgttnttgtgttttttttttttttttttttttt

SEQ ID NO: 7112 - DNA, 510 bp, Chlorella sorokiniana
  unsure (1)..(510): unsure at all n locations; Clone ID: LIB3602-064-Q1-K6-B4
gcacccacaacctgnacgtgcggctgcgccactcggtgatccgcgccggcctgcgccgcatctccctcgcctactcccgcatctccctggccgatgtggccgccaagctgggcctgcccagcgtgcgggacaccgagagcatcgtggccaaggccatccgggacggcggcattgagggtgtgctggaccacgaggcgggcgtgctgcaggcggcccgccccgcagacatctacgctaccgacgagccgcaggccgccttccatgcgcgtatcgcgttctgcatggacgtgcacaacgaggccgtcaaggcgatgcgctacggcgagggcggcggtgcggtgcaggagtttgaggacgcgaccgcgctgcgggagaagcaggagcaggacctggcggcggcgctggaggaggacgacgacttctgaggggggacaagggggcggaaactggccaccacgctgtggatgaatgaaaagatggcgtggctgcactcgtcaagaaaggcccctg

SEQ ID NO: 7113 - DNA, 398 bp, Chlorella sorokiniana
  unsure (1)..(398): unsure at all n locations; Clone ID: LIB3602-064-Q1-K6-B6
cccacgcgttccgcccgtgnaagctcgctatcgtgatgaaggttatggggccgcaccggctcccgcggccaggtgacgcaagtgcgcgtcaagttcctggatgatcagaaccgcctgatcatgcgcaacgtcaagggccccgtgcgcgagggtgacatcctgaccctgctggagtctgagcgcgaggcccgccggctgcgctaagcggcagtgccgcccagccgcgtctcacgggagagcggcgtgcgccagcatggcagccgcggcagcgagttagccacgtgttgcagctggtggcccgccctgtgggcgtctgcagcagcancccgggtggcaggtgtcccgtctggggcgaccagcccccgacccattgggatgtaacacatctgaccgcaaaa

SEQ ID NO: 7114 - DNA, 347 bp, Chlorella sorokiniana
  unsure (1)..(347): unsure at all n locations; Clone ID: LIB3602-064-Q1-K6-B7
gnatctacctgggtgcaccctgggtgatcaacgccaccgaaacgcctccccanaccgtttccgtaaactttgtggcatctggttgatgccgctatcgacgaaagccgacacgatgcccctaaatccaacaccgacaccgccgcccaaactgaattgcatgccgaccagaccacccctttcaagaatgatcacaacaaccaacactgcatgtaatgtgaccgcatccattccccttcaccccctgtgattcaatctgtgattcaagtttgacaagttcggtgtctctagcaaggagcggaatttagatccaagtgtacacgctgcatcacgtcnnngnnttttnatnt

SEQ ID NO: 7115 - DNA, 151 bp, Chlorella sorokiniana
  unsure (1)..(151): unsure at all n locations; Clone ID: LIB3602-064-Q1-K6-B8
gcgtccggccgcggcgcggttctgggcgaggcgtacgccacggcggctcatgaggcgctggagctggcgggcgagaagcgccagctgcngggcgcgctggacgntgcccanaancanattgcantgctgcgcggcctgctggtttcttttc

SEQ ID NO: 7116 - DNA, 452 bp, Chlorella sorokiniana
  unsure (1)..(452): unsure at all n locations; Clone ID: LIB3602-064-Q1-K6-B9
ccgggttcgacccacgccgtccgctgttctactttgacgacgacgccagccagatccgagaggtggaggtttaccgcagcaactggctgggagctgtcgggcatgaggagcgcaagcgtgcggcacagacgagtcgccagggctgagcgcatgctgctgctgacgagcacactgcagcattttccatcggctgctgcgtgaaccctggacgttgcccacgcgtgggcggttttgcgagcggctggccccagttttgtgacgcggtcatctgtacacagatggcatgcacatgcaccgattgcctgccattcagttgagttttgattgcagatccacgtctgatttagcgcatttgcttgcaaannnagnnnnnnnngnnnnnnnnnnnnnaaannnnggnnnnnnnnannnnnaaaaaanaaaaaaaaaaaaaaaaaaaaaaagggcgggcc

SEQ ID NO: 7117 - DNA, 381 bp, Chlorella sorokiniana
  unsure (1)..(381): unsure at all n locations; Clone ID: LIB3602-064-Q1-K6-C1
ccgggtcgnanccacgccgtccggnaaggccaagaaccaccaanaagattnngtgctgcgtctgggcctgcaccgtgttgcaagggcccagcacatgcacgnccatcaagcgctgncaagcacttcgngaatcggcggcgacaagaaggtcaaggggctatactagtaaaaaaaagagagcggcaggcggagagcatgaccgagaaatggaggcagcggcgcccgctcaccctgggcggcctgctccccgcccggcgcctcgctttggccgcctctggccactcgtacgcctccttgtccatgcccttgtgcttcctgagctgcccaacctggcatgcaagcagcctggccgtctgtaatgccattggcgtgtganaaaaa

SEQ ID NO: 7118 - DNA, 441 bp, Chlorella sorokiniana
  unsure (1)..(441): unsure at all n locations; Clone ID: LIB3602-064-Q1-K6-C10
ggcgagttggnacactctagcgccaggcgcgccccaattttcagcccagcgcactcattcatgctctgcttgtgtttggtcagcttttcttgaacccccgccgaacttgcttccattgttctcctccctgccgtcacacgattgcccaccctcacgccagccccaattttgcacagcaacacacccgaaatcctccctcctcccaccatcaccacaccgacccaccacgctgtcgcattgccagcagccaccgtcctgctcctgttgcaagccttgcctctgtttcatctcctgcttgatgtgcttgcctgatgttgctccatggcgccgttgtggtgccgcattctccaagcacccctgcgccagttttttttcatctcacttattcacattcccccgctgggcggatcgtgcctctccctgctgtaacctgccacatgc

SEQ ID NO: 7119 - DNA, 458 bp, Chlorella sorokiniana
  Clone ID: LIB3602-064-Q1-K6-C11
cggtccggacccccggtcgccccgcgtctaaaaaaaaaaaaaaaaaaaaaaaaaaaaaagggggcgttaaaagaaacaactaacaaaaccaaacatgcaaaaaaaaaaggtcgtccttttaagctccttcttcattcccccttgctccccttttttttttttaatcccctgcttcccttctttgtcccttgtggcatgccctcttggaactcccttcttttccccgtgttcccctttcccctttccccctttcccctctctccttttgctgggggcccccctctttctctttctcacgttttgctgcctgggttccgctcgggcgcccctttccttggcccttctttcgccgttgttgtggttcccttcctggtccctttcccttccgccgccttttcccccctccttttggtcttttcctttcttttctcccccctttccccgtcttttccccttcc

SEQ ID NO: 7120 - DNA, 217 bp, Chlorella sorokiniana
  unsure (1)..(217): unsure at all n locations; Clone ID: LIB3602-064-Q1-K6-C12
gcggcattgtcgctccgtgcacaacgctagcgcaaccattgccagtctttcaaatgtgncccacnncttgttgtgcgcnnatcggcgtcccagtgtgngcattgtcnnatctgtgnacannaaaaaaanaaaaannaaaaaaaaaaaanaaaaataaaataaaataaaataaaaaaaaanaaaaaataaaaaataaaaaaggaaagaaaaaaataaa

SEQ ID NO: 7121 - DNA, 446 bp, Chlorella sorokiniana
  unsure (1)..(446): unsure at all n locations; Clone ID: LIB3602-064-Q1-K6-C2
ccgggnntcgaccccgnncgtccgtaaaaaaaaaaaaaaaaaaaaaggggggggggggtgggggggggagaaaaaagagaaaaaaaaaaagggggagaacaaaaaaaaaaaaataaaaacaacttttttttttccttttttcccccactccttgcccccccccgcgccccgcccccnnnnnnnnncccncccccccccccanccaacccaacaaagggggggggggggggggggggtgggccctccctctcccccccctcccccccccccctttttttttttttttccccccccccccctcctccccccccccccccccccttcccggcccccccctccccgtgccccccccggggtcccccctccttttgctcctccccccccccccctcccccttttcttctcctccccccctcccccccgccccccccccgccccccccgccc

SEQ ID NO: 7122 - DNA, 167 bp, Chlorella sorokiniana
  unsure (1)..(167): unsure at all n locations; Clone ID: LIB3602-064-Q1-K6-C3
gccaacgagcattacatgtgggctggcgcggggggcgcacgcccgcaggcagcacccatctactggctggcggcggtggccttggccttgcggatgcccttggacagagcanaggcccggtcctggggggggcgcttcaggtcggggcggcctgcagactgcgcctc

SEQ ID NO: 7123 - DNA, 603 bp, Chlorella sorokiniana
  Clone ID: LIB3602-064-Q1-K6-C4
gtgcgagcggcttggagcacaggggcaccatgaagttctccagcaccgtgaccagcagccgcaggaagtgcaggaaggcgcacttcacggcgccctccagcgcgcgccggaagctgatgagcgcgccgctgtccactgagctgcgcaacaaatacggagtgcgctcggtgcccatccgcaaggacgacgaggtgtctgtcgtgcgcggcacctacaagggccgcgagggcaaggtggtccaggtgtaccgcaagaagtgggtgatccacatcgagcgcatcacccgcgagaaggtcaacggcgccaccgtgaacgtgggcgtggacccctccaagtggtggtcaccaagctgaagctggacaaggaccggcgccagctgctggagcgcaagcgcgcgggcaagggcctggccgacaagggcaagttcacggaggcggaggtggcggccatggagaacgtggactaagcgccacgcccaccccgcagcagccagcagcagcagcagtgttgaggccgcgggcgggccaccgacgccagtgcggctcgggtggcggcggcccgacggccccggtgggggcagcctctccctgtggctgtggcgct

SEQ ID NO: 7124 - DNA, 450 bp, Chlorella sorokiniana
  unsure (1)..(450): unsure at all n locations; Clone ID: LIB3602-064-Q1-K6-C5
gcaccaacaagaagctaaaccaaaaaaaagagacacgagaagcatgacacaaaaagccaaaaactgataatggaagctaaacatgcaagagctggcattaacaagcgtggaaaacccccgccgttcgcagcaccgtggaagcgctgctgctcaagcagcgggtgcagacggagccggatcgtgtcggtgcagggcggggcaccacatgagctgcgcggcaatttgggtctgctggcccacatcctgcagctgctggcatctgtgggcatccgccccccagaccangacctcaccatggtcctgctctacctgccccggctccatatcgctctctcgcggccacctctttagcggttgaaggaggccttctatgcctggcccctgtccagccctgtgcgcttgctgctcctgctgctcctttgttcgctccttgcctgctacttcttttga

SEQ ID NO: 7125 - DNA, 570 bp, Chlorella sorokiniana
  unsure (1)..(570): unsure at all n locations; Clone ID: LIB3602-064-Q1-K6-C6
tcggcccgccccggacgcaatgagcgtcggcatggccgcagcagcagcagccgctgaggagcagtgagggcggcgctctgcagccgcgcctcgtcctgcgatgagtcagcaccgcggggccgcccggcgcacggcacgccacccggcaggcagcttatttatgtgcgctgggccgcgcgccggcgccccgtgtaaatcgcgatatgcgcaaaaaaaaaaaaaaaaaaaaaaaaaaaaaaaaaaaaaaaaaaaaaaaaaaaaaaaaaaaaaacaataatcattattatcccttttttccttcccccctctttcctcctcttcttttctcttttttctcttcttttttctgtttcttttttttatttctttatctttattttttcttttttccttccctgttttccccctttttttctcccttctccatatccccctttttcctcttttctttttctttttttttttttgccttccctttttcttccttttccctcccttnttttttccttcttttttcccctttttttttttttttttttttttctnccccctcttttcttctttttcttt

SEQ ID NO: 7126 - DNA, 56 bp, Chlorella sorokiniana
  Clone ID: LIB3602-064-Q1-K6-C8
cctccccctcccttccgacgttttgttttttttttgggggcccctaattgtgttgg

SEQ ID NO: 7127 - DNA, 575 bp, Chlorella sorokiniana
  unsure (1)..(575): unsure at all n locations; Clone ID: LIB3602-064-Q1-K6-C9
tcgaccacctgctgatctccaanaataaccggcgcgaggtgtacaagtacctcttcaggagggcgtgctgtacgcggagaaggacttcaacctgcccaagcaccccgagattgatgtgcccaacctggaggtcatcaagctcatgcagtccttcaagtccaaggagtatgtgaccgagcgctacgcctggcgccacttctactggttcctgaccgactctggcattgagtacctgcgcgagttcctgaacctgccctccgagatcgtgcccgccaccctcaagaagagcacgcgccccctggagcgcgagggcgcgcgcccgccccgccgcgacggccccccccgccgcttcggcgaccgcgagggctaccgctccgagaaggcgggcgcccccggcgagtaccgccccgagttccgcggcggcttcggccgtggcgccgccccccagtaagcgtccgcttcctggagcagcgccccctgngctcggcaggcggcggcgggtgcggcggccgcgaggagtggcagagtgtgcgtgccagctgcatgcaggctactgtaacctccgccgacaaaaa

SEQ ID NO: 7128 - DNA, 418 bp, Chlorella sorokiniana
  unsure (1)..(418): unsure at all n locations; Clone ID: LIB3602-064-Q1-K6-D1
ggccggnaaaagcttcatcggtcagcaaccatggctgacgaccgccccaatagcgtgaaggacgtccctgcggacaagttcatcgaggccttcgccgcctacctgaagcagaccaacaaggtccagctgccgcagtatgtggactacgtgaagaccggctctttcaaggagctgtctcccctggaccccgactggtactacgtccgcgccgccgcaattgcgcgccgcgtgtacatcaaccagggcatgggtgtgggcgcgttccgccgcgccttcggcggccgctccaacgccaagggctcggtgacccctgagcaccacnccaaggcggcgggcggcatcatccgccacgcactgcatcatctggaggctattggcctggtggagaagaaccccgcggcccatggcggccgccgca

SEQ ID NO: 7129 - DNA, 381 bp, Chlorella sorokiniana
  Clone ID: LIB3602-064-Q1-K6-D10
cgccgcgggtacatcctgggcctggtggccatcggcggcgccggcatcctggcttggggcggcaaaggcgcagcagacgtccgcttgcccatcactgtcggcccccagcagcccgcccaggtgggcccccgcggccgcctgtgagcggcgccagctcagcgggcgggcgaccgctagccggtacggcggcccaccagccatgccagcctagcagccagccgccctagcccccttgttggctcccagcccggccctcacccctcactcatcgattcacgagaagaacaaccactgcccattctgcgctctacttgtgccgttacggtgcgcgccctccggcgccgcacgtgtaccaacagtgtaatctggtactgcccacaa

SEQ ID NO: 7130 - DNA, 438 bp, Chlorella sorokiniana
  unsure (1)..(438): unsure at all n locations; Clone ID: LIB3602-064-Q1-K6-D12
tccgcggncgcgtgggtctagaatcgcgacggccgccctttttttttttttttttttttttttttttttttttttttttttttttttttttttttttttttttccacccatcgggttcacatgtgtataaaaagcctcaaaaaaaaaatcagggaaaagggctgtttaaattgatggaaatcggggctgggaaaacgggcactgggttcttaggtctgatagcccagcattgcatttttaaaacgtaagtaccgatccagggttccagggggggacttaagttactttaaaagtggaaaaaaatcgccctttttcccaccactgttcaggcccagttgggcacaaaatgctgcacgtgagggaacccaattgggccaaaaggtaaccggccgttgttacaaaatctttttaatgccaacccttgtgaaggtttttttt

SEQ ID NO: 7131 - DNA, 126 bp, Chlorella sorokiniana
  unsure (1)..(126): unsure at all n locations; Clone ID: LIB3602-064-Q1-K6-D3
agttctagaacgcgagccgccgcccttgggggggggttttttttttttttttttggggtcttttnnnnnnntcctttcctctctctncctcctttttttttttcttcccctcccttctccttccct

SEQ ID NO: 7132 - DNA, 551 bp, Chlorella sorokiniana
  Clone ID: LIB3602-064-Q1-K6-D4
cgtcgtctgcccgccgtgctcatccaggccgccgacaccaccgagagcgaggaagaggtggacctggacattgaggcccccaaggtgacaaggccacctcgctgaacaacctcagcttgctgggccgcacgctgctgatgaatgcagcctccctgcgggctgttcgcggccaaacgcactgcacattctgccgcggcacgggccgcgagacgtgcacagcctgccaaggctctgggctggtgcagcaccaggagaaagtgcgcatgaacagcatgcggcacgcagccagcaagctcaaagtgctgctgtcgctggaggagcccaagatgagggatgacgactggatgaagacaaaccgctgcaagcggtgccacggcaccggcgcgctgccatgcaagcactgcggcggcacggggcggctggggcccgcgcagtaacagggccaaggcaagtcagcccatggcaagtccccacatgcagccatcagctcgtgggtcccgtcctccctgctgcttgttctggtgtggtcgtgtgttctttttctggcctgc

SEQ ID NO: 7133 - DNA, 70 bp, Chlorella sorokiniana
  unsure (1)..(70): unsure at all n locations; Clone ID: LIB3602-064-Q1-K6-D5
aaaaaaaaaaaaaaaaaaggaaagaggggannnggggggggannnaaaaaaaaaaaaaanangnnngaag

SEQ ID NO: 7134 - DNA, 569 bp, Chlorella sorokiniana
  Clone ID: LIB3602-064-Q1-K6-D6
cggcacgcgcaccgagctctccttcctcaactcagtggaaatgagatgagcatcttgctgggcgtggtgcagatgaacgcgggcatcatcctgtcctacttcaaccagcgctactttgccgacagcctgtccaccgtgtgcgagttcatcccgcagatgatcttcatgaacggcctggggggctacctgtgcatcctgattgtcatgaagtgggccaccggctccaccgccgacctctaccacaccctcatctacatgttcctggcgcccggagacgtggactgcggcggcaagtgcccggagaaccagatgttccgagggcaggcgggcctgcaggtattcttgctgctggcctgcttcgtggcggtgccctggatgctgctgcccaagccgctgatcctgaagaaacggcaccaggcgcggctggcgcagtcggccgcctcctacggcctgctcagcgccgaggacaacgccttccgctaccagcgctactcatacgaggagagcatgggggcgggcgaagctgcgggccacacgccggcgcctggtcagacccaacgcgcacaaac

SEQ ID NO: 7135 - DNA, 215 bp, Chlorella sorokiniana
  Clone ID: LIB3602-064-Q1-K6-D8
aaaaaaaaaaaaaaaaaaaaaaaaaaaaaaaaaaaaaaaaaaaaaaaaaaaaaaaaaaaaaaaaaaaaaaaaaaaaaaaaaaaaaaaaaaaaaaaaaaaaaaaaaaaggggcgggccggttttgaagggtatccaagttttcacttccccgttccttgccaacgtcttagctttttttttggggccccctaaatttaattggcagtgggccgcgt

SEQ ID NO: 7136 - DNA, 67 bp, Chlorella sorokiniana
  Clone ID: LIB3602-064-Q1-K6-D9
gcagcagccctccgaggctgagcgtagccgtagtgcggagccagagtcgtgtaacacgctggccggt

SEQ ID NO: 7137 - DNA, 446 bp, Chlorella sorokiniana
  unsure (1)..(446): unsure at all n locations; Clone ID: LIB3602-064-Q1-K6-E10
naaaaaaaaaaaaaaaaaaaaaaaaaaaaaaaaaaaaaaaaaaaaaaaaaaaaaaaaaaaaaaaaaaaaaaaaaaacaaaaaaaacacggggcacccttttaagggaaccaagtttcacttccggggggctcctcctaaggctccccttttttcgggccgcctagcggatttcctgggccttttttttggcaccgccttttcctgccactccccgggggttccccaccttaatagcgttgaaaacccttgccgctctcccattttggcgtcttagcgaatgcgccctttcggatggcggttctctacagtacgcacccctaactggacagttgggacaccccttggcggggccccttaggcactgggtgccccccctttacccccattttaacccctgcagttgggggggccctggcgcccgccccttggccttttttccctgcct

SEQ ID NO: 7138 - DNA, 400 bp, Chlorella sorokiniana
  unsure (1)..(400): unsure at all n locations; Clone ID: LIB3602-064-Q1-K6-E11
canaagctcggcccatcaccttacggggcagcaaagcggacgagcaacatggggcggcggccggcgcggtgctaccgccagatcaagggcaagccctaccccagtcgcgcttctgccgcggcgtgcccgaccccaagatccgcatttatgatgtgggcgccaagaaggcgggcgtggacttcttccctcactgcgtccacctggtcagctgggagaaggagaacatctcgtccgaggcgctggaggcggcccgcatcgcggccaacaagtacatggtgaagaacgcgggcaaggacgccttccacctgcgcgtccgtgtgcaccccttgcacgggctgcgcatcaacaagatgctttcgtgcgccggcgcagacaggctgcagacaggcatgcgcggtgc

SEQ ID NO: 7139 - DNA, 453 bp, Chlorella sorokiniana
  unsure (1)..(453): unsure at all n locations; Clone ID: LIB3602-064-Q1-K6-E12
gctggtggcagggcaccacaacagcgcagctcagcgccgcagcgcggcgcgctgctgcaggcgacttgccctgtagactatcagttgcagagcgctgtgctgctgcctgtcgcccacgacagccctccgtctcatccagcttggcatgcaactcacccattgcccctctccccctgtgctgtctgtttccctgctcgtttgtcccagctccctgctgccctctctctgttgcccacaccatacccattctttgcaacatggcagcgcnnaananaaaaaanataaaaaaanaaaaaanaaaaaaanaaaaaaaaaataaaananaaaaaaattaaaaaaaaaaaaaaaaaaaaagggcgggcccttcttggtggtcccaagtttacttccccttgcttgcaacgtcattcttttttttttgggtcccctaatttcaattcattgcccctcttt

SEQ ID NO: 7140 - DNA, 653 bp, Chlorella sorokiniana
  unsure (1)..(653): unsure at all n locations; Clone ID: LIB3602-064-Q1-K6-E2
acccacgcgtttcgtgcagcccgtnagtagcggcacttcgcacctcctctcttgggttgggatggagcaacaccttgcacccgggcgtcggaggagacctgatcgcccacagtgtaggagcacgcgtgccgggggctctccgcccctgcagccgcgtgtgaagagccacgagnatagcaccccgcgctgccaggcctcgcgggcggggcgcacaaatgactagcacccgcgcctgcggccggcgctgctggccggtcgcggccgggctggctgtcccaggaagtgacatgcactgatggttttgcccatgcctgcggcnctgttctttgaggattttctttttttctctcttctgttttttcttttttattctttttttttccttctctcctttctctcggttccattctttctttctccctctttcttctttttttttttttttttncttccacccctttttttttccaccccccctttcttttttttttttntggttgtggggaaataccctttttttttttttctttttttctttttttttttttttttctgtttttttcttggntgaggttttttttttttttttttttcttcgttttgatttttttctgttntttttttttttttttttttttttttttgggtttttt

SEQ ID NO: 7141 - DNA, 436 bp, Chlorella sorokiniana
  unsure (1)..(436): unsure at all n locations; Clone ID: LIB3602-064-Q1-K6-E3
tcgcatcgcagnactccgcaacatcctcaccacacacctggcggcggccggcggcagcagcaatgcggccgcggcgccgtgaggcgcggcgcgcacgctacgcggcgaaccaaaccacccgcctgcctgccagcgcgcctcggcccggcggcggcggcgcccattgtacagcagcagctggggtgcgcagccatttttcggagctcccctctcattcttgcctgcggcacgcgcgtgattggaagaagcggtgcccacgccgagaccccccctccttttgcacttttgcttttcccctgcactggacccctcgcgagacacaccccaacccacccaccctccaccttcattgtaccccgaattcctcaancgccctctattcatatcctttcctgtctcgcaccacagtaccttccccttctcaatgccccccact

SEQ ID NO: 7142 - DNA, 625 bp, Chlorella sorokiniana
  Clone ID: LIB3602-064-Q1-K6-E4
cccgggttcgacccacgccgtccgcccgcgcagcgccagccgctcctgccgctgcccaaacgcctgcacggcctgggcaacatcccgctgcccgccatgctggctggcctggccgcccccgccgctgatggcacggcgcgccagcagcagccggcggccgcgcagcagccggcgtcgcagccgcagcacgaacagccggaggagaagccctgccccacccagtgccacaccaccgccaagaaggaggctcgcaagctggcccgccaaaagcgcgactttttgctggtcacctttgcggcgctgctgctgctgacgtgctgcccgctgggcctgctggtctctgtcttcctcgttgtggccgacctctgctcccagctggtgctcaacctgctcagcggagtgcccatcgatgcatcctcctccttcctactgggggtggcggtgggcgcggcaggcagcgtgcggcgcgcatggaaccactggcggcgcggcggcaacgccgacatcgagagcggctttggcggcgggcgcatccagctgagccttgccctgctcaggaagctgcccttgctcaacccggtcccggcgccggcccatcagccccaactctcaggctgtcgggagg

SEQ ID NO: 7143 - DNA, 599 bp, Chlorella sorokiniana
  unsure (1)..(599): unsure at all n locations; Clone ID: LIB3602-064-Q1-K6-E5
ggngctccgctggttgagggagacatcctgagtgcagaggttgtggagaaggacgggctgccctactacatttacgagctgacccgccaccgcctggtggccgccaccgctacaggcaaccggctgtacatgctgagcgtgaagtgcaacagcctgcagtggcgcaaggcgggcagcaagctggaaaaaattcgggattccttccgggtgccgcccaaggttgacgtttgatcggcacaagaagcaagattgcaactctcaaattgccgcgcttatatgtccggttgcctttccatccttgctgtgtattcccccaaacgaccgcttgtgcgccttccactgacccaaactaactgctctggacttgctgcccctggcgatttgatgtgtttgttgttgagcgatgccgcctgtgctgcggcagatttcatgcctgaaaccgatttccttgttgatgcacgcctttcatgcggcggtgttaccgtcaacagaataccatgtaaagaacaaaagggaantnttnnntttttntttttttnttttttttnttttntttttttttattttttatttttataaaaaaaaaaaaaagggggggg

SEQ ID NO: 7144 - DNA, 206 bp, Chlorella sorokiniana
  unsure (1)..(206): unsure at all n locations; Clone ID: LIB3602-064-Q1-K6-E6
tcgctgtngaacaccancgattgaccctggctgcatcactgacttgacccccgacggtaacatgtaatcaaactcaacaacaaaaaaaaaaaaaaaaaaaaaaaaaaaaaaaaaaaaaaaaaaaaaaaaaaaaaaaaaaaaaaaaaaaaaaaaaaaaaaaaaaaaaaaaaaaaaaaaaaaaaaaaaaaaagaggggcgggccgttt

SEQ ID NO: 7145 - DNA, 652 bp, Chlorella sorokiniana
  Clone ID: LIB3602-064-Q1-K6-E7
gccatttgtaatcgtacattcgttggagggaaaaagggagaaaaaaaaaaaaaaaaaaaaaaaagaaaaaaaaaaaaaaaaaaaaaaaaaaaaaaaaaaaaaaaaaagtggggggtctctagataatctacgacttacatacgcattcaatgccactgcttcttctgtttctctacttccactccaaatggaaggggggggggccgcctttttggctcggcttttctgggccgccccctttctggctcctgctttttttttttttggggtccctcaccttttttcctttgcccgcttttttccccccctggccggcgttaaaacccccttcctatccctttttctccctttttgccccctttgtcttttcccttttggggctttttttcgtggggctccgcccggcgccccctccccactcttctccccttttctgccccttggggcccccccctttccttcgttttttgccctttttgggggggttccccgcctttcctttcctggtttttttgcgggggggctcctttcgggttttttttttggtttcttttccttcccttttgtcccccttttgcccttttttttccccgcttgggcctttttggcggggggctcccccccctttgtgtcccccggttttccggctttt

SEQ ID NO: 7146 - DNA, 451 bp, Chlorella sorokiniana
  unsure (1)..(451): unsure at all n locations; Clone ID: LIB3602-064-Q1-K6-E8
agnctccgcggccgcgtgggcgaggcaactgaatgatctggcctgcagtgcgccatggtgcttgacagcctgctgcgtgggctgagtgcgctagggggcgccacttccactgctcgctcgaccaaagcgagcttggcagcacggcgcaaccacctgatcaagcgcaagtttgctgttccagtgagccagaaagaagtggagcgcgactgggcggctcagggctttcactgcggctgcatgatcgacccaccaggccacgagtggaacaactttacgcacactgccaacgaactggtcaccgtggtggaagggcgcatgcgcttcacgttctttgacacagaccattttatattggaacctggagacgagatcttcattccagccggcgtgccggacaggaccaaaaacatcgggggagtgaaatccaagggggtttatggctatgatggag

SEQ ID NO: 7147 - DNA, 409 bp, Chlorella sorokiniana
  unsure (1)..(409): unsure at all n locations; Clone ID: LIB3602-064-Q1-K6-F1
cttctccgccccncccccccccccccccccccctccccccccccctccncccctccccccccccccctccggggccggttcggggttctttgggtgttttcctccccccccccccccccccccccccccccccccncccgccccccccccttctctcccccccccctccccccccccccccccccccccccccccccctcccccccccctccnnccccccccctccccctccccccccccctncntcncccccgcgcccccccctcccccccctcctccctcctccccccccctccccctccccctccctcctcctccccccccccccccccgcccccccccccccccccctcttttcccgcccccccgcccccccctctttccctccgggtcggcgcccccccccccc

SEQ ID NO: 7148 - DNA, 491 bp, Chlorella sorokiniana
  Clone ID: LIB3602-064-Q1-K6-F10
cagccctaaccaggccagcagcgcgatagcggtggcggagacagtgcagcacttcatcaccgccatggactcgttgaagctgaacatggtggcggtggatcagatcttcccactgctctcagacctggtgtccgccatgatgaaggtcacctcgctgccgcccgacatgtctggcaagaaggcggtgcgggggtggatgaccaagctgcacggcatgcccgcctcgtatgagctgaatgaggaagaggtgcgccagctgctgttcgacctggaatcggcatacaatgagttcatgcagcagatcaagtaggcagccgtagcgcagacagagctggcaggaccaggcggcacggtaacgtgccggttccactgctgccgtccgccagccatgactgtacattactgacctcagcacttgtgacttctctctgtgtacgcacctgacccatgtcacttcttagcatgttctttgattgcaagagcagaaccct

SEQ ID NO: 7149 - DNA, 481 bp, Chlorella sorokiniana
  unsure (1)..(481): unsure at all n locations; Clone ID: LIB3602-064-Q1-K6-F11
ttcgtntaaaaaaaaaaaaaaaaaaaaaaaagaaaaaaaaaaaaaaaaaaaaaaaaaaaaaaaaaaaaaaaaaaaaaaaaaaaaaaaaaaaaataaaattaaaaaaaaaaaaaaaaaaaagaaaaaacgttttgggggtttttttttttctctccttttccttcccctgttttggcttttctttctttttgtttggggggctttcattgcccttcttttcccccttttttcctgggtgttccctgggctttccctgctttttccccttttnttccttttcccttttttccctttttttttttttggntttttcccaaacgggccccccttttccccttttccaaaccctttttttcttttggttccccttttttgccccctttttttggccctttttcttcgtggttttcgggtgttttgccccttttttttttttcctttttcaggcccccttttctccgcttcttttccctttttttcc

SEQ ID NO: 7150 - DNA, 577 bp, Chlorella sorokiniana
  unsure (1)..(577): unsure at all n locations; Clone ID: LIB3602-064-Q1-K6-F12
ccgnctactacaacgcananaaggcgacgcgctctatgcctttgagctggcgctggctctgcagaagctgaacatggacaagctcaaggcctgccactcgctggccgacaagtcggatgacttccaggtgcagcctgctgacgcctcaacgcctttgattcacacaaaatgcttgatgggctgcagcgtcaggccctcaacatcgtttgccagcctgcctgcccgtgttggtcgttgcggcagacacagtcaatagaaccccactggcatgccctgtctgcttctaacttgccaagtgcaggcccaggatttcctggaggacgagatgagcgcccaggccaaggtggtgaaggagctgggagactatgtgtgcgagctcaagcgcgtgggcaagggccacagcgtcttccactttgatgagaggattgaccagggaggcctgactgctgcggcgtgagctgaccaggcagcaagttgcaaagggcgcagctgcagaaatggcctgcaagcccagcggcgccagcaaggcggcaggcgtcggcagcggcaggcgtcggcgtggcatacgcactgatgc

SEQ ID NO: 7151 - DNA, 237 bp, Chlorella sorokiniana
  unsure (1)..(237): unsure at all n locations; Clone ID: LIB3602-064-Q1-K6-F2
tcgggttcgctacctgnaaaaagaacgggcgaggtccttgcctggannncggctgcctganaagaaggggctgagtaggggccacnngttgggccatcacgcgcagtggcacattgtctnncctggctgnngcccaatcccatnncacctgcnntgccattcnnttcctttgnnctcatttgnnctcctctnntcatacctcnntgttcggcgtgctggggaaaacaaactggtacc

SEQ ID NO: 7152 - DNA, 572 bp, Chlorella sorokiniana
  unsure (1)..(572): unsure at all n locations; Clone ID: LIB3602-064-Q1-K6-F3
acccagcgttctgctcgnaccgaacgcgaaacaccaaccagccaccatgctgatctccaanaagaaccggcgcgaggtgtacaagtacctcttcaggagggcgtgctgtacgcggagaagacttcaacctgcccaagcaccccgagattgatgtgcccaacctggaggtcatcaagctcatgcattccttggggtgccaaggagtatgtgaccgagcgctacgcctggcgtcacttctactggttcctgaccgactctggcatttgttacctgcgcgagttcctgaacctgccctccnngatcgtgcccgccaccctcattaatagcacgcgccccctggatctctagggcgcgcgcccgccccgccgtgtctgtccccccctcctcttttgcttccctcagggctaccgcttcttttatgctttcgcccccttcgagttccttccctagttcctcctcggctttctgcctttggtcccgtcccccttttttttttcccttttctttttcctcttccccttttttttttttttttttttttttttttctgtggtttctttttttttttttct

SEQ ID NO: 7153 - DNA, 244 bp, Chlorella sorokiniana
  Clone ID: LIB3602-064-Q1-K6-F4
ccgggtcgcccacgctccggctgccgttaacccccttgctttcgctctcacgtcccccttgccttaacaacgcttccacatacgcacacgccacaaggcttacgcggcccaacgcttgcaatctgctcgtgtactggctggcttgcaactgcctgcccgtgagcgccttgcccctcctgtacgaccaccaccccacctgtacactcctcacgctctaccgaaacctctgtaaacgcctcctggt

SEQ ID NO: 7154 - DNA, 528 bp, Chlorella sorokiniana
  unsure (1)..(528): unsure at all n locations; Clone ID: LIB3602-064-Q1-K6-F6
ttgcagtttaactaccagccacaggcgttgcgtgcagnactggctctcagnnacgccagcttctggnaagggccgcnncaaatgtcgcnntgaagtcccgcttacacnntatcgtggtcgacgggggctttcgagctacacgcccgcagccgcgacattcaagtaccgaatggcgagtcgatttggcaagggttgaggctgtgngagcgcgacgcccgggcgcggtgcgcactggtggagttcaccagctctcgtgacgccgaccgtgcatgggagaagatggatgggctgcgtgtggatggcgctcgctggaaagtcgactacgcaaccaagaaagacttctcctttttcggttggaaatggacagagggtggctaccaccgcagccccagcggcagccccagcaggccgcgcgaaatgagctggaggagctgagcgtctcccagccggtcccctagccccaaccccagcccctcgcgggccatcatcaaggaccgcaaccgggacgagccggctgatctgtccccc

SEQ ID NO: 7155 - DNA, 391 bp, Chlorella sorokiniana
  unsure (1)..(391): unsure at all n locations; Clone ID: LIB3602-064-Q1-K6-F7
ccgggttcgccccgcgttctcccatcncaccatcaagtccaggtgggaggggggctcgctgtccaacccgcagtaccgcaacaccatggactgcctgcgccagtccgtggcggtggggggctggggcggcctgttccgcggctttggcgccgccctgtaccgcgccttccctgtgaacgccggcttcttcctggcgggggagggcacccgccagctgctcgccnngtccgagtcgttcatcgacgagaagctggtcggcgaggtgcccgcncccgcncagacggttggcagcggggtgcctgcccccncnccantngaacagggcccggtgccgctcggcgcacctcacctccggcggctgtccctcgttcccctttctctcccccttcct

SEQ ID NO: 7156 - DNA, 584 bp, Chlorella sorokiniana
  unsure (1)..(584): unsure at all n locations; Clone ID: LIB3602-064-Q1-K6-F8
gctggcggcgctngacagcgggcacctgcgggnagcagcagagaagagcgggctgctggccgaggcgctggcgcgcctgcaggaggaggagagcggcaagctggcggcccagcaggaggccaaggcgctgaagcggcgcgcggacgagctggagaccacgctgtcggaggcggccgccgccaaggcgcgggcagacgaggcatactctggctcacaggcggccctggagtcgatgaagaagaagctggaggtgtacaagcgggagaacgccaacctgctggcctcgtacgacacgtggctgaagcaaacaatggccaatcgccagccagtggtgggtgcctccccatgacggggcgggccgagcgggggcagcgtaaggggcggcagcgcggtgcacacagcatcagcagaggtgcctcggctcggcgggtcaccgagcaggatggaaagtttggcggcggatcgagtggctagggcagcgcttggggccttgggcggcagcgctggcaacatggctgggggcgagcggccagggggcaagcgcagcactggcattccctggaacagcttggggtgggcagcgg

SEQ ID NO: 7157 - DNA, 422 bp, Chlorella sorokiniana
  unsure (1)..(422): unsure at all n locations; Clone ID: LIB3602-064-Q1-K6-G1
tcgcctgtacacgctggtgggcctggcggtggccggactcatcttcattgtgcccaaggtcaaggatgctcaggtgcggcgctacgctgcctacggcctgctggcgctgggcgtgctggccttccggtcagtgaccgccaaccacctgtggaagacgggcatgcgcacgcactggtactggccctgaaaccggccagcggagtgccaactttttcgcttcgtagacggcctgcctggctttcagccggccacagcgcgcagtgatgtgccaagagaatctccacagtgccctctgtccgaatcttgtaaacagcacgtgannnnnnnnnnnnnnnnnnnnnnntnttttttttttttttttttttttttttttnttttttctaggttctttttaaattnttaataaaaaaaaggggcggccc

SEQ ID NO: 7158 - DNA, 542 bp, Chlorella sorokiniana
  unsure (1)..(542): unsure at all n locations; Clone ID: LIB3602-064-Q1-K6-G10
ggattagnanaaaccggcatgcatggcagtaccgggtgccgccgtgcccgcagctctacttgtacagcgaagcagatgcgctcatcccctaccaccatgtcgagctcttcatgcagcagcaggcggcgcacggcatccccgtgcaccaccaccgatgggtggacagcgcgcactgcgagcactaccggaaacacccgcagcagtacaccaacctgtgcagaagcttcagcgagttttgcctgcactcgcacaccagcccagaggtgtgggtgtaggcaggcggtctgggcagcaggccttgtccatcccggcagcaggtagctgccccacccaagcagcacttgttttggacacacatgcagcccacagcttgcagcccgttgcggcctgcacatgataagctgccttgtaaggccgccaattgtgttagtttgtgcgtacacctcattcctcattttgtgccacacctgcactgttcgattcctagtgtgttactatgctgcaccggtgcaaattggagggaatgcgtgtaagcgaggcat

SEQ ID NO: 7159 - DNA, 609 bp, Chlorella sorokiniana
  Clone ID: LIB3602-064-Q1-K6-G11
gctgcgggtgttcatggcggtggtggaggagcgcaagcacctgcccgccctcaagcagttcctcaagctctacacgagcatccccatcagcaagctggggcacctggctgagctggactcggacacgctcaagcagcagctgggcctgctgcggcagagcacgcaggtggtgacgtggcagacgggcgacccgctgcagggcaaccccgtgcccgccggcgacatcgagttcagcattgagcagcaggagggcgaggagatggtggtggtggccgagcccaaggccaaggtcgtgaagggcgacttcctggtgcgccacatcgcccggtttgaggaaattatgaaggatttggaggccatgaagccggtgccgcagcagcagccagccgcgcctgtggccgcgcactgagcggcgctggcagttccgagagtgctggccgcaaactgctgtcctgcctgcctcccgctgcttgctcttttgcttcttctgtgttcgtttcccccccttcagtgtggctgcttttccctgacgcacttttcattgcttgatcacatactgagctggctgcagctggcactggaatcaaatgcaacaacaagtcacgcaaa

SEQ ID NO: 7160 - DNA, 216 bp, Chlorella sorokiniana
  Clone ID: LIB3602-064-Q1-K6-G12
ggcgtgaaagtgcagccagttgtgagacaccggcacaatgagcagggctggtcaacatggcgcctaactaccgcacaactgcaagtgcatttttggtcgtcccacctccatagcgtggagttttgtttccctttttgagttttggtttacttgagcagtgctgtgtagataactttggcaagctcgtcggccgcctcaagatgtaacaagtcgagc

SEQ ID NO: 7161 - DNA, 585 bp, Chlorella sorokiniana
  unsure (1)..(585): unsure at all n locations; Clone ID: LIB3602-064-Q1-K6-G2
tcgcggnnacgcgtgggcgccgcgcacgccggcagccgcccgccccgcccaagcccaagcagccggccaagccgtctgggtcggggcagcggcgacccagcagcgcacagggtgcagcagcagcgggagcagcggtggcgcaccagtacaagccgggggacattgtgtgggctaagattggggtgtgcccctggtggccggcgcagctgcagcgccccacggcggacgagcacttcaagcccaagcacgcaaccaccgacctcttctgcgtgttctacggctcgaatgactacaactggctgccgcccaaccagatcaagcccttccatgagtcacacccagactacgagcggcacgctgctgtgaagaacaggaagctgcagcaggccatcgatcaggcttgggtgttcggcatgcagcggcagcgccccgactccaactggaccggcgcacgatttgtcgcatgagcctggaacaagcagctctgcagctccttgccgccaacagcaggcgcccggcctggcttgacggctgcctccttggccactccctgcgcgcttacatagacttgtggcacgcctgtgg

SEQ ID NO: 7162 - DNA, 423 bp, Chlorella sorokiniana
  unsure (1)..(423): unsure at all n locations; Clone ID: LIB3602-064-Q1-K6-G3
ccgggttgacccagcgtccgcgcagcagcagcgggcatagttgcgccttgtggcactgcgctgaatgccgcccttgctgccggccgctgggctgcggcacctgccccagagcatcccctgctcacccttcccgctgacaatctcattcaccctctgctgaaccggcttggctcgtgtccccgctcctgccacccactgagggcgtgcgtgctgacatgtcacacgacacacacacattcctcatgcctgcgccccttgcgtcgcctctaccatttggtttgcaccctgtcgtttgatgtgcagcgcttcaactgggtcctccccatggctgcccctgctctcagtgcctgccatgtccttatcacacagacacctcttttcccctgtntcctgcctcttgacgcatgtaaccttttgacctgc

SEQ ID NO: 7163 - DNA, 548 bp, Chlorella sorokiniana
  unsure (1)..(548): unsure at all n locations; Clone ID: LIB3602-064-Q1-K6-G4
accacnagctggtgctgaccaccaagnagtacatgcgggaagtgtgcgagattgaccccaagtggctggtggagatggcgccacgcttcttcaagcccgcagacccgcacaagctgtcgaggcgcaagcggcacgagcgcatcgagccgctatacgaccgcttcaacgaccccaacgagtggcgcctgtccaagcgccgcggctgatcaaccaacggcaacagtgtgcggcagcagtggcagcagcagcacgcagcgcctatttgcagcaccagccggcagcagcggcggcagcagttgtgctcttcgcagcggcggctcgtggcacccatgcccacgtcccctgcagcgctatttctccctacccactccgtttgactcaaaacctgacgctcctgacctgctccatgcagcagctgtgacatctgtaactggctgctccttgaaaaannnnnnnnnnnnnntnntttnttttttttttttttttttttttttttttttttttttttttttttgattttagaaaaaaaaagggcagccccttttttt

SEQ ID NO: 7164 - DNA, 611 bp, Chlorella sorokiniana
  unsure (1)..(611): unsure at all n locations; Clone ID: LIB3602-064-Q1-K6-G5
ctagctcagacatctcgaagcggncatcgctttactattaagggtcgtgatcaccgaggtgctgcacgaccccggccgtggcgcccctctggcgcgggtgcacttccgccacacggtgcgctacgccaccgacaagcagctgttcatcgcgcccgagggcgtgtacagcggccagtacatctactgcggcaagaaggctaccctgaacatcggcaacgtgaagccggtgggtgacatgcccgagggtaccatcatctgcaacgtggaggagaaggcgggcgaccgcggcagcctggcgcgctgctctggcgactacgccatcatcgtggcccacaaccccgacgccggcatcacccgcatcaagctgcccagcggctccaagaaggtgatcagcagcgagtgccgcgcgaccgtgggccatgtgtctggcggcggccgtaccgagaagccgatgctcaaggcgggccgcagctaccacaagttccgcgtgaagcgcaacagctggcccaaggtgcgtggtgtggccatgaaccccgttgagcatccccacggtggtggtaaccaccagcacattggccactcgttcaccgtgcgcccgcgactcgcccccc

SEQ ID NO: 7165 - DNA, 450 bp, Chlorella sorokiniana
  unsure (1)..(450): unsure at all n locations; Clone ID: LIB3602-064-Q1-K6-G6
cggncgcgtgggctgcactacatcaagnagtaccagcggtacgagaagcgccacaccaacatctcggcgcacatctcgccctgcttccgctgccacgagggcgacaccgtggtcatcggccagtgccggcccctgtccaagacggtgcgcttcaacgtgctgcgcgtcatccccgcgggctctggcgccaagaagggcttcggctccttctaagcaggctggactaagggcctcttgccttgctggctgaagccctcgacagcagcagcagcagccccagcacggcatgcaagcgctgcagacgccctgctgccctgagtaagcgccgccatgtgccggcggtggcagcagcaccgcccgccttgcatacacctggcccctaggatgccggccacggggcgcccagtagtcgccagacggcggggcgcagcgcatgtaaccgtgtgcatg

SEQ ID NO: 7166 - DNA, 504 bp, Chlorella sorokiniana
  unsure (1)..(504): unsure at all n locations; Clone ID: LIB3602-064-Q1-K6-G7
ccgggtcgaccccgcgtcctgagganaattcgacatccagctggacgaggagggtgctgagaagatctccactgtgcaggaggcggctgacctgatcgcggcccagatggacaagtaagcggagcgctcccacggctccggctgcggcggtgcggcgccggcatgcgcccgcccgctgcccgcgcgccccatgcagccacacctcatagagcgggcgccggcggcgcggcgtggcgcgccccccatgcacaggccggcccgcagtcaccccgcccctgctgtaccaccccttgcttgcttgttcaccgccccacactgctttgccacacgcacacacttcttcccgcacacccaaacctgaacagactgcggagggtttcccgagcgtctcgccactctgttgccctgcctctcatgtgcccttgtacattggcgtaagggctattttctttgatgttgttgcctggatttgggcgttacattaactatgcaaaggcaaggtca

SEQ ID NO: 7167 - DNA, 61 bp, Chlorella sorokiniana
  unsure (1)..(61): unsure at all n locations; Clone ID: LIB3602-064-Q1-K6-G9
naaaaaaaaaaaaaaaaaaaaaaaaaaaaaaaaggaaaaaaaaaaaaaaaagaaaaaaaaa

SEQ ID NO: 7168 - DNA, 130 bp, Chlorella sorokiniana
  Clone ID: LIB3602-064-Q1-K6-H1
tatcccttccgcccctgtcacctcaccctgctctgccccgagccacctgcaccgatttaatgtctccaaccacactgtggtctcccgcactcccattgtctccgccgtgtaacgtgtaacctcttttgtg

SEQ ID NO: 7169 - DNA, 522 bp, Chlorella sorokiniana
  unsure (1)..(522): unsure at all n locations; Clone ID: LIB3602-064-Q1-K6-H11
tgctgcgggagctcaanaacaggttgtgggggcctccactgcgcctgcgggcggccctccctcccagcagatgggtgcgggcgcgtctggcatggcagcgcaggccggcccccccgccatctccatcgaagcgcccaagctctcccgcatctctaccgagtatggcgaggtggaggggcagcccttcatctcagggctgggcatgaagcgcggcccgctgtcgccccgcgctcaggccgtcaaggaccgcctggctcgggagctggaggagtccacccgcgtcattggctagccgctcacaagtatgtacaataagcggcaagcagctgcaatatgaaccagctatgagccagtgcgcctgcgcggcaagcccagcagcaccactgcaactgcgccgacggcatgcgacgataaacaagcgacaccaagccccccacggttgatgtatgccctgtatgaacccgtgaacacgtaatgtacccctcagttgccctgatgaactcaacatgtaacaacgcatgc

SEQ ID NO: 7170 - DNA, 189 bp, Chlorella sorokiniana
  unsure (1)..(189): unsure at all n locations; Clone ID: LIB3602-064-Q1-K6-H12
tcgtacgccctgtcgtgcttttgtgttttgtgcgaacccccaccaacccgctaagcgttttccttgccagcacttccacttcccgccatctcccttgccgcccctcgggcacctgactgcgcccgcgtcgcatgtcgcccctcgcgcgcatgcaatgttgacatgtngaaatgcatatacagcggaggg

SEQ ID NO: 7171 - DNA, 379 bp, Chlorella sorokiniana
  unsure (1)..(379): unsure at all n locations; Clone ID: LIB3602-064-Q1-K6-H2
ccggtttgacccacgcgttctcagccagcgccgcccgtgccgctgccgcagcggcggtgacgctcgataagcgctggcgcaccgctcgcgcaccactgctcgcacttaacctacacttttcacctcctgctaacggtaccttatgactagcctctcttacccacattgacctgacccctttcttgtgccgctgactccttggctacctgctattctgccttcgctgcccgctgcctcgctgcccctctcctcgccccagctttcctgaccagggccgctgccaagcgctggctgcgcccccctgtntgtgacagaccatcangccntnnnnnnnnnnnnnnnnnnnnnnnnntttttttttttttttcttttttttttt

SEQ ID NO: 7172 - DNA, 498 bp, Chlorella sorokiniana
  unsure (1)..(498): unsure at all n locations; Clone ID: LIB3602-064-Q1-K6-H3
acccagcgttttgcgcgccgnaaagtactggcacagcatggttgcgggggggtggcttagccgcgtgcacgacggggacgtggtggacgcccgcatgatgcgcgtctaggcagtcgagacgcgtctaggcctggaggcagccccccgcctctgtgccacaccatgccaatgttaattgaaccccgcctacgtgcggcagcttcgagcgagccactcacaacatgacggcagcagctggagcgcgccctgttaggaagccgccgtgcccagctgctttcaactactggcgagatgatgccacaaacgcatcagccgtgtgcttcatgtgaagtgctcccttaatgaatgacacgcacccagtgccccccccctgccacctatgcatggcctttctatgcttcacgtgagcccgtttcattgagtngtctatcttcatagcgagcgcgcctctttgtggaaaaaagcgcncaattcnttttttttctttttttttttttt

SEQ ID NO: 7173 - DNA, 511 bp, Chlorella sorokiniana
  Clone ID: LIB3602-064-Q1-K6-H4
aaccccggtcgacccagcgtccggcgggacactagaaacagccttccagccgagctgcctgccctgctggcggcagctgccgagtgggcggacagccgctgggcccagctgtcggcgctggattcagccgacctctgctacaacctggcgcgcctggggcaccggcccggcagcgcctggatcggcagcgccactgagaggtgcctggagtgcatcgaggcaggcgcggtggagggcacgtatttcggcaacttcatttgggcctgcagcacctggggccaccagctacagcgcagcgagctggagcagctggtgccggctgcggtagacagcatggctgctgactgggaggagggaggccgcggcggcggcctgcgttttggcgacgcactgacccggcaggacttccgtgttggctccaaccagcccgctgccacagctgccctggagggccgtctgctgccgctggtgtgcgccgacatcgacctcattgccattgatcagctgcacc

SEQ ID NO: 7174 - DNA, 410 bp, Chlorella sorokiniana
  unsure (1)..(410): unsure at all n locations; Clone ID: LIB3602-064-Q1-K6-H5
tcggccaatgtgtgatccgggtgacggttgtggcgagcaggggaggtggagtcagacggccacaaggtcacgctgatggctgtgatggtcactcaattccccatgcgactgtcggtctatgccgagcaattctcagacgtggcggcgcacaaggtcagcagcagtggcggcggcggtggccagcggcgatgacgcgcctgtgggctgcaccaagtgattatgcacttttttcatgacgttgtcatcgtgaccaataacctatccattcacaatctgagctggaacaccgcaactgttgctgctcaagttacaatgaaatttccggaatccaaaanttatatttttttttttttttttttttttttttttttttttttttttttttttttttttttttttttttttttttt

SEQ ID NO: 7175 - DNA, 423 bp, Chlorella sorokiniana
  Clone ID: LIB3602-064-Q1-K6-H6
gcgcgtcaatcatttacagcaacactgtttgaatttgcctcatatcaaacaccaaaacatggctggcttgcaggatagcatgtgtgggcagcaacagataacaaagtcgacctttcgaccaagcaggggttgcaaaacaagtctttgaggcatgatgggcagcctggcaaacaccctgcataaaaaacatccgaagcaatggagccgtccagtccgggcggtccccaagcccaactgaacaaccaaatgagcccggctgcagcgttcgccgggtcgtggcaccgggactgttgcaatatgaggcacaggctgttcaataccagcgccgttgcttaacgcgctgcctgggctgccttgagctcgcgggacagcgcatttatctgcgggtggaaacccttttgcagctgggggcgcttgagctta

SEQ ID NO: 7176 - DNA, 358 bp, Chlorella sorokiniana
  Clone ID: LIB3602-064-Q1-K6-H7
gggtcgtggcgctgcgactggctatgacactgctgtggccctgcccgccgctggcgacgatgaggagtacctgaaggagaacatcaagtcggccggcgcaatgaagggccaggcagtgttctccattgccaaggtggatgctgccaccggcgagattgctggcgtgtttgagtctgtgcagccttccgacactgacctgggagccaaggcccccaaggacgtcaagatcactggcctctggtatgctcagctttcgtaagcgctgccagcgcccgtcgtttggagaagagaattacagctttgtcgctcgacctgtttgtcagacgtagaactgctcatgtaacataagcgcgcaggc

SEQ ID NO: 7177 - DNA, 588 bp, Chlorella sorokiniana
  unsure (1)..(588): unsure at all n locations; Clone ID: LIB3602-064-Q1-K6-H8
ctccgaactgctggtgtcgccctcagnagatggcaacttgtttgtgtgggactatgccaccgcaagcctggccgcggtcctggcgcccccagcagccgcgcagcccacgctcagcacagcaggcagcccaggcgaggcggcggcgctttctgctgcggcggcagcaacgtgcgttgcggctcacccgctgctgccggtgctggcaagcggtggctcagattcagtagtgcggctgtggtcgccagaggcagaggaagcggctagcatggagtttgcagcagctgcagcacaggccaacctgcagcgactggccgcagcgggcatgcagcctcccggcggcggcgggccgctgccggccgcttggcagggccggccgctggactgccgcgccatgtaagccaccacctgtacagcacttacaatcgcatgcagcctgcttgtatatgacgacccactttgcaggcgtgcaccattacctactttgtcactcagccaacctctcacttagccagcaatgacctttgggcaagcgcctttcaagacttgcgtgttctgcacatccttttcaagcttcccatgctgggcaac

SEQ ID NO: 7178 - DNA, 635 bp, Chlorella sorokiniana
  unsure (1)..(635): unsure at all n locations; Clone ID: LIB3602-065-Q1-K6-A10
tggcccttgggcgagctcggtgntcccgctcctgcgtcacccagcccatggcggcgatnttccaagacccgcaagggcccgtcgccgatgggcgtcttctacgctngaactcaacgagggctcctcatgcgggagctgggcgggngaggggctactctggtgtntgagggtccgcgtcacccccatgcgcacggaggtcatcattcgtgccacgcgcacgcagaatgtgctgggcgtcaagggccgccgcattcgcgagttgaccagtgtggtgcagaagcgcttcaagttcccggagggctctgtggagctgtacgccgagaaggttgccaaccgtggcttgtgcgccgtggcacaggcggagtccatgcgctacaagctgctgggcggcttggctgtgcgccgtgcctgctatggcgtgctgcgcttcgtgatggagagcggcgccaagggctgcgaggtgattgtgtctggcaagctgcgtgcgcagcgcgccaagagcatgaagttcaaggatgggtacatggtgtcgagcggcaaccccgtgcgggagtacatcgactcagccactcgccatgtgctgctgcgtcagggtgtgcttgggccttaaaggttcgcatcatgaaaggagtggg

SEQ ID NO: 7179 - DNA, 369 bp, Chlorella sorokiniana
  unsure (1)..(369): unsure at all n locations; Clone ID: LIB3602-065-Q1-K6-A11
gggctggttccgcaccatnatgcaccgggagccggtgattatctggtcgttcatcatcggcggcatcggcctggcgctgcccatcgtggtgccccccattcgggagcagatggggtacaacacccccgcccccaagacgccgccccccgtgcgccagctaatcgagcaggccaagcagtgaggcgttcaatgctggagggctggttcgggcagcagcagcaccaggctggcgggcagccaaatacaggcttgatgcctcgactggcgcccagcctgccgcatgctggccccatgccatgccgttgtgtacactgttagctgtccatgtgccgctgcaatctgcctagctgtaagcactgtcacgtnnaa

SEQ ID NO: 7180 - DNA, 553 bp, Chlorella sorokiniana
  unsure (1)..(553): unsure at all n locations; Clone ID: LIB3602-065-Q1-K6-A12
tggcgcggtggatgggcatttggttggggatggtgaacgtcccgaataccaatatggccttctgcatgggcatggagtgccgcatgcacaccatgcacaaggtcactcatttcatgaccggcnggcgtctctctacgcgcagggtcatgcggcgttacgaccgcatgcattcctggtatgtgggcgcagaccatgcccgtgttccacatgatggccanaaccaccaagaagattgtgctgcgtctggcctgcnccgtgtgcatggcccagcncatgcacgccatcaagcgctgcnngcacttcnagatcggcggcgacaagaaggtcaaggggctatacttgtttaaaaaaatgatatcggcctgctgttagcatgacctnaaaatggatgcagcgtcgccctctcaccctgggcggcctgctccccgcccggcncctcgctttggccgcctctggccactcgtncgcctccttgttcttgcccttttgctttcttagctgccccaaccttgcatgcaagcatcctggccgtctgtgttggccattgagtttt

SEQ ID NO: 7181 - DNA, 531 bp, Chlorella sorokiniana
  unsure (1)..(531): unsure at all n locations; Clone ID: LIB3602-065-Q1-K6-A2
ccggtgtcgacccacgccgtccgtcttagcgggcattcatcgggctttcagtctgctacctgccgctgttgngaggagaagcccattgtgntctgaggagaacaagggcacgccggtgctgatgtgccacggcgactgcgaccaggtggtcaacttcgactttggcaagcgcagctacgaggagctgaagaaggcgggcgtgaatgtcgacttcaagacgtaccaatacatgggccacgaggcgtgcggcgaggagctgatggagatgcgcgactttcttaagtcatgcttctcagcggcagccggcaagctgtgagagccagactgcagcactgttaagattaaggttccctgccatgcgtgccaaggcgtgtggcacatgcgcatgatgcctcctcgagaggagccacccgtgagtgctgatctggcccccacatcttctgtaccacctccgcactgtgtcttcttttgacattacctttgtacaatacaacaagccnnnnnnnnnnnnnnnnnnnnnnnnnnnnnnna

SEQ ID NO: 7182 - DNA, 454 bp, Chlorella sorokiniana
  unsure (1)..(454): unsure at all n locations; Clone ID: LIB3602-065-Q1-K6-A3
cccacgcgtttcttctgcagcctggnagcggcgngtgtcacgctagaagcagggagggggcggcaagcgccaagnntcggtgggagggtggtgcgagggtggcagacccggctcgnatgggcactttggctgtgnnctccgcctgggnagnncggcgcagggcagccccagnggctgcggnnggcagccatttgcttgtgttggnagaagtgtgcgatnngcggtgtcgtgctagcggtgtgtcgccgctggncnnggccagnacctgnngtggccccgcgcccagctttgggggccattgatnggatggaggactggagccatgcgggnagccagaaccatgctgagccgtgggccatgttggttggacttttgcaagccccttggctacccnnctctgtgagnnttcgcaccttgacctgggctcacacccgtntnngtgtaacccagatgg

SEQ ID NO: 7183 - DNA, 460 bp, Chlorella sorokiniana
  unsure (1)..(460): unsure at all n locations; Clone ID: LIB3602-065-Q1-K6-A4
ctgcgctggnaggcgtttgagccggtgctgctgctgggcaagcagcgcttctccaacgtggacatccgcatccgcgtcaagggcggcggccaggtgtcccagatctacgccatccgccaggccatctccaagggcattgtggccttctaccagaagtacgtggatgagcagagcaagaacgagatcaaggacatcctgctgacctacgaccgcacgctgctggtggccgaccctcgccgctgcgagcccaagaagttcggtggccacggtgcccgcgcgcggtttcagaaatcttacaggtgaaggctgccccgtgggacggttgggcgcctctggaggcttcttctgcgccgctggcgtggcggcagcggcgtctgcggcctaggcagctgccctggagcagcatgccctcagcgaaagcaccatgagtacaccttgcgtgtgtaacaaaacgccacac

SEQ ID NO: 7184 - DNA, 291 bp, Chlorella sorokiniana
  unsure (1)..(291): unsure at all n locations; Clone ID: LIB3602-065-Q1-K6-A6
gggggggggggggggggtttaaaaataaaaaaaaatagggaacccgggcttccttttttctgggtttccttttttactttcctcttccttgcttgcgtctttctcttttttttcccgcttcctttttttttttttttctcctcttttctttccttctttgtgggtttgtctgggccctgccttttcccccccttctttcttcttttnccccttgccccctttctccctcttgtcgtttttggcgttctcgccccttccccctttgcccttcccttcggttccccccctctc

SEQ ID NO: 7185 - DNA, 611 bp, Chlorella sorokiniana
  unsure (1)..(611): unsure at all n locations; Clone ID: LIB3602-065-Q1-K6-A7
cccacgcgttctgttggcgcggtggagtgggcaattcgttcgcgatggtgaacgtcccgaagaccaagaaggccttctgcaagggcaaggagtgccgcaagcacaccatgcacaaggtcactcagtacaagaccggcaaggcgtcgctctacgcgcagggcatgcggcgttacgaccgcaagcagtccggctgtggtggccagaccaagcccgtgttccacaagaaggccaagaccaccaagaagattgtgctgcgtctggcctgcaccgtgtgcaaggcccagcacatgcacgccatcaagcgctgcaagcacttcgagatcggcggcgacaagaaggtcaaggggctatactagtaaaaaaaaagagagcggctggcggagagcatgaccgagaaatggaggcagcggcgcccgctcaccctgggcggcctgctccccgcccggcgcctcgctttggccgcctctggccactcgtacgcctccttgtccatgcccttgtgctttcctgagctgcccaacctggcatgcaaacaccctggccctttgttatgccattggcgtgtgaaaatttgtttttttttttttttggttttnntttttttttttttt

SEQ ID NO: 7186 - DNA, 218 bp, Chlorella sorokiniana
  Clone ID: LIB3602-065-Q1-K6-A8
ggcgggccggtcgggcggcagcgtgcgaggcggcggcacgctgctgctggctggattcgtgcgactgcttcgaaccttccttgctcccctcgcttgctgccaagcagcggacgcacgcgttttcttgccaactgaggtcccacatgtatgttgcacttgctgtactgcccatctgatctgttgccccagtccctgctctgttgtaagctatgcttgct

SEQ ID NO: 7187 - DNA, 589 bp, Chlorella sorokiniana
  unsure (1)..(589): unsure at all n locations; Clone ID: LIB3602-065-Q1-K6-A9
ggccagcaagcgggtgagccttctgtgggngaagcacagccagcatgttggngcgcaagctggcggctgggaggaaaaccagcgcattgggtattgggtaccataccagcagtgctggtggagcatgggttgcctgagcaagcagggggcgttggcacagcattgtggcagccctcctgacccccacacctctccctgccctcttcaccgctgttgcagggagatcactcactgatgctgctgggacccgtgctgtttgtcgtgtttgacgtctttctgctcatctcggtggcagccctggccattgcacaggccagccaagtggcgcgcaacgtgaccaccaacgagctggccaactggcacaggtacaagtacatgcacggcccagacggcgacttccacaacccctttgaccgcggctggcgccgcaactgcttcgacacgtgcaagccgaccgcggcaccctcgttggccttcgtgctgcggggtgacgaggcgagtgagacgatggcgctgcttgccatggagcagggtggatgaccagattgctgtcggttgcgcatagtgccgtgtaacgtagcacgccagc

SEQ ID NO: 7188 - DNA, 160 bp, Chlorella sorokiniana
  Clone ID: LIB3602-065-Q1-K6-B1
cccatttctccccccgtcttttaaactgcctggtagcctgttcgcctcgtttcattccctgcagcccaacgcccgcggcgggcctggcacctcccggcctgccccgccattttatctcttttcaaagccagcccgcaagccaatgtgtgagccaacgcac

SEQ ID NO: 7189 - DNA, 474 bp, Chlorella sorokiniana
  unsure (1)..(474): unsure at all n locations; Clone ID: LIB3602-065-Q1-K6-B10
caggccatcctgctgctggacgtgacccccctgtctctgggcattgagacgctgggcggcgtcatgaccaagctgatcggccgcaacaccaccatccccaccaagaagtcccaggtcttctccaccgccgccgacaaccagacgcaggtgggcatcaaggtgttccagggcgagcgcgagatggcggccgacaacaacatgctgggccagttcgacctggtgggcatcccgcccgccccccgcggcgtgccccagatcgaggtcacctttgacattgacgccaatggcattgtgcacgtgagcgccaaggacaaggcgaccaacaagcagcagtccatcaccatccagtccagcggcggcctgagcgacacccagatcgagaagatggtcaaggacgcggagcagtacgcggccanagacgcgcagcgcaaggcggcgatagaggccaagaacgaggccgactccctcatctac

SEQ ID NO: 7190 - DNA, 494 bp, Chlorella sorokiniana
  Clone ID: LIB3602-065-Q1-K6-B11
cgctgatccgcttcgcgccagcttgcagcttctgtcccgccctcttagccccgccagagcgaaaccatgctggccctgcagacttctcgcatcgcggcgcctgccaaggtgcaggtgacccggcggcagcaggtggtcgtgtgcgcgaccgcgcagcagcaggaggcggcggaggcggtgccccggcgtgcggcgattggcctgctggccgctgccgtgctgggcctgagcgcggacgctgcccaggctgtgggcgttgccaagaacggatcccgcgccggctccgagggctacgtgctggagggcaccaagaagcagggcatcagccccaagcgcaagcgggccgtgctggacaaggtgcgcaaggccgccggcaagcagtgagcctcgctcgcaactcacgagcgctgagcttccgtcccggctgcgccactgttccggcgaggcacgcgcagcggcaccctcccttgcggccctgccctgccctgaatgtg

SEQ ID NO: 7191 - DNA, 533 bp, Chlorella sorokiniana
  unsure (1)..(533): unsure at all n locations; Clone ID: LIB3602-065-Q1-K6-B2
gccatgctggnacaaggnnatgccattgctgctgtcaagggtgtnngaagcaggccgacccgtnnctgccgccgagttcttgaccttcacctggnngacggctccgaggggctccttcagcaccncaggccgaggccaagggccgccttcctgngacgcgctngaagaaggcggatgtgatcatcgacgagacgtacgctgagaaccccaccacctacgactcggccgcactgctcaaggagtggggcctgaccgaggcggaggccgccgccctgcccgcctgggccaacaagaaggtgttccgccccgacggcctgctgtcgctgcagcgcacgcccgacttcaccgacccctccaagaccgtggacacctacggctccgactggtttgagggcgccatcgcccgccccggcaaggtgctcaaggacatcntgcgcgcggtgcagggccagggccagggcttcacctgggtgcgcaacctgttcaccgagcagccgatggtgaccgaccgcaagtcgtgcaacgcaacgcaa

SEQ ID NO: 7192 - DNA, 111 bp, Chlorella sorokiniana
  Clone ID: LIB3602-065-Q1-K6-B4
ccggtgtcgacccacgccgtccgtaaaaaaaaaaaaaaaaaaaaaaaaaaaaaaaaaaaaaaaagaaaaaaaaaaaataaaagaaaaaaaaataacaaaaaaaaaaaatag

SEQ ID NO: 7193 - DNA, 504 bp, Chlorella sorokiniana
  Clone ID: LIB3602-065-Q1-K6-B5
ctggccgagctgcaggtgccctacgaggacgagggctcctttgtggtggtgcgccatgccgccctcatgacctccaccctgctgtccaaggtgctggccgcccccaacatcaagctgttcaacgccaccgccgccgaggacctggtggtgaagcaggacgagaagaacggcaagtacgtggcgggtgcagtgaccaactggacgctggtgtctctcaaccacgacacccagatgtgcatggaccccaatgtgatcgagtccaaggtcatgatctcctcctgcggccacgacggccccatgggcgccgccggcgtgaagcgcctcatgcgcctgggcatggtggagaaggtgccgggcatgggcgcccttgatatgaacaccgccgaggactctgtggtggaccgcacccgcgaggtggtgcccggcatggtcatctgcggtatggaggtggctgagctggacggctgcccccgcatgggccccaccttttgcgctatgtacatg

SEQ ID NO: 7194 - DNA, 477 bp, Chlorella sorokiniana
  Clone ID: LIB3602-065-Q1-K6-B6
gcgttcggtcgcaggcgacggcgtcaagtcgtcatcatccccggcattgtgggcataatcctgggcctggggctgggcatgctcatcttctacaccggccgcaccatcaagagcctcaagtggttcttcatcatctcctgcggcctgctgctcatcattgctgccggactggtggcccagggcggggggttcttcacctccgccggtctatttggcaccaccttcccctacgagtaccgcccctggtacaacaccatcctgtggaacacctcgggctgctgcgacatgtacaacaaccaattctggtccatgatgcgcgcgctgtttggctacacggaccagcccacgggcctcaacctgatgtactacctgctgtactgggctattgtgctgagcatcacgatctggaaggggtacaccggcgcccttaccgaccgccgccaggcccagattgacgacctcaaatcgtttgcggtc

SEQ ID NO: 7195 - DNA, 546 bp, Chlorella sorokiniana
  unsure (1)..(546): unsure at all n locations; Clone ID: LIB3602-065-Q1-K6-B7
gcctactacgctccgttttccccgtctgcttgcgctcctgttcccccgaacagcatccagctcaaacgaacgaatccccatggcactgccatatctccccccatctcacctggttgcaagcagccgcggcgcgcggcgcggctggctccccacccccgcctgccgcccgcccccagcccctacccatgctactacggctgctgcacgcactactggggcgccacccctgtcaccccttcacttggcgccccgccccccccatttgtcctcgcccttcaatcctcaagaccctagcccaccctgtcttgctgcactgcttacttactaatcgatctctaagggggccagggcctcatgccgcagcgctcaaacctccccagctgcctccctgccccacgtctctaagggtgtaactaagcgtttacaaaannntntgtttttttgtttttttttgttttgttttttttttttttttttttttttttttattttttttttttttttttttttttggtttttttattttttttaaaaaaaaaggggggg

SEQ ID NO: 7196 - DNA, 418 bp, Chlorella sorokiniana
  unsure (1)..(418): unsure at all n locations; Clone ID: LIB3602-065-Q1-K6-B8
ttgctgggcttcttcgtgcaggccatcgtgaccggcagggccccctggacaaccttctgcagcatttggaggagcccggggagttcaacttctacgccctgtacgccaactccctggcgtaagcagcttgtttggagcacctgcggcggccgaggcggcggcgctgagctggcgcaaagcgcggttggcgaccgccgccgcctcacgctgttgcccttgaccctcttccctttacgcgcttgcatgcgttcccgactccgctgcatgttgcctgtgtgtgcaattgtgcatcaggcaaaagaaacgagaagaaaactccacccaaacaccattttgcctgttgtaccatcctgtacgaaaaggaggctgtagtggtgtaaaaacatcaaaaccnnnnnnaannnnnnnnnnnnnaana

SEQ ID NO: 7197 - DNA, 485 bp, Chlorella sorokiniana
  Clone ID: LIB3602-065-Q1-K6-B9
tcggcttcgctccctggacacccctgagccaccatgcagaccgtcgccgcccgcaccggcgtggccgcctctggcgccacccgccgcgtgacctccatgcgccgcaccgtgaaggccaagcccgtcaagtccgacagcgtgtggtacggcccggaccgccccaagttcctgggccccttggtgcgatggcctggtgcccgcctacctgaccggtgagttccccggcgactacggctgggacacctctggcctgtccgccgaccccgagaccttcaagaagtaccgcaccatcgaggtcatccacgcccgctgggccatgcttggcgccctgggctgcatcttccccgaggtgctggagaagtacagcggcgtgcatttcggcgaggccgtgtggttcaaggctggcgcccaaatctttgctgacggcgggctgaactacctgggcaactcccgcctggtgcacgcccagtccatcgtggccaccc

SEQ ID NO: 7198 - DNA, 253 bp, Chlorella sorokiniana
  unsure (1)..(253): unsure at all n locations; Clone ID: LIB3602-065-Q1-K6-C1
cccggtgtcgacccacgccgtccgggnacgtcacacccttccttcctnagtaccctnnttcagcatgatccaacnnaaacgaaagccctcacccatttctccccccgntcttttaaactgcctggtagcctgttcgncctcgtttcattccctgcagcccaacgcccgcggcgggcctggcacctcccggcctgccccgccattttatctcttttcaaagccagcccgcaagccaatgtgtgagccaacgcac

SEQ ID NO: 7199 - DNA, 624 bp, Chlorella sorokiniana
  unsure (1)..(624): unsure at all n locations; Clone ID: LIB3602-065-Q1-K6-C3
aaaaaaaaaaaaaaaaaaatcccggggggaggggggggggggaaaaaaaaaaaaaaaaaaaggagaganaaaaaaaaaaaaaaanaaaaaaaaaagaaaaaaaaaaaaaaaaaanaaaaaaaaaaaaaaaaaagggcccccccccttttgggggttcccctttttcctccccnctcccttcccctcttttttttttttttttgtggggccccccttntttcctttcccctcccccctccttttccccccttccttcccttggaaccccccttcctttcccccccttttttcccctttccccccctcccccttttccccccttgcttttttcccccggtgcccccccccttccccctttccccccttttcccccccctttttcccctttttccccccccctttccccccccttttcccccccttttttttctctttccccccttttgcccccctcccttccccccccccttccccccccccctttcccttctcttccccctcccttttccccccctttccccccttttcccccttcctcttttttttctgcgcctccttttttttttccttttttntttctttccccccccccccccccccccctcccttttttatttttttttt

SEQ ID NO: 7200 - DNA, 571 bp, Chlorella sorokiniana
  Clone ID: LIB3602-065-Q1-K6-C4
gttggaggcaccggtacagcggcaccatggctctcaccaagtgctcaagtcctcggcgtacttctcgcgctaccaggtcaagtacaagcggcggcgggccggcaagaccgactaccgcgcgcgcctgcggctgtccacccaggacaagaacaagtacaacacgcccaagtaccggctggtggtccgcttcaccaaccgcaatgtggtgtgccagatcgcctacgccaccatggccggcgacaaggtcatctgcgctgcctacagctccgagctgccccgctacggcctgaaggttggtctcaccaactacgccgccgcgtactgcaccggcctgctgctggcgcgccgcgtgctggccaagctgggcctggacaagcactacgagggcaacaccgaggatgtgggtgaggactacaacgtggaggcggccgacgacgccccccgccccttccagtgcatcctgaacgcgggcctgaagcgcacctccaccggctccaaagtgtttgccgcgctcaagggcgcgctggaccgcggcctggacatcccccaccatgagaaacgctttgtgggc

SEQ ID NO: 7201 - DNA, 606 bp, Chlorella sorokiniana
  Clone ID: LIB3602-065-Q1-K6-C5
gtcaatatgaggtgatcgcgctgttcagcagcccagccgtctttgcctccccacccttgtatgcacgctcctctttcacaggcctggtgctggagcgcaacgaggcgagtgcacggccaactgtgcctcgagttgctcaccaaccctgatctgcatggatgtgctgcccccactccactcctttcaggcctggtgctagaacgcaacgcggtgatcgctgacccacactgtccaaagcatttacgctctttatggtgttccactgatgtccaggcctggtgctggagcgcaacgaggtgatcgcgctgttcaacacgctggagcggctggcggcgggcgtggaggtggtgcgggacctctccctgcagctcagcggcaacggcggcgcacacccgggcggcttgggcgcgatccaggacgtcacacagggccagccgctaccagaaaagctgaggaagcaggcatgacgccacagctgaccaaactttgcacagcagcaacctcgcgtgcccccggcaccgctgcgttcgagctgccttttgacttgctttgttttctgccctgtgtgcttgcgcctgctccctgcaattcctgctctgctgcttc

SEQ ID NO: 7202 - DNA, 385 bp, Chlorella sorokiniana
  unsure (1)..(385): unsure at all n locations; Clone ID: LIB3602-065-Q1-K6-C6
cggctggaggagacgtgggggggggggggggccgcccgagtccgggggctcggagactcactcccgcctggcgctgtgtgagtcggccgtcacgctgggctcngacccgctcagacctgcctccgcnggccccctgtgatgagggggggggtgccccccggcgcngtcgggttcgtgtctacgcctgctgcccgaccggcgtgcccactcccggcncncgtggcctgggtccgctgcggcggctgcccggtgtccggctgccgtcccgccccgttactctgcttgtgtccgctgttgcggcgctctggctgcgtcccggcgctgtctggctgggctgcccctgtttnnttcgaggacggtcttttggttttgtgtttttgttttg

SEQ ID NO: 7203 - DNA, 383 bp, Chlorella sorokiniana
  unsure (1)..(383): unsure at all n locations; Clone ID: LIB3602-065-Q1-K6-C7
gccgcgccttcggcggccgctccacgccaaggctcggtgacccctgagcaccacgccaaggcggcgggcggcatcatccgccacgcactgcagcagctggaggcgatgggcctggtggagaagaaccccgcggcccagggcggccgccgcatcactcccgagggccagcgccagatggacctggtggcgggcggcgtgaccgtgacccgcttccactacctgggctgagcagcgcgccgctggcgggccgccgcacagccgcagcgcgcgggctgagcgcggcgccgccgcatgcgccgcggccgtcccccgccggcacgcatgccctcatgtgttggcagccgcaggacgtgtaagaggacttcgcgannaanaaannnnna

SEQ ID NO: 7204 - DNA, 477 bp, Chlorella sorokiniana
  Clone ID: LIB3602-065-Q1-K6-C8
tacattttatgtgctgaaccctgtgtttcttgatcctgacactggcatttcttgccgtgctttggccgtggctgctgctcagcactgacgaccttccgcaccggcttaaattttgtgttgcattctgtttattgctggcggctgccttgcgctttggcctatactcgtgcccaatgcatggttgcactatatctttctgcctctggatcttatggtaattacatgggtgggtccatctaaaatacgggttcccagctcaacatggccgacatgtttacctacaagggagtggcgcgcctgctgggcaaccgtatcgcggtcctaaccttctgggcccactactgcgaattcaacctgtttgtatggtcgctgctaggtgctgtatgctgaacagcgtttcacaccccagctgttgataataccacgcctgttctgaacaaagatggctggtacaactggcctgctgctctatctggc

SEQ ID NO: 7205 - DNA, 599 bp, Chlorella sorokiniana
  Clone ID: LIB3602-065-Q1-K6-C9
gtcgacccagcgttcgccgcattgttgctctgcttgtatcacaatttgctgctgaacccccatgcctacagtacgcctgctgcaagtcgtgtgctcctgcatctttcaatgtgttgccaaccctttgcatcctggccatgctttccgacaagcgcagaaggaccgcgtgctgggtggcacagcgtgcgcctggggcgagtacatcgacgcagtcaactccatcaaccgcatctggtgagcggctttgtttgttgtgtgtgtcggatcgtgctgttcctagcctgtgtggcctatgccgccgtgcaccctgtcctttactcccatgcaggccacgtgcggcggcggttgctgagaggctgtggtccaaggacgccactgatgtggacacagcggcggaccggctggctgacctgcgctgccgcatgctgtcgcgtggcattgccgcccagtccatggggcccggtttctgccccggagagctgaccacgcgcatgtgagacggcacgccgcgaacatgccggttgtgccagcatgcagtgcccattccgctgattgtgttgctgagttgaagtgagtgagcgctgtaataagcctgaggc

SEQ ID NO: 7206 - DNA, 648 bp, Chlorella sorokiniana
  unsure (1)..(648): unsure at all n locations; Clone ID: LIB3602-065-Q1-K6-D10
ggcgggaacacagtcggtcgtgaaaacgcgcctccccacaatggccggcgagcgtgtgcggctctacgtcacgggccagttcctgggctacaagaggagcaaggccaaccagtacaaccacaccgcgctggtgaaggttgagggcgtgaacagcaaggaggagaccgagttctacctcggcaagcgcctggcgtacgtgtacaaggcgaagaccgagaagaagggcagcaagtaccgcgtgatctggggcaaggtgacccgcgcccacggcagcgtcggcaccatccgggccaagttccagaagaacctgccccctgcggccatcggcagcaagatccgcgtgatgctgtacccctcccgcgtgtgagggtcggttgcttcccggagcancaacggtgcggcacggcgcggcggtgacgagtcgtggcagtgcgaccccgctcggcacgggcgcccgggtggcgccgccgtcggcttcatgtaacccttgatttagcaaaattngtgtttttttttttttatttttttttttttttgtttttttgtttttttatttttttttgttttttttttttttttttttntttttttttctttttnttttttttttttttttttaataaagaaaaaaaaaaaaagagggggggg

SEQ ID NO: 7207 - DNA, 470 bp, Chlorella sorokiniana
  unsure (1)..(470): unsure at all n locations; Clone ID: LIB3602-065-Q1-K6-D11
gggccagcattggctcgggagctggccgcggccggcatccgcgccacgctcattgccgactcggctgtgtttgccatgatggcgcgtgtgaacaaggtggtggccacggcgcaggcgctgcttgcgaatggcggcgtcatggcgcccgtgggcatgcacatcgcggccatggcagccaagcgccactcggtgccgtttgtggtgctgtgcggcatttacaagctgtcgacgctcttcccgcacaacccagccgtcaacttcaacgacttcaaggaccccgaggacgtgctgccgctgacgcacgaggcggtgggcattccgcgccgcatcgcggaggagacggtggcgcgcatgcaggccgagggcgatgagtcctggaaactgggcctgcccgcctcgctgccgcagctgacgatcgtcaacccctcctacgactatgtgccgnccgagctgatcagcctgtttgtcac

SEQ ID NO: 7208 - DNA, 490 bp, Chlorella sorokiniana
  Clone ID: LIB3602-065-Q1-K6-D12
ggcggtggggcgcgcgctgggcgccctgagcgcagtatgatccgcttcgtgctgctgctcagccggcagggcaaggtgcggctggccaagtggtacaccacgctcagccagaaggaccgggccaagatcacaaaggaggtgaccaacgtggtgctggcccgccccgccaagctgtgcaactttgtggactggaaggaccagaagattgtgtacaagcggtacgcctccctgtacttcatcgccggcattgaccaggacgacaacgagttgctgacgctggaaatcatccaccagtttgtggagatcctggacaagtactttggcaacgtgtgcgagctggacctcatcttcaacttccacaaggcctacttcatcctggacgaactgctgctggcgggggagatgcaggagaccagcaaaaaagcggtgagcccagtgattgaagcacaaaatgcgctggtggagcaagtcaaagcgggcaacatcagcg

SEQ ID NO: 7209 - DNA, 421 bp, Chlorella sorokiniana
  unsure (1)..(421): unsure at all n locations; Clone ID: LIB3602-065-Q1-K6-D2
cggngnatgaagcgcggctgcgngaagtgtactacggcctgggcggcgcccccaaccagaagatgggcagcaactactttctgtggatcatcctgggcatctccctgctggccgtgctgtccaagctgacgggcgccctctgagtgcggcagtcaccgttcaaccacactagccaggcgcagcactggggcacagctgcggccggtgcgatgcctccccgttggcgctgcccacttcaacctgcgagcacgattccctttctaagcgacaacaattttggcttttcttaatccctatctgacacttgatgcaagcaccccttttctacgaccccgcctgcgattgccggcctggtgcctccttttgtgtgctnagttcaccatgccaacgctatcagctcgatgataacatttaccctgcc

SEQ ID NO: 7210 - DNA, 386 bp, Chlorella sorokiniana
  unsure (1)..(386): unsure at all n locations; Clone ID: LIB3602-065-Q1-K6-D3
tcgggcctggnccccgcgtcccgccagctgctgtgggacgtgatcaagcgggcgcggcggcagcgcgctgtggtcctgaccacgcacagcatggaggaggcggaggcgctgtgcgacaggctgggcatctttgtgggcgggcgcctgcagtgcgtgggcaaccccaaggaccttgtgggtggggggggcggctacctgtccttcacaatcaccaccagccccgggcaggaggcgaaggcggcagccatcgtgcgcagcctgtcgccctctgcgcgcctggtgtgcgctcttggcggcgcacaaaagtaccagctgtcagttgaggaggcggccattggtgcaatatttgctctcatggnggccgtgtaagccccccaggaggtcga

SEQ ID NO: 7211 - DNA, 499 bp, Chlorella sorokiniana
  unsure (1)..(499): unsure at all n locations; Clone ID: LIB3602-065-Q1-K6-D4
cccggtcgacccagcgtccggttcatccagtccaagcgcctgcgcaacaagattgccggcttcaccactcacctgatgaagcggatccagcgcggccccgtgcgcggcatctccctcaagctgcaggaggaggagcgcgagcgccgcatggacttcatccccgacgagtcggccatcaacaccgaggccattgaggtggacaaggacaccatggacatgctgcgcggcatgaacatggcgggcctgccgggcgtgtccgtccagcaggtgggccgcggcgacttccagaagcccggcggcttccagcagcgccctccccgccagtgagcgtaccccnagaggagcggcgtggcgcggcggcggcagcccacccgcggcagcagcagcacaccagcggcagcccaccacagcggcgatgcgcggccgggcggacccgtagcaccatgacgcccggccagctgcagccgccgccgcgcctgctggaaccaacctttccgcg

SEQ ID NO: 7212 - DNA, 394 bp, Chlorella sorokiniana
  unsure (1)..(394): unsure at all n locations; Clone ID: LIB3602-065-Q1-K6-D5
gcaggtgcccatccgcacgctcgtagtcaaccaggtgctgccacacggcctgcaagacaagtatctgcagacgcggcgcgccgaccagcagcgggcgctcgagcggctgcgggccgatccggagctggggcagctgcagctgattgaggcgccgctgttcgatctggaagtgcgcggcgtgccagcgctgacctactttggccagcangtgtggcggtagctggcggcatggcatgctgaagtccaatgcattgagggcgctgttgcaaccacacatttcatttccctgtcagtctcgtgagaccacctantatcttgtaacaaatgcaatccttnnnnnnntntntnntttnttttttttttttttttttttttttttttttttttttttttt

SEQ ID NO: 7213 - DNA, 408 bp, Chlorella sorokiniana
  unsure (1)..(408): unsure at all n locations; Clone ID: LIB3602-065-Q1-K6-D6
gnctccgcggncgcgtgggctttgcgcagttgctaaggaggagacagaggtgactcctctggtgcgcgtgaagagcatcaanaagcgcaccaagcgcttccagcgccaccagagcgaccgtaggatcacggtcaaggagagctggcgccggcccaaggtattgactcgcgtgtgcgccggaagttcaagggatgcggcatcatcatgcccaacattggctaccgcaccaacaagaagacccgccacgtgctgcccaacgggttcctcaagtttgtggggaacaacgtgaaggaccttgagctgctggtgatgcacaacccgaagtactgggccgagatcgcgcacaacgtgggcaccctcaagcgcaaagcgattgtggagcgcgccgcgggaggtgaacattggcct

SEQ ID NO: 7214 - DNA, 283 bp, Chlorella sorokiniana; identical to SEQ ID NO: 5333
  Clone ID: LIB3602-065-Q1-K6-D7

SEQ ID NO: 7215 - DNA, 472 bp, Chlorella sorokiniana
  unsure (1)..(472): unsure at all n locations; Clone ID: LIB3602-065-Q1-K6-D9
cccagcgtccgcccacgcgtccgcgggcgcgtgggcgctgtgtcagaggggctggacggcatggaggaagcgctgtttgaggagatgggcgttgacagcgacaagaccgtgggcgccgactttgagggggccaaggcgctgctgcagcctcccaacaatctgccgcggtagggtggggagcgtgtaccaagcagcagcctgcancaagcagccagggcggccttcatcancacgcggcggtgcccttgttctgcagctgcccaacaagcttccaccgccgtacggtgacctgactactacactgcactgcttcgctagcangcagatgccctactctcacaccgatgtatctgcatgacatgactccctttttcgctcacaccttttcctgctctatgtttccacagcctcccaattttcttctgcctgttctcgctcctgcccacaccgtgctttnagcagcgatgcttgg

SEQ ID NO: 7216 - DNA, 262 bp, Chlorella sorokiniana
  Clone ID: LIB3602-065-Q1-K6-E1
aaaaaaaaaaaaaaaaaaaaaaaaaaaaaagaaaggaaagatataaaaaaaaaaaaaataaagaacaaaatacataaaaaaaaaataaactaataatataaagaaaaccaaaagggcgggcccgttttcgggggcccccgctttttcgttccctgtgcttttctctgtgctttcctcttttttggggtccggtggggggggtgtccccttgccctctgtttttcctccttcctttcttgggccgccccggtgcgtccccccc

SEQ ID NO: 7217 - DNA, 517 bp, Chlorella sorokiniana
  unsure (1)..(517): unsure at all n locations; Clone ID: LIB3602-065-Q1-K6-E10
tatcggcttctttgcaaccatggcggnnagtgcgtgccagaactttttcggcccgcaagaaagaaatgnncggtggnnctgtggcccctactgtgaagcnnngcggcaagggggcgagaatcncnngcctcaacgngnncgcccnncgctggnagnnctggnnngcagcccgnagaacccgctgcnngctggnaaggcnnngtttgagnnccggtgcttttgctgctggggcaaggcagcggctttcnntccaacgtggnaccactccgcatcncnngcgtcaagggggcggnncggccagngnntgtcccagnaatctacccgccatccnngccaggccanntctccaagggcacttgnntggcctnntctaccagnnaagtaccgtggnattgagncccagagcaagaaaccgatgaatcaagggacatncnnctgctgacnnctacgacnncgcacgcnntgctgnngtggccgacccctttcgccgctttgcgagnccccaagaaaaagttcg

SEQ ID NO: 7218 - DNA, 412 bp, Chlorella sorokiniana
  Clone ID: LIB3602-065-Q1-K6-E11
ctgcttttcaacccgtcccctcgtcccattgcattgtctggaacgctgctcatggaggcccgttccggctctctgcattctctgtatgcatgtcttctcttgtccacgcatgaccttgtgcctttgtgtccatgtgccaccgctccatgcaccctacacctacccctaccgtgtctctcctgcctttcaacgcaccgcctcgtgttcgctccggcgtctgtctgtgccgtgttgtagccagttgcagctcacgcatgcgcttgaattcatttttttgcccccaccagcctgcatgcgtgccgcttcacagtgcatgcccgtctgtcgtgcagctaaattatccacgactcctgacgcgccccccattccttgccttcaaatgtgctctgacgcatgtgactcgcacagctaa

SEQ ID NO: 7219 - DNA, 465 bp, Chlorella sorokiniana
  Clone ID: LIB3602-065-Q1-K6-E12
ccacgcgttcttataaaaaaaaaaaaaaaaaaaaagaggggggggggggaggggaggaaaaaaaaaaaaaaaaaaagggaaaaaaaacaacacccattcaaaaataaaaaattataagtttcccctccatttcaaatccaatggcatcttggtcgtgccccccttccttcttttgttttttcttttttttccctctcccttcccttttgtggggtgggggtgggttgtgctctcctccccttctttttttctctctcccctcgcgtttccgcccccttccttgtggggctaccccctcttttgcccccccctttttccccttctgccccccccccctttttcctcttgtctatcgcccccggtgccgtgccccccacgctcctccccccttgcgctgtgccctccccttcctcttctgttggtttccttttctttccctttctttcccccccttttgggtgggtt

SEQ ID NO: 7220 - DNA, 623 bp, Chlorella sorokiniana
  unsure (1)..(623): unsure at all n locations; Clone ID: LIB3602-065-Q1-K6-E2
gcggccgcccgtttgtggtgggagaccggatccagctgctgcgtggcggctcgcctgtggtggagggagtggtggaggctgtcgaccctgttcgcaccaccatcattgacgacgagcgcaacccaatctacatgagcaacacggacgtgacggcctgcgtgatccgcaacctcacccaggggggggcccgccgccaggccgcctgagcggcagtcatccttgcgccgaccgaagcacgtgacggcatcggatgcatcgtgatgccggcgtggcgctgatgagcagctgcacactggcagcctcataccaccacgagcggttcataccaatggaataaacatccacaaactgggcacccagtggcctgtgaacgggcattgctcaattttgaccactccgccctctgctgacttgacttccactttgattttgcgtcccaaggttgtcttgtgtgaattcgatgcgttnnnnttttttttttttttttttttttttttttttttttttttttttttttcttttttttgttttcttttnttttttttcttctttctttcttgtntttttttttttttttttgttgtttctttttctcttttttttgggtctttnttttttttctt

SEQ ID NO: 7221 - DNA, 595 bp, Chlorella sorokiniana
  Clone ID: LIB3602-065-Q1-K6-E3
cctggacgcaatggtgcagggcggctacaagtaccaccagtaccaggtggtgggccgccatgtgcccaccgagaaggagccggagcccaccatctaccgcatgaagctgtgggccaccgacgccgtgcgcgccaagtccaagttctggtacttcctgcgcaagctgcgcaaggtgaagaaggccaacggccagatcctggccatcaacgagatctttgagcgcaaccccaccaccgtgaagaactacggcatctgggtgcgctaccagtctcgtaccggctaccacaacgcctacaaggagtaccgcaacaccaccctgaacggcgctgtggagcagatgtaccaggagatgggcagccgccaccgcgtgcgctccccctgcatccagatcatcaagaccgccacgctcacggcgtcccagtgcaagcgcgcggccacgcagcagctgcacgacagcaagatcagcttcccgctggcgcgcaaggtgctgcgcccctcggcccgcaagttccgcaccaccttcaaggcggtgcgccccaacgtgggcatctactgagcgccttgccccaaggcgggtcgcggccacacttggcgg

SEQ ID NO: 7222 - DNA, 401 bp, Chlorella sorokiniana
  Clone ID: LIB3602-065-Q1-K6-E4
ccctgtcttttcctcgcccgcctttcaaatgcattcaagctcggtactcggccaacttgaacttactccaaaccgcactcctgttagcccttcccctccacgaccttgcggcgcagccgcctgtgtgtgcttcccactcgcaggcctgccgccccgcacccatccataattttttgcccggcccctttggtttctctgcccatcgccgccggatgcggcgtcccccagatcgctcgtctctctcttcctacctcctgcatgctgcagcaagctatacatggccgttcagccaccgcatccccccttttttgcccccctagtgtccttcgtcccctcgcgtgcgtcttactaccgatacctgctgtaccaacaaaacccagccatgtaactgaccgagtgca

SEQ ID NO: 7223 - DNA, 337 bp, Chlorella sorokiniana
  Clone ID: LIB3602-065-Q1-K6-E5
ccggactgccggcaggcatgcaggcactggctacgggttcgctgatgcctggcatgccaggcatggttgcacctggcatggtgcagccgcgcccggccggcaagtagtgcagcttgctggttgcagtgctgcttgaaatcttagaccgagcgtggttggggtggtccaccccatacccttgcacgctcaactctgcttgctctgatctgctcttgctcttgctctcggttcgtccctgctcacactgacccctgcttcgcccacgtttccgttccacccctaccgttgactctccctgagcacacaaacatgtacctatctgtaacctgttgaccgg

SEQ ID NO: 7224 - DNA, 526 bp, Chlorella sorokiniana
  unsure (1)..(526): unsure at all n locations; Clone ID: LIB3602-065-Q1-K6-E7
ccgggttgaccccgcgtccgtgcagcccttcaccaccccgccgccggtcgccgccccggcgcagcgagcgaagccctgtgcgccggcgcagccgctcgccgccccgccgccgtagcccttcccccgctcgccggcgctcccgcagcccgccccgccgccgcagccgctcgccgccccgccgccgcagcgcttcgccggggggcgggcgccgcggtgccagccctgcccgccgggacgacagccgcggccggcgctctcgctcgccttctanctcctctgggcgcagccgcagccgcagcagcacctcgcgctcttcgggcagcagcggcagccggagcagcggcagcnncggcngccgcagcacgcgcagcaccagcancngcggccgctccgactgagcatcgattgcgcaaccctgttgccagcacccgcctcccacattgcttccccccaactcggcatgtctttcgctcttctttgaaatgtttggttggcctggcagtcagcctctccctgctcacctttg

SEQ ID NO: 7225 - DNA, 401 bp, Chlorella sorokiniana
  Clone ID: LIB3602-065-Q1-K6-E8
cgcagggctgcaccccgccgcacagccttcagccttgggagccaatgcctcccacgctccaccctgccggcctgctgctgccggcgcccagcccatgggcacgacacacatgcatgtatctctctggtaatcccgcccgcgtgtttgccgccggccgcccccgttccccccggcccggccgctgtactctaccccgcccccacgtgcaccctttttcctggagctgccgcctctgcgctcttccggcctgcaccactctgctgctctgtgccatgcccatgtcaacccctgcctgcgtctgtacatcccctttttcctccttttttgtgagcgtgtagctgctttcatgctgtcatgtagcaacttgcaatcgagaaaaaaaaaaaaaaaaaaaagggggg

SEQ ID NO: 7226 - DNA, 588 bp, Chlorella sorokiniana
  Clone ID: LIB3602-065-Q1-K6-E9
cagttagcagccatgcaggccaccttcgccggctctaagctgcagcttggcgcgcgcgtcagccgcaagagcgtgaacaccaccgtggtggcctccagcggcaagaagatcgacatcagcaagcagggcctgaactccatccagaatgagaccgtgaagctcaacctgatgggcaagtccaagaccatggagagcaaggactgggtggacccccagggccgcaagggcaagggctacggcgtgtaccgcttcgccaacaagtacggcgccaacgtggacggctacagcccgatctacacccccgacacctggtccgagtctggcgactcttacaagctgggcaccaagggccttattgcttgggccggcctgattgtggtgctgctgggcgtgggcatcaacctggtgatctccacctctgccctgggccagtaaatggcgacgccccccgcgtcggcagcagcagcagcagccagcagcattcccttgcagctaccccccgagaagacaaaccctcaccctaccctagctggcggcgtcaccatgcgccggtcccttgctttccgtttcactgtccctttcgttcct

SEQ ID NO: 7227 - DNA, 473 bp, Chlorella sorokiniana
  Clone ID: LIB3602-065-Q1-K6-F1
ctacaggcggcgatcatgatgcggcgagcgcttgctgcggcaggagcgcgctgcgggttgtggaccccgcactgcagtgcaagtccttgcgtcgctggcctgctggctggccgaacgacgcgccaggtgcatggcagcgcggcggcgggctgggcgaccctggacgaagcgctgtccagcggcaagtcagccaccaatgtgccgccagacgtctccaacaccggccagaacacctccgcgcggatggcgggtgatttcgacaaggcggcggacctgtacctgggagggctgtttgagaagatcaatgcggcggggcaggctgggaagctggaggtgcagatggagcacgagggcatgaagctgcgcatgcccgacggtggcaagatcgccatcacaaaggacccggatgcccaggcgctggtggtgcactccaacctgcacgacacattcaacttcgacggggcagccgacac

SEQ ID NO: 7228 - DNA, 442 bp, Chlorella sorokiniana
  unsure (1)..(442): unsure at all n locations; Clone ID: LIB3602-065-Q1-K6-F11
ccgggtcgnacccacgccgtcctntnntttgcttgcctttaggcgttttcattggcccgtgccttgtgntcctaacgttgntgcctgcctttntcccgtctttcttgagtttcatccagtctttntccgtctttnngatgccttttcattctgccagnncgccctgttcttcaaccctgcgngacacgcccgtgtgccnngtttgttgtaccccccgtcaacgctgcagagcgcttatttgcatgnggcnntgccccagttccttggctcttgncctggcagnccctccgtatctgtttatgccggnttgagcccaacggcaccggcaactgggcctcctggcctggaatcacgactttcgaacgtcccctttgctgcgaacccttttatgcatcccaagcctcctaacctttgcgcttcatcaatgtgagctcgccagcta

SEQ ID NO: 7229 - DNA, 564 bp, Chlorella sorokiniana
  Clone ID: LIB3602-065-Q1-K6-F12
ccggtttgacccagcgttctcgtcaagcccggcgatgaggtcatcttcatgcccacccacaccgccgccaacaagtgcgagggcaaggtgttcaccgtggagatgcaccacaagcgcgtggacaaggccggccccggcgacaacgtgggcatgaacatcaagggcctggacaagggcaacatgccccgcaccggtgatgtggtgatcctcaagtcggacgccaccctgaagcaggtgaaggacttcaccgcccagatccagaccctggacatccccggcgaggtcaaggcgggctactcccccatcggctttgtgcgctgcggccgctccgcctgccgcatcaccggcatcaactggaaggtgggcaatgagaccggcggcaagaatctggtggccccccacagcctcaaggccaacgagatggctgaggtggtgttcgagccctgccagccgcttgtggtggactccttcaagaactgcgagggcctgtcccgcatcgcctttcttgacgggaacaccgccgtcttgctcggcaagggtggtgaagaccaccccccaaggctt

SEQ ID NO: 7230 - DNA, 407 bp, Chlorella sorokiniana
  unsure (1)..(407): unsure at all n locations; Clone ID: LIB3602-065-Q1-K6-F2
ccaccttcctggaccccaaggntcgtggcgctgcgactggctatgacactgctgtggccctgcccgccgctggcgacgatgaggagtacctgaaggagaacatcaagtcggccggcgcaatgaagggccaggcagtgttctccattgccaaggtggatgctgccaccggcgagattgctggcgtgtttgagtctgtgcagccttccgacactgacctgggagccaaggcccccaaggacgtcaagatcactggcctctggtatgctcagctttcgtaagcgctgccagcgcccgtcgtttggggaagagaattacagctttgtcgctcgacctgtttgtcagacgttgaactgctcatgttacataagcgcgcccntnttnnntttttttntntttttttttttttt

SEQ ID NO: 7231 - DNA, 405 bp, Chlorella sorokiniana
  unsure (1)..(405): unsure at all n locations; Clone ID: LIB3602-065-Q1-K6-F3
tcgggcaaatgaagcgtgactggcgtctgcgacctggtcaaccgcttccagctgtggctggtgcagcagggctggtggcacgacgagtcagataagggacgcccgggcagcaacacgcaccgaggtggttctggccctatcgttggcccactaagtatcccaagccgcccctgtctgccatgtggaggggtgtgtttgcatagatgccctcacacctgtcgcttcaattcgaggaggtgctagcccatgtgaaggggcaccccgtttcctgcccctccggcantccctttcgctgctcgtgtttcgctcctgatccgccttccctgttgcttcccacggcaaccggggggctgttatgcgcgctcgttttccaaatggttgctcatcatatgggtgcacagcttt

SEQ ID NO: 7232 - DNA, 341 bp, Chlorella sorokiniana
  Clone ID: LIB3602-065-Q1-K6-F4
tttaaaaaaaaaaaaaaaaaaaaaaggagaaaaaaaaagaaaaaaaaaaaaaaaaaaaaaaaaaaaaaaaaaaaaaaaaaaaaaaaaaaaaaaaaaaaaaaaggaaaaaacatacgggtgctcccttatcttacatcctcttttataacacccaaatagggggcgccccttttttggtgttccattctttcggggggggggggtcccccccggtgtttttttttttggcccccgggtttccctttctttgcccgtttttttccctccttcctttgggggaccccttgggtgccccccgctttatcgccggggccccttcccctttttgccccttttgtttt

SEQ ID NO: 7233 - DNA, 379 bp, Chlorella sorokiniana
  Clone ID: LIB3602-065-Q1-K6-F6
ggcagcacctccagcagcagcaccaccaccaccaccaacagcaggaggagcaggagcaacagcaggtgccggcgtcggcgcctgctggcggagccgcgggtgcaagcaggcggccgcgccgcgtgtgcgccgcagagggctgcgggagcactgagcacctgcgccgctgcgggcgctgccaggctgtaaggtactgcagcgttgactgtcaacgactaagttggcccagccacaaagacgactgcgagcggtgggctgccgagcgcgagaggcagtgatatagtttgcaccgcagttgttcttactggtgccccatgagcaaccgccgaccatgtctcatcttcataacacatgcatcattggtcatgtcacaagcaag

SEQ ID NO: 7234 - DNA, 518 bp, Chlorella sorokiniana
  Clone ID: LIB3602-065-Q1-K6-F7
cggggagcgggttccagggcatgtggtggtgctgagcccggactgcgcacgcacggtcgcgtgtgttgaaggccagccgctgcacttgggccaagacacggcaccgcatgcgctctgtctcgcccccaacgcctccgacggagccgggtcgtgtgctggtgtgccgatgagctgcagcggtcccaagtacgatgctcgctcgccaagccttttggagcgccgcctggatggctctgcgcgtgtacttcgcctcgagtggaaggatggcacgtgctttgttgcaaggtttgacctgctgaggtaccgcgaccaacccgcctcgcgcgcccacaagcgcctcaatgtgcagatgtggcaggcggttgaggcgcacgtgcgcctgctggagcggtccggccactgcacatttgttctggagaggggggatgtgaacgccccggcgggcgccaccaggagcggcctacaaaaagacaagaacagggcggagctctagctgcgccagcgtgtgcagactgatg

SEQ ID NO: 7235 - DNA, 487 bp, Chlorella sorokiniana
  unsure (1)..(487): unsure at all n locations; Clone ID: LIB3602-065-Q1-K6-F8
tgcggcggcagcaacacgggctgccggcggcggcgcccccgccactctcttcttctcacagcccacctcagacgccgtgaccgctgtgctcagcatgccgcacgagcgctgggcagcggcggggctggcagacggcacggctggggtggaggcataccaagctctgctggcagccagcttgcccaccctgccaaagcagtgggcagaggcgatggcggcgcagctggcagagcgcccgctgcacgaaaccggcatgcaggtgcacgccaaccagctgcacgcacccggccttgtgctgcttggcgacgctgcgcacgctgtctctccagccaccagcaacggaatgaacgctgccctggaggatgcggcggtgctagcacaaacantggaggcggcaggcggcgacctggcgggggtgccggagcaatacaccgctgcccgcctggaggatgctcaagccctgctgtggctggacagcgccctgtct

SEQ ID NO: 7236 - DNA, 139 bp, Chlorella sorokiniana
  unsure (1)..(139): unsure at all n locations; Clone ID: LIB3602-065-Q1-K6-F9
cctttcncnctcccctggggggggggggggggcgcctggctgccaggggggggctggnncttccccgncgctttccccnngcngnntctggccgnggtgtcntgccccgnctgcgtgttcccttncttcctcttttttt

SEQ ID NO: 7237 - DNA, 494 bp, Chlorella sorokiniana
  Clone ID: LIB3602-065-Q1-K6-G1
gcggcaacaaaaccgagcccaccaaacagccagcggcctatgccggcagccctcgtggccgtgccggcggccggcactgccgcagctagccgtcggcgccagcagcccagctgaacgactcatttgtgcggccgctgggccgctgtgattcatttgcatcggcccatgagcggctgccttgcacgcatggtgcggcacggcctgctctgcggcccttcatacctttgtacctttctgtatcatcttgcagcaatggcagccggctgcatctttctaacatcgtcaccggcccactcgtttgtgccatgcccacctgcctccaacgtcacccttcatcaaccctcacccaacccatccacctgccacccatccactcaccttccctccgccacaacctctgccacccactcaccacccatcacccgctcaacgccctccatgcaccatcctccccatccaccaaatctggcaccccaaacgcacgtccgccggtg

SEQ ID NO: 7238 - DNA, 510 bp, Chlorella sorokiniana
  Clone ID: LIB3602-065-Q1-K6-G10
caggtccgctactcgcagctgttccccgccatcaccccgcccggctcgtacacagtcaccctgaacggccactcgggcgcggagcagctgttctgcgtgacggtgcccttccaggtggtgccgccgcaggctgccgaggtggcggcaggctgggaggctgccctgggtgaggcggcgcggcagcaggcccttaccactcaccgcaagcgcctggcagcgtgagagcaccgctggtgtaagcaacaggatagccaacaacccatcggctgctgcctgccgcatgccggcactctagtgcacgcaccacgatagcaacagctggccgccgcatgccggcagcccgtaacctttgtatgctcacccccctacgttcttttgcatgcctgctaccttctgcctctgtatagctccctcatggcgcttttgtgtgcagccaagaacgccgcgttccgcacttcttgcatgcacatgccaatttctgcacagcacctcagtaaaagtcaagacaag

SEQ ID NO: 7239 - DNA, 372 bp, Chlorella sorokiniana
  unsure (1)..(372): unsure at all n locations; Clone ID: LIB3602-065-Q1-K6-G11
cgcagggctgcaccccgccgcacagccttcagccttgggagccaatgcctcccacgctccaccctgccggcctgctgctgccggcgcccagcccatgggcacgacacacatgcatgtatctctctggtaatcccgcccgcgtgtttgccgccggccgcccccgttccccccggcccggccgctgtactctaccccgcccccacgtgcaccctttttcctggagctgccgcctctgcgctcttccggcctgcaccactctgctgctctgtgccatgcccatgtcaacccctgcctgcgtctgtacatcccctttttcctccttttttgtgagcgtgtagctgctttcatgctgtcatgtagcaacttgcantc

SEQ ID NO: 7240 - DNA, 616 bp, Chlorella sorokiniana
  unsure (1)..(616): unsure at all n locations; Clone ID: LIB3602-065-Q1-K6-G12
cccgggttcgacccacgctttcggnacgcccgtgtggccactgtgtctcggcagaccaaggagacgagcgtcaaggtgacgatcaatctggacggcaccggcaagtgccactccaagacacagatccctttcctcgaccacatgatggaccagctggcgtcgcacggcctgtttgatgtcacggtggaggcggagggcgacacctggatcgacgaccaccacaccaacgaggacattgccctggcgctgggcactgccctgtcccaggcgctgggcgaccgcaagggcatccaccgctttggcgacttcacagccccgctggacgaggcgctcattcacgtggtgctggacctttcggggcggccacacctcagctgcggcctggagctgcccacggagcggataggcagctacgagacgcagctggtggagcactttttccagtccctggccaacaccagcggcatgacgctgcacatccggcagctggcgggcaagaacagccaccacattgtggaggcgaccttcaaggcgtttgctcgtgcgctgcgccacgcatgcgagaccgacccccgccgcgccggcaccatcgccagcagcaaaggcgtgctgacgc

SEQ ID NO: 7241 - DNA, 449 bp, Chlorella sorokiniana
  unsure (1)..(449): unsure at all n locations; Clone ID: LIB3602-065-Q1-K6-G2
tcttgaccccactatgtgggtggggcagtcaccagcccgcccatcagcatgtttgaggtggacggcaagaagagcaaggtgtactgccagaacctgtgcctcctgtccaagctgttcctggaccacatgacgctgttctacgacgtggaccccttcctcttctacgtgctttgcgagaaagacgcgcagggctnccacatcgtgggctacttctccanggngaagaacagcgcggagggcaccatcctggcctgcatcctcacgctccccgcgtnccatcgcaagggcttcggccgcttcctcttcgcctttngcttcgagctgagcangaaggaggggcgggtgggctcgccggtgcgacccctctccgncctgggcgcggtctccttccgctccttctggacgcgcgatatcctgtaggtgctgcgggngcccccggcctcgctgtc

SEQ ID NO: 7242 - DNA, 486 bp, Chlorella sorokiniana
  unsure (1)..(486): unsure at all n locations; Clone ID: LIB3602-065-Q1-K6-G3
aaaaanaaaaaaaaaaaaaatagggggggggggggggggggggaaaaaaaaaaaaaaaaataaaaaacaaaaaaaaaaaaagggcgggccgtttttggggttcccaggctttccnntccgccttccttgccgacttcttggccttttcttttggggtccccttattttcattttattgcccccccgtttggggggggggggcctggcaaaccccgggcgttccccaccttaatcgcctggcggcccttccccctttccccntttggctttttttcgatgtggcccgccccgttcgcctttcccttctttttccccccctgtttggcnaatgggcccccccttgtcccttccctttncccccgtctgttgtggtggttccccgccgtntgtccttttccctttcctgcgccttttccccctctcctttttttccccccccttcctttcttccttttttttccccggttttccccgtcggggcttctt

SEQ ID NO: 7243 - DNA, 376 bp, Chlorella sorokiniana
  Clone ID: LIB3602-065-Q1-K6-G4
tttttgtgatactagtgttacacgagacggatgggtctggacgaagggtcgcacagagtttggtccgacgggtgatgatggcacagggcgcgtggcccgggacaggggataagatggaaacaggtgggctgcaagcatgggcaagcggcaacagagtggcagagggctgtggccgcgagccatcaaggcgcggcagcttgtactgaaaatggcagaaggggtggctggaaagatgaaagaggaggaaatgaaagagccagaggtcttgaagggattcaagcagagggcggccctggccaatgcgcacgccagcacgccgtcagcgcgccgccgccgccgccggccgagcactgctcctgcgctgcgtgtgcgccgc

SEQ ID NO: 7244 - DNA, 248 bp, Chlorella sorokiniana
  Clone ID: LIB3602-065-Q1-K6-G5
gtcgacccagcgtccgcgcgcgcggtgctcaagtcgctctgagcggcgtgagctgagcgtgcggcgcggatggcgcgctagtgcagccgccgctgcgccgccgccttgccctgccatctataattctttgtgctttttgtgtgctcctccctgtagccccctctcgctctgcagcttcccacccgtcacagcattctagtctttcattttgctcgccgcagcgttgcgcattgtgatgctgcgccaat

SEQ ID NO: 7245 - DNA, 662 bp, Chlorella sorokiniana
  unsure (1)..(662): unsure at all n locations; Clone ID: LIB3602-065-Q1-K6-G6
ccggtgtcgacccaacgcgtccgggaacaagaatatttcgcagaatgcaccgctgctctgggggcgtgcaacaacatgcgcaatgagnnatgcaagccaacaaccagnannntggcaagcttnngccttcatccgagnnccttcctgcacggctacnnttcatgtacccagcgacgacatnnatgcacgctnngtcgcgaccagnaaatcgcgcccgcnntgttcgacacgctggtggactggtcannatactcttcttccttttcctctctgcactgggtacgatggcaagnngtgaccattttcaagcaccagcagatgtggttncgtgaacgaagaccggtgcctgccacgcaacggcaccgagagccaggtcaaggcatgtgagccggtgcgatgggtgcagccagactacgagcagcacctgtatagctgttcatcgtaccccatatccctgacgcattcgcggccagtgttagcggcggcgccgccgccccctgtgcagccgccccctgcaacatagcgcttccccatgcggcagttgcgatgcttcaatttgtctatgtgcaccccctgcaaaccttgatttatatcctgttatccgctgttcagaacttcaaatcctgtatactactgtgttagtccacaaactgctccaaaaa

SEQ ID NO: 7246 - DNA, 624 bp, Chlorella sorokiniana
  unsure (1)..(624): unsure at all n locations; Clone ID: LIB3602-065-Q1-K6-G7
cccacgccgtccgnaaaaaaaaaaaagggagggagaggggaagaaaaaaaaaaaaaaaaaaaaaaaagagagaaaaaaaaaaaaaaaaaaaaaaaaaaaaaaaaaaaaaaaaaaaaaaaaaaaattataaaaaaaaggggcggtccctttctaagggttcctcttctttctcttccccctttctcttccaactctttttctttgggggtgggggggccccttttttttcctctccccttgcccccccgttttcccccgggttttgtttggttttttctcggggggcccccccttttttttttctcctttgcgttttttccccttttccgccggtttgggtcccttctggtttttccccccttttttttcgtcctttccccccttttgcttctccctcttttggcttttgggccccccccttgcccggtttcttttttcccccgggttgtcgctgttcttcttgcgggttggccccccccctttgcctgcgcctttttttccctcttttttttttgtttttttttcccctttctcttttttccccctcttttttttccgcgtttttccccccgttccccttttttttttttgggggttttttccttttttttttttctccctttt

SEQ ID NO: 7247 - DNA, 623 bp, Chlorella sorokiniana
  unsure (1)..(623): unsure at all n locations; Clone ID: LIB3602-065-Q1-K6-G8
gnacaacctggcgccctccgccggcagccgcgtggacaccggcttcttcaaatccggtgcctggctgatccaccccggcatgttccccgagcggctgcgcacctggctgaccgccgacgccgggctggccaacaccagcaaccgcggcctgggcatcaagggccccgcccgctgcatgccaaacgggtccgtgacgtcctgcgtgttcaccgaggtgaacaacttcgacattatcagcctcagccaccctagcaagagcgacatcgattcgtggagcgaggcaaaggccgacaagtacacgttcttcaccatccaccaggtcgtgctgctggcgtgcgacgagctggagctgtacctgctctacaagctctcggcgctactcaaccccgaccggcccgacctgtggctgcaagtcagccacctatgccacgaccacggatgcatccgccgcacccacttcgttgtggagacggcgatcgagaacctccgccgcaacccgtgcaagctggccaagaagtgccgcggcgacggctgccctggcgagcaccgctgcttcagctgctgaggtggtcctggcctgtgccttctgtcaacgctctcgtgctagaggtgcggcgcgctgc

SEQ ID NO: 7248 - DNA, 475 bp, Chlorella sorokiniana
  unsure (1)..(475): unsure at all n locations; Clone ID: LIB3602-065-Q1-K6-G9
gggtcgnacccacgccgtccggngnncagcgcagggacaagnctcaaggggccaannctggcgcgagctnnggcggccgacgaagtaaagtcgcctcccnnctttggggcgcnnttgccagttggnagcaggggcgggcgctttgcgcccgccgtnngcccgctgcgccagcacaagcgctcggcngcttgccgcccgcgctttgcggcannggtgggcgggcgcttccacacgcacaccgnacacctcaccacaccatgcctcccggtgngaaagagagcggttgcggcgctgctagtggcgccgcgccgccgcgcgacggtttcaggcggctagatccacaaaaagccgccggcagtagctggccggccggcgccgcggccggggggccggcgcggcggcggcggccacgcgcaaggcctttgcaggcccccgcgtgagacgcacacccttaccgtgtaaggaacctactcgc

SEQ ID NO: 7249 - DNA, 524 bp, Chlorella sorokiniana
  unsure (1)..(524): unsure at all n locations; Clone ID: LIB3602-065-Q1-K6-H1
ccgggttcgacccacgccgtccgcggngcccttgggcgagctcggtgtcnccgctcctgcgtcacccagccatggcggcgatttccaagacccgcaaggccgtcgccgatggcgtcttctacgctgaactcaacgagctcctcatgcgggagctgggcggggagggctactctggtgttgaggtccgcgtcacccccatgcgcacggaggtcatcattcgtgccacgcgcacgcagaatgtgctgggcgtcaagggccgccgcattcgcgagttgaccagtgtggtgcagaagcgcttcaagttcccggagggctctgtggagctgtccgccgagaaggttgccaaccgtggcttgtgcgccgtggcacaggcggagtccatgcgctacaagctgctgggcggcttggctgtgcgccgtgcctgctatggcgtgctgcgcttcgtgatggagagcggcgccacaggctgcgaggtgattgtgtctggcaagctgcgtgcgccgcgcgcccagagcctgaagttc

SEQ ID NO: 7250 - DNA, 543 bp, Chlorella sorokiniana
  Clone ID: LIB3602-065-Q1-K6-H10
tctaaaaaaaaaaaaaaaaaaaaaaaaaaaaaaaaaaaaaaaaaaaaaaaaaaaaaaaaaaaaaaaaaaaaaaaaaaaaaaaaaaaaaaaaaaaaaaaaattaaaaaaaaaaaaaataaaaaaaaaaaaaaaataaaatggggcccccttttttgggttccctgtttttcttccccctccttccaattttttgttttttttttttttccccttttttttttttttttgcccctttttttttaaccctgttttttggaaaaacccttggtttcccccattttttttctttttaaaaaattccccttttttcccgtttgtgtttttcccaatttgcccccccccttatcccctttccaattttttgcccacccttttttggaatggtacccccccttttggcgtcccttaaaccccttgggtttttttttttttccctcctgggggcctttttcttttttcccccccctttgcgcccccttttttttcttttttttacttttttttttttcccccttttttcccgtttttttccccctaaaattt

SEQ ID NO: 7251 - DNA, 535 bp, Chlorella sorokiniana
  unsure (1)..(535): unsure at all n locations; Clone ID: LIB3602-065-Q1-K6-H11
agnggtggccctggcccccgactgcgtgggcgaggcggtcaaggcgcagatcaagggcctgcaggacggccaggtgctgctgctggagaacgtgcggtggcaccccgaggaggagaagaacgaccctgagttcgccaagcagctggccgagggctgcgacatctacgtcaacgatgccttcggcaccgcccaccgcgcgcacgcctccaccgcgggcgtggccgcctacctgtcccctaaggtgtcgggcttcctgatgaagaaggagctggactacctggtgggtgctgtgagcaaccccaagaagccgtttgcggccatcgtgggcggctccaaggtgtccaccaagatcggcgtgatcgaggcgctgctgcagcagtgcgacaagctggtgctcggcggcggcatgatcttcaccttctacaaggcccaggggctgagcgtgggcgcctcgctggtggaggaggacaagctggccctggccaaggagctgatgggagaaggccacaggccaaggcgtgggaatttgtgctgc

SEQ ID NO: 7252 - DNA, 469 bp, Chlorella sorokiniana
  Clone ID: LIB3602-065-Q1-K6-H12
ccctgtccgacttgagcaggctgcgtgctttatgcagtctgccgcagcattgcctaccgcagctgaattcatgcgtgcatgattctaccactagaatcttatgcaccagagccttgaatggtacaaaacttactctgctggatggttcctacgggcgcttgtcattttccatgctaccgcccctaatgcgctgctaccataatacttctgtgcgttcataacctaatagtcgggtgagaaaatcactattacatacacgctcttccagctactcacttagacgatggtataaaagcctgtaattactcgtgacagcagctccattgccaagagggccctatcgcatagagaattgatgcatggttctaaactgtactgccaaacattcataaaccatcccgcctgcgttttgccttccacccttcaactctgcagcgacctacccctacgtggtcatcccctgtttggg

SEQ ID NO: 7253 - DNA, 561 bp, Chlorella sorokiniana
  unsure (1)..(561): unsure at all n locations; Clone ID: LIB3602-065-Q1-K6-H2
ttcgggcctgcaatggctcgcgctctccgccctacggcgcgcctgacaaccggtgcacgttcccgtgcaaacagctgtatggcattggatgcctcaaatgcaaccagtggaagtgcttggttacggacacaaagtatgccaaaggccgttgatcagcgaacaaggaatgaggagaaagcagctcgagcggcatgccaccgatgcccgttgcatggtgccgtggatgcggccactgctattgagaccacgccgacttccattgtgtatggtgcacgactgtccgaataagaccccattccttcacacgggctgcccaaacttcatgccattccacttaccttttcatgtacctcgtcaagtcaaccttgctcacgattttcatttagagggctgtggcacgcctcgcatgccctgccctcttgccctcacatcacactgcttcacccctttgccgccatcatcttttcttgagtattggtgggttcaattctgaaccaggtcagccaatattttttttttttttttttttttttttnngtttttttgttttttttttaagat

SEQ ID NO: 7254 - DNA, 576 bp, Chlorella sorokiniana
  unsure (1)..(576): unsure at all n locations; Clone ID: LIB3602-065-Q1-K6-H3
gccaccacagcccaaactggtgcagcttggtcatttgatgcggtngaanagcggcaagnaagaaggtcaagaattgagggtggaggttngagggnncaagctgtcccgagggattggcaatgtctttgttgagctggnanaatcgagaactcgagggccaagggaggggcgatccgcatngggagaagcccgcgnagcctggtagtacgtgcggtgcgccctgnntgataaaccatcttgaaccagcnncctcaaatctgtacccagctgctgcattaaccacctgnnctggccattntnngtagttgggcccgtttgccacttccacntttgctgcaactggnatcaggctttgcactgccnttgctgttgtgcgtgctgccttcaaatgttgcctctcttccatgtgcctggcatgccatgtcctcgtgttgctttgctgctgtgttggtttaggtgcctacgttttggccgagacctgtnaacactgtcaaagcnntgtttttttttttttttttttttttttttttttttttttttttttttttttttttttttttttttttttttttttat

SEQ ID NO: 7255 - DNA, 428 bp, Chlorella sorokiniana
  unsure (1)..(428): unsure at all n locations; Clone ID: LIB3602-065-Q1-K6-H4
gatgggctgtgggnatgtgctggnacagccaggnaggtggtngaagctggcttcggcgaggacctgcagcgcggcaccacaccacaggaggtggnccgagcggctgtcggcgctggctgtgaagcgtggcagccaggacaatgtggccgtggtgctcattgacctgggcaaggtggactggagcaagtccaacggcggcggcaacggcctgtttggcggcctgggcagcattttcgggtcgcggtgaggccgccccccgcccagggcttgccctcgtgcgctgcaccccggcggcgccgtgtgcgccccgtgcagcgccgcccccacagagagaagatccgcactgcgtgcacccctatgcaattgcttgcttttcactattatttttgctgtctgcccaactgtccctctcccgctgtgtgcgggcc

SEQ ID NO: 7256 - DNA, 604 bp, Chlorella sorokiniana
  Clone ID: LIB3602-065-Q1-K6-H5
gggctctgcgtacgccttccgggcgccgggcggcaagctggacatgagcggcgtggtgccggtgctggacgtgaaggtggcggacaccactggagcaggggacgccttcctggcaggcttcctgttctacctgctgctgagcggcgggctggagtcgctggtggccgaccccggcaagctgcggcgcggagtggagtttgcgaccgcctgcggcgccttcacctgcaccaagcccggggccattgacgcgcagccgactgcggcagatgcagaggccctgctggctgacaagggccgcgtggggcagtgaagcagtgtgccgcgacaaaatgcccacgcagtgcagagcagcactctgcacggctgaggcagcggcagcgtgctgcccagcgcagcaagcaagtcttgggagctgcctgccctgttgcaaaaccaaaagctccctgcctgccctgtacagaataaaaaatggaatgaatgcctcttcgaaaaccgagactggtgcacatggggtggggtgtgattacactcaaacccttagacgcttttcgggactttaaaagcaatttggtatcaaaaaaaaaaaaaaaaaaaagggggggcg

SEQ ID NO: 7257 - DNA, 453 bp, Chlorella sorokiniana
  unsure (1)..(453): unsure at all n locations; Clone ID: LIB3602-065-Q1-K6-H6
cagnaactggnggnaaaataccgcattgccaacaactgagcaggaccatgacgacgtcctgcagtactaggcactgcaccattgttttggcacccccagccgccaaacccaagcctcagcgcgtgccattgcagcagcggcggcggcccgcctgctgaccgctgcgcgcgattgtcttgttcaccgcccgctgagcagccattccttgacgcctgtgtcattttgtcccctcacccataaacatgcccgagaattgaactgccccgccgctatcacagcctgtccctcttctccccgatttcatcgccccacgccgcgccgtgggcgagttttccgatgccctttgcctttcatgctaccacatccgccactggcagccctacctatatgaatgacgccggtccgtcctactgtacaacatgccgcaacatcccgtgtaaccaggcatgcaac

SEQ ID NO: 7258 - DNA, 227 bp, Chlorella sorokiniana
  Clone ID: LIB3602-065-Q1-K6-H8
aaacgaccgcctgcctcctgtaccattccgccgcatgccgcgcattggcggcacggctgccggctcggcaatggatgcaatgaattctctccccctgtacacagccactgccattttgtactcacattttatgcgggctgtgaccgactttgccaagccatttgatactaaatttgcttgcatgcagatatgagcaataaagatacttttggtggttgtaacactgc

SEQ ID NO: 7259 - DNA, 571 bp, Chlorella sorokiniana
  Clone ID: LIB3602-066-Q1-K6-A1
gcacgcgccaccacggcatcagacgtgttcagctacggtgcgcagctggcttcttgaggctggagttttgaagctgcaccaggatgcttgccgtgtgtgaccatcccgttatcacacttccggccccttgcacccacctacccccaggcgtcattctgtacgagctgctgacgtggacggtgccttggggcggcgctgacttctgggaggtgcgtttgtggcaacgaaacacgttagcgactgcacgtttgctggtggtgctggtggtggtggtggtgctgctgctgctgctgctgccgccgccaccgcctacccttccttcctggtgcatgccgtgccattctttgcaccagcctgatgttcacaaccatctgtgtgcttgctgtcgcaaccctccacagctgcccattgcacgtctaccttgttcactctaaacaacgcagattgtgagcgccctcacgcgcggcgagcgcctgcccatccccgaccggccctcgctccccggccccgacacgctgcgctttgctgggctggcgggctatatcgtgctcatgcagcgctgctgggcaca

SEQ ID NO: 7260 - DNA, 564 bp, Chlorella sorokiniana
  unsure (1)..(564): unsure at all n locations; Clone ID: LIB3602-066-Q1-K6-A10
gctaggcgctgccctgggcttgcaggtgaatgcagcctcaagtgcagcagccgcctacaaccctgaagcaaggcagcatgcgctggtggtgctgctgccggcactgcaagctgctgcggcagctgaggccagccctgcagacggtcaggccagctgccaacccgcagcagatgcacctgccctgctggacaggcagcagctggcgctgcggcaagcgcgggcgctgggcgcggcacgccggtgcggcaacctgcggtgcagcaacctggcggggcccagcgaggcgcagctgcgcacgcacaagtgcagcggctgccgcaccgtgcgcttctgcagtgcagagtgctccaaggcggcgtggcgtgaacacaaggtggcctgccggcagctgcaaaccaagtgaagcagcagcggcaaggcagctggggaccgtgcggtggagagcaagctgtggttgtgacggcagctatgatcaccattggcagccactttgtcaagctagccaaccggtgtaaccatcgccgcaatcnnnntatgaaattaaaaaaaaaaaaaaaagggcgg

SEQ ID NO: 7261 - DNA, 253 bp, Chlorella sorokiniana
  Clone ID: LIB3602-066-Q1-K6-A11
gtcgacccagcgtccgccccgctggccagcagtatgctagcggttgtgagcaaacccccctcgggtgcgccagctgccagcagcccataaccctggctggcacggtaaaggagcggcgccccggatgccccttttagcgaatcctgcatgcagactcatcccccgtgcttgcactggatctggccgtatgtgtatgcctttgctttagttgtatatattgtatgctaccgttgtatgtaagtgcatgcgtgtt

SEQ ID NO: 7262 - DNA, 425 bp, Chlorella sorokiniana
  unsure (1)..(425): unsure at all n locations; Clone ID: LIB3602-066-Q1-K6-A12
gcagcggccgggcaccccctcttcaacctcaagcctacctgcccgtcattgagtcgttcggcttcaccgccacgctgcgcgccgccaccggtggccaggccttcccccagtgcgtgttcgaccactgggagctgatgacccccgacccgctgcagagcggctcgcagaccaacgagattgtgctcaacatccgcaagcgcaagggtctcaagccggagcctgccgcacttaacgaatacgaggacaagctgtaagctggtcctgcggcgtcccttttggcgagtgagcggcatgcgtgagcggcgcagcgcgcgcggcggcggccgccgccagcccacctgtccctgcgacctgcccgtaccgtgctcaacgtgcaccagatccacacactaggctgaaatgtaatcagttcaattgacananna

SEQ ID NO: 7263 - DNA, 542 bp, Chlorella sorokiniana
  unsure (1)..(542): unsure at all n locations; Clone ID: LIB3602-066-Q1-K6-A3
tggtgaaaaaaaaaaaaaaaaaaaacccggggggaaagggggaaaaaaaaaaaaaaaaaaaaaaaaaagaaaaaaaaaaaaaaaaaaaaaaaaaaaaaaaaaaaaggggcggccgttttggggggtcccggtttccttccgcggccttgcgccgtttttttttttttttggggtcccctaatttcattggggggggggcggtttccccccgtggggccgggggtcccccgggggtggccccgctttcttcgctttgccgcttttccccttttcccctgttggggttttggggngggggcccgccccgttcgcctttccctccttttgcgctctttgtttggcttttgggcccccccctgtcccggccctttncccccggggggggtgggggttccccgctgtgtgcccgttccttttgccggccccttggcgcccgttccttgggtttttttccttttttttttttccttttcccccgtttttccccttntggcttttttttgggggcttccttttggggtctccgttttgttgttttttcg

SEQ ID NO: 7264 - DNA, 615 bp, Chlorella sorokiniana
  unsure (1)..(615): unsure at all n locations; Clone ID: LIB3602-066-Q1-K6-A4
cccacgccgtccgtcagttagcagccattgcagnngccaccttcgccggcttctaagctgcagcttggcngcgcgcgtcnagccgcaagagcgtgaacaccaccgtggtggcctccagcggcaagaagatcgacatcagcaagcagggcctgaactccatccagaatgagaccgtgaagctcaacctgatgggcaagtccaagaccatggagagcaaggactgggtggacccccagggccgcaagggcaagggctacggcgtgtaccgcttcgccaacaagtacggcgccaacgtggacggctacagcccgatctacacccccgacacctggtccgagtctggcgactcttacaagctgggcaccaagggccttattgcttgggccggcctgattgtggtgctgctgggcgtgggcatcaacctggtgatctccacctctgccctgggccagtaaatggcgacgccccccgcgtcggcagcagcagcagcagccagcagcattcccttgcagctaccccccgagaagacaaaccctcaccctaccctagctggcggcgtcaccatgcgccgcttccttgctttccgtttcactgtcccttttcgttcctgcgttc

SEQ ID NO: 7265 - DNA, 615 bp, Chlorella sorokiniana
  Clone ID: LIB3602-066-Q1-K6-A6
ctgctcaccgccgactgcgagggcaagaccgcagctgaaattgcgcgtaggaacggcaacggctctgccatgcacgtcctgctccgcgagcagcagcagctggcgcgcgaccggcagcgcggcagcgtgccgaccgtggagcgcccccgacccaacaacgaccaccgccaccagcagcacccgccccagcgctgggtgggacggcgcctgcagcagcgcaagggcggcaacagcagcagtggcagcgccagcgctgcacactgaggctgacacaagtaaagtgcatcagttgaaacgctcacacccgttggccgcaaggcttgcaaaccatctgtcgctgcctgcactgcggcagtttgtaccaacgccatctcgactccattgcaggcgcgtacatcctgcgctcataggattccctctctggccgttctcatacgcaccacccgtttttgcccccaaccttgctcctgtcagctggcgctcccatttctcccatgtgcgatccccatctcctcggccaaaaatccatcttgccaacccgctgccttgctggcctgttttgcacccactgccttcctccgaaaccgtttgcattttatgtcgcatacactgcac

SEQ ID NO: 7266 - DNA, 332 bp, Chlorella sorokiniana
  unsure (1)..(332): unsure at all n locations; Clone ID: LIB3602-066-Q1-K6-A7
taaaaaaaaaaaaaaaaaaaaaaaaaaaaaaaaaaaaaaaaaaaaaaaaaaaaaaaaaaaaaaaaaaaaaaaaaaaaaaaaaaaagagaagaacagtttttggggtttccttattttcttacttttgcttgctatgtggtggcttttttttggggtttctttttttctttcccttggctcccctttttgggggttgttttggggacccctttggcgttccctgttttctcttttttttctcctttccttgttccccccttgggtttctccctttttgtcctttgcgggtcgtccttttttccctttgctcntttttnttggggtgggggccc

SEQ ID NO: 7267 - DNA, 219 bp, Chlorella sorokiniana
  Clone ID: LIB3602-066-Q1-K6-A9
cccggtcgaccccgcgtccggttatctcctcgcccttgcaattgtgtatcgaatcgcatgcgccgtaccgctttgatcatcatgcatctctctcatccatatggcacatcttttgagcggccttgcccaggccccacgggataactggggggcctgcctgcgccttgccacttgtatctgccggccgcactctgagtgcacggtcccatgttgcactat

SEQ ID NO: 7268 - DNA, 470 bp, Chlorella sorokiniana
  unsure (1)..(470): unsure at all n locations; Clone ID: LIB3602-066-Q1-K6-B1
gtcgtttgaggagggcgccgcccagctcaaggcctactgccgcaccctgcaccaagagatgcccgatgaggtgcgggccgcggtcggcctgctgtgaggcctgcgaggcccgccacttattgacttgccacgaggcaggacgcaatacacaagcaagactcacgattgcatgccagcctgaccagttgtagttgtaggcaacaatgatgctcggctccctcttagaaagagccggcagcccatgctaggtagcggtgcagccgtggcccatgatacccctgccacgccccgctctgatttgtacagtaggaaatgcatgccctgtngaaccaccagtgcgactgtccatccctctctgctctgcgctcacccctcacatgcctctgcgaatgccccggacatttctctgtcttcttggacctgtnccctgttgggggacgccgctcgccccgtttcgtgcccaccccttt

SEQ ID NO: 7269 - DNA, 393 bp, Chlorella sorokiniana
  unsure (1)..(393): unsure at all n locations; Clone ID: LIB3602-066-Q1-K6-B10
gttctagcacgcgagcggccgctcgcgatctagaacgttggaagcggcgccttgccctccctgctgcgttggattatcattatcctcccgccgtgcatgccctctgctctccaccttgctagcgcccccgccccgccgcagttttgcgtcgtcccctcacatttcgttcgcccccgttcgcctcattcatttggttctgtccccccccctcctccccccacacaccccgttgtctgtactgctgctgccccctgcctaaccaacgaacgcccnacggcgtgcggtggcggcgtgggcgcggcatcccgccgctccgctcctgggaagactcccctcccccaccccaccccgcacttggttgcacttttctgccgcccgcggcgggcgtgccct

SEQ ID NO: 7270 - DNA, 545 bp, Chlorella sorokiniana
  Clone ID: LIB3602-066-Q1-K6-B11
tacgggcactgcctgggcgcggccggcggcatggaggccattgccaccatccaggccatccgcaccggctgggtgcaccccaccatcaaccacgtgaggagagcggcggcactggggccccctgtggctgccctctgtgcggcacttggtcagccgcatgcgcgcctgccgattctgttgtacggatttgggcccagctaccttattggctgcatccctgcagcaaaaggcgtctcactgagcggtctgccgctgctgcatctctggccttgcctgcgcaggagaacccgatcgaggaggttgcgggcatcgacgtggtcgccaacgtgaagcagcagcacaacatcaccgcgggcatctccaacagctttggctttggcggccacaactcggtggtggtgtttgccccctacaaggcgtgattcgcacatttgcttcttcaagttgtgacgggctgcggcgccgcaccttgtgcacctcgctgccccgttgccctgagctgactctgaacatattctttttctctgcaccatgcactcacacat

SEQ ID NO: 7271 - DNA, 373 bp, Chlorella sorokiniana
  unsure (1)..(373): unsure at all n locations; Clone ID: LIB3602-066-Q1-K6-B12
cccacaccgaccctgcaccttggccctcgtattgctgccgtccgtcgcctggcgtgctccgcccgcccgcctcatggggcgctccatgcagctcacatccccctggcaggctggctgagcacttaggctggtcagctgctgcccgttggcctccctgctctcggtttttgctccctttgcttgcacaacccgcttgcagcaacgttgctcgtgcactgctcccagcagttggtggtgctcaacgatggggtcacccggacacccgacctccactgttgtttcattccagcattgcatgcccacgttgtgttgtttccagagccagtcagcctgtggaccaggcccagcctctgtaacctaagcaagcaannna

SEQ ID NO: 7272 - DNA, 346 bp, Chlorella sorokiniana
  Clone ID: LIB3602-066-Q1-K6-B2
cagggcgcgctgtccacgtgctgcgtggcgcgggcggcgccttcgtgctggtgctctacgacgagattaaaaagtatctgaaccccgacgccaagcccagctccgagtaaagagctcgcgcaggctgcccgacccacggcggggtggaacttttttttccaacaaaccagccaacccacgctcctccgcactgcacagttgcctcctcttacagcgcttgctccctaccctccgctcgcccatgccatgagccgccagtgctgctgacgcacacgggcgctcgggacacgatatatgctgcgcacctccggcccctctgatgggcaaagctgcaacagatccgcag

SEQ ID NO: 7273 - DNA, 466 bp, Chlorella sorokiniana
  Clone ID: LIB3602-066-Q1-K6-B3
tttagccgtctgggtcggggcagcggcgacccagcagcgcacagggtgcagcagcagcgggagcagcggtggcgcaccagtacaagccgggggacattgtgtgggctaagattggggtgtacccctggtggccggcgcagctgcagcgccccacggcggacgagcacttcaagcccaagcacgcggccaccgacctcttctgcgtgttctacggctcgaatgactacaactggctgccgcccaaccagatcaagcccttccatgagtcacacccagactacgagcggcacgctgctgtgaagaacaggaagctgcagcaggccatcgatcaggcttgggtgtacggcatgcagcggcagcgccccgacaccaactggaccggcgcacgatttgtcgcatgagcctggaacaagcagctctgcagctccttgccgtcaacagcaggcgcccggcctggcttgacggc

SEQ ID NO: 7274 - DNA, 495 bp, Chlorella sorokiniana
  Clone ID: LIB3602-066-Q1-K6-B4
cagcccctttcgcaactccaccagctccccctgtctgcacacgccatggctcccaaggttttcagctggaacttccccggcgcttacgccgtgcagttcatgaccgtggtgtcgtgcaccgcctgcgtgtacacttgctaccacttcctggtcaagaacccggatgtgcactttgtcaaggagctgaagcaggacgagctggcggagagcgcgcggtggtcccagcaggccaaggccgtccagggcaacgtgttccgctggctggcgcagacgcgcgacaccgccgcgggcgagcagaaggacacccgcatcttccgcgtttgagcgcccgccaggctgctgcgctaaatcggcgcgcaataccagccgctcaccgccactcgccgccgctgcgcccccctgtgcttgctctcagggcctgaggccctctgccagtcagccacctggggccggcacccccttgccgctatgatatgcgtccccaaagctggagtg

SEQ ID NO: 7275 - DNA, 558 bp, Chlorella sorokiniana
  unsure (1)..(558): unsure at all n locations; Clone ID: LIB3602-066-Q1-K6-B5
cccggtcgacccagcgtccggctgactgcagcgcggcaggcccaagcctcgtgcaacgtttcatttgtacagcaaagtcccaccttaagcagcttccctggacacatgctgcccaacgaccgaacccttccctactgcatgcataatgatggattttctttctttcatgagcgcgcatggttgtccatgcaagctgccctgcgccttttccacaccgcccctgcctcccaagtatgtttcgcttgccacctatactcacacctggcctttttactgccttgccgtgacagcagtgcattctgcttgcactcttgtcggcaatcgcacggccgcctctgcccacccttgccctgtacatagtgcaccatttccacctcttctccacaatctgcatcacgcacgcttttgactgcacagcatggcatccggtgatgccttttatgcctgaagaggccggaccgtttgcccagacagacagtaattcattaggtttgatgcattgtgccctgttgagggccggcacctaatgcatgcacatctncccggctattaccctcc

SEQ ID NO: 7276 - DNA, 293 bp, Chlorella sorokiniana
  Clone ID: LIB3602-066-Q1-K6-B6
cccacgcgtctttttaaaaaaaaaaaaaaaaaaaaaaaaaaaaaaaaaaaaaaaaaaaaaaaaaagggcgggccgcttcgcgtatctaaaaaccggtgcccgcacggttgcatgtgggcttgcttgcctgtctgcttgcttgccccacccgccggggggcgagaaagatatacaggcgtgttaaacttccggccccctctccagccacccattgggtgcggcggcctgtttttgctttctggatcactttcgctttgtcagcccgccattggtaactctcgacgcgcggtgca

SEQ ID NO: 7277 - DNA, 477 bp, Chlorella sorokiniana
  Clone ID: LIB3602-066-Q1-K6-B7
tacggcggcagcaacacgggctgccggcggcggcgcccccgccactctcttcttctcacagcccacctcagacgccgtgaccgctgtgctcagcatgccgcacgagcgctgggcagcggcggggctggcagacggcacggctggggtggaggcataccaagctctgctggcagccagcttccccaccctgccaaagcagtgggcagaggcgatggcggcgcagctggcagagcgcccgctgcacgaaaccggcatgcaggtgcacgccaaccagctgcacgcacccggccttgtgctgcttggcgacgctgcgcacgctgtctctccagccaccagcaacggaatgaacgctgccctggaggatgcggcggtgctagcacaagcagtggaggcggcaggcggcgacctggcggcggtgccggagcaatacaccgctgcccgcctggaggatgctcaagccctgctgtggctggacag

SEQ ID NO: 7278 - DNA, 569 bp, Chlorella sorokiniana
  Clone ID: LIB3602-066-Q1-K6-B9
ggccgacgaggtgtctgtcgtgcgcggcacctacagggccgcgagggcaaggtggtccaggtgtaccgcaagaagtgggtgatccacatcgagcgcatcacccgcgagaaggtcaacggcgccaccgtgaacgtgggcgtggacccctccaagtggtggtcaccaagctgaagctggacaaggaccggcgccagctgctggagcgcaagcgcgcgggcaagggcctggccgacaagggcaagttcacggaggcggaggtggcggccatggagaacgtggactaagcgccacgcccaccccgcagcagccagcagcagcagcagtgttgaggccgcgggcgggccaccgacgccagtgcggctcgggtggcggcggcccgacggccccggtgggggcagcctctccgtgtggctgtgcgctccaccggcagcggcgcagcctcggcagcgcttggaagcatggaggctcgagaggcccttgctccggcgcggcccagcggcgcttgctttcatgcagcggttctgccgcagcgcgtcacacggcgggcgctggcgcgcagtttgcaccct

SEQ ID NO: 7279 - DNA, 592 bp, Chlorella sorokiniana
  unsure (1)..(592): unsure at all n locations; Clone ID: LIB3602-066-Q1-K6-C1
cgccctgttcagggctactgggaggacattggtacggtgcgcgccttctacgagtccaacctcgccctcaccgactcgcctaaccccaacttcagcttctacgacaaggacgcccccatctacactatgagccgcttcctgcccccctccaaggtcatgggcgccgaggtggagcgctccatcctgggcgatggctgcatcgtggagccggacgcgcgcatcctgcactcggtggtgggcctgcgctccatcattcgcgagggctgcgtgattgaggactcgctgctcatgggcgccgactactacgagcagtacgaggagtgcgaggcgttcacggactgcctgccgctgggtgtgggcaagggcacgcacatcaagggcgcgattgtggacaagaacgcgcgcatcggcaagttctgcaagatcgtgaacgcagagggcatccaggagagcttcaagacggaggacgacggctgggtgatccgtgacggcgtggtggtcatcatcaaggactccaacatacccgncggccccatcatctgagcccagaaagccagccgggcgggcgcagcacctcaacatcaccttgccg

SEQ ID NO: 7280 - DNA, 449 bp, Chlorella sorokiniana
  unsure (1)..(449): unsure at all n locations; Clone ID: LIB3602-066-Q1-K6-C10
cgnagactcccaaagtacatcctgatgcgcctgctgggtggtgccaagaagcgcaagaagaagacctacaccaagccgaagaagcagaagcacaagcacaagaaggtgaagctgcgggtgctcaagttctacaaggtggacgacagcggcaaggtgcagcgcctgcgcaaggtgtgcccccagtgcggccccggcatcttcatggccacccacttcaaccgcgtgtactgcggcaagtgccacctgacgtacgtgtacgacaaggagggccagaccgcctaagcgccccgctcccccctgcggatgcacgcttagcagcagcacacgcggcgggtgcgcccggcatgccggcacaccagccacggagcggcggggcgtccctggcagcggcgcagcgcctgcaagcccttctgttgtgttctgtgccgctgtaatacccctgctgcnna

SEQ ID NO: 7281 - DNA, 612 bp, Chlorella sorokiniana
  unsure (1)..(612): unsure at all n locations; Clone ID: LIB3602-066-Q1-K6-C11
attcccggccggcctgctcacccccgcaggcatggtggttgcgaatccaagctatgccgggctggagccccagctggagagcgggctgtaccgcaacttcacaaacggatccgtgatttggggattcgtggaggcgatgatggtggaaggtctggagcggcagctggctctgtgcgactccggcacagccccttcctggtgctccgacacccagctgctgtcccagctgcgcacggcgctcgaccacctgtggagcacgatcgtgaacaacgctgacgtggccttctccgaggtgtggagctggaagtttgaaaacggcggctaccgcaccgcctccctggcggagacctctgcaaccagcacagagagcaatgcagttcagctgtggagccatgccttcatcgctgttcccggtcccagcggcggtacactgctggagctttgatgtggccactggcggctggggatcccacacgctagcaagcttgcaaggattgcctctggcgagtgcacatagacttactgngaacgagcaaagcagtcgggacctcgccgctgttgagccgagtgggtgggtgcacagcatgctagcagctgcggcagtgacatgcc

SEQ ID NO: 7282 - DNA, 319 bp, Chlorella sorokiniana
  Clone ID: LIB3602-066-Q1-K6-C12
cttcctgggctggttcgcgccctccacatcaagtgcccgctttcggcggcgagtcgctgttcggcgccttccatgcctccatgctggagaacctggccaacttcccccagggccctgctctggactccaacttctgggtgctcatgatcacttggcacatggggctctttgcttgcctgttttggggcctcatcggcgtgaacgcccgccgccagggctacttcgactgagcgctgccccatttggctcccagctcggattcattgctcaaacttgccgtgtacacgccatgtgccctgttgtaacgctctacgcataa

SEQ ID NO: 7283 - DNA, 448 bp, Chlorella sorokiniana
  unsure (1)..(448): unsure at all n locations; Clone ID: LIB3602-066-Q1-K6-C3
ccgggttgtacccacgcgttccttgnatggccaaaatcaaggcccatgnagctgcgcggcaagggcaagggaggagctgctgcagcagctcaaggagctgaagcaggagctgagcggcctgcgcgtggccaaggtcaccggcggcgcccccaacaagctgtccaagatcaaggtggtgcgcaagggcattgcccgcgtgctgaccgggggcaaccagaagacccgggacgctctgaaggaggcgtacaagggcaagaagtacgtgcccctggacctgcgcgtcaagaagacccgcgccatccgccgccgcctcaccaaggcgcaggccaacgccaagactgagaaggctgccaagaaggcgcgcgccttcccgcagcggaagtacgcgctcaaggcgtgaaggccttggaagcagcccgctgcagccgtgcaggctcacctctaggca

SEQ ID NO: 7284 - DNA, 584 bp, Chlorella sorokiniana
  unsure (1)..(584): unsure at all n locations; Clone ID: LIB3602-066-Q1-K6-C4
gggatggcggccgggcggcgctgcctccagnacaggnaccttcgatactatgcgcctgttgtgtttgcttcgcctgtgctcacatggtactcaccagagggcaatcagggcacgctgggccacgctgcgatgcgctgggttggcctgccctgcagcacgccatggggtaggttaacacagcagcatggcatgacagccgctgctggtaagtgctggtaagccacgcgcaatctcaggcagcaagcaggagcgtgtggcatggccatttcatgtcttgcctgccctgaggacagatgaacagagccacacagcccccaagctgtgttccctctgtcgattccctgcctcaggcttggccaagtgctgggcttgcatggcggcggcggtcacgatgagcacgattgactggccgctgcaccagctgtccaggggccgggtgcagggcgtgcggctggtgccgtcttccgccctgagctacgaccgccagctgggagcggctctgtgggacgcttctgcagacgaggcgggcgtgccgcgggcgtgccagctggcatgatgaggcaggccggtcgcggcagtactgc

SEQ ID NO: 7285 - DNA, 577 bp, Chlorella sorokiniana
  unsure (1)..(577): unsure at all n locations; Clone ID: LIB3602-066-Q1-K6-C5
cggccgcgtgggcgctaccgccccggtaccgtggcgctgcgcgagatccgcaagtaccagaagtctacggagctgctgatccgcaagctgcccttccagcgcctggtgcgcgagatcgcccaggacttcaagaccgacctgcgcttccagagctccgcggtgctggcgctgcaggaggccgccgaggcctacctggtgggcctgtttgaggacaccaacctgtgcgccatccacgctaagcgcgtgaccatcatgcccaaggacatccagctggctcggcgcatccgcggcgagcgcgcgtaagctgcgcgtgcgcctcctgcgcatggcatcaacacggcctcgcagcggctgggcaggtctgcctggaggcgcagtgccagctcgctggcccacagcaccctctcaggctcctgtttagctcttgcgagggccagacagcttaggacctcatgacaccacctcgcctcagcgcctgcctctcttttcatctgtcaacacgtgctccgcacgccgctcccctgccctgacccgaccgcacccgccgnctgccctgccctatcctgctatgtaccct

SEQ ID NO: 7286 - DNA, 614 bp, Chlorella sorokiniana
  unsure (1)..(614): unsure at all n locations; Clone ID: LIB3602-066-Q1-K6-C6
ccggtgtcgacccacgccgtccgttgaagcggcntgccttgcacgccatggtgcggcaccggcctgctctgcggcccttcatacctttgtacctttctgtatcatcttgcagcaatggcagccggctgcatctttctaacatcgtcaccggcccactcgtttgtgccatgcccacctgcctccaacgtcacccttcatcaaccctgacgcaacccatccacctgccacccatccactcaccttccctccgccacaacctctgccacccactcaccacccatcacccgctcaacgccctccatgcaccatcctccccatccaccaaatctgccaccccaaacgcacgtccgccgctgcaccacctgccgccccctcacccgcacccatcttccacccgccacctttcctgccgctcaccgccgcacatcctacctcccacacctcactccatgtccacccttcacccgcgcttcacacagcggctgctgccatgcaaagctgctgccaaacccatccatcatgctcgcacacccactcacccacacgtncaacgtatccagacccattttcaaggcccgactgtacagtgcctttttgcgtccttatgccgatct

SEQ ID NO: 7287 - DNA, 440 bp, Chlorella sorokiniana
  Clone ID: LIB3602-066-Q1-K6-C7
cttcagggctgaaaagagagcgtaaactcgtcaccatggtggccgccaaaaagaccaagaaggctcaggagagcatcaactcccgcctggcgctggtgatgaagtcgggcaagtacacgctgggctacaagaccacgctcaagacgctgcgctccggcaaggccaagctggtgatcatctccaacaactgccccgccgtgcgcaagtcggagatcgagtactacgccatgctgtccaagaccggcgtgcaccactacaccggcaacaacgtggacctgggtaccgcgtgcggcaagctgcaccgcgtgtccgtgctgaccgtcaccgaccccggagactctgacattgtgtccggcatgtaagcggcgcagcatggcatgcgtacccgggcgctgtctgagctgggactgcccctgtataagaaacagaggacggacaaa

SEQ ID NO: 7288 - DNA, 451 bp, Chlorella sorokiniana
  unsure (1)..(451): unsure at all n locations; Clone ID: LIB3602-066-Q1-K6-C8
cccctcgtcggcctcggtcaagnagtggcaaccatgaagaacgacgagggcgagattgtcgatctgtacatcccccgcaagtgctcgtggaccaacaagctgatcacggccaaggaccacggcagcgtgcagatcaacattggccacctggacgagagcggcgtgtacaccaactcgttctccaccttcgcgctctgcggccaggtccgcgtcaagggcgaggctgacagcgctctggaccatctgtgggccaagaagcgggctgagatcggccagtgaagcgctgctgagttctagccgccagccggctgggctacacagctgccagccggcggtgggccagccagccttgggtcggccagtgatgcgctgcgaagcaaagtgctgagcgggcgggcgctccggcgcgccgccgccagccacgcagtgcaagctgtaacgcgcctccttg

SEQ ID NO: 7289 - DNA, 586 bp, Chlorella sorokiniana
  unsure (1)..(586): unsure at all n locations; Clone ID: LIB3602-066-Q1-K6-C9
cggccgcgtgggcaccgggccacaggtagcgtcgcaatggtgcaaatcggcaagaaggcggccgccggccccaagagggcaagaaggccctgaccttcaccatcgactgctccaagcccgtggaggacaagatcatggagatcgcctcctttgagaagttcctggttgacaagatcaaggtgcagggcaagaccggcgtgctgggcgacaacgtcaaggtgacccgcgacaagaccaagatcacggtcaccagcgagatccccatgagcaagcggtacctcaagtacctcaccaagaagtacctgaagaagcacaacgtgcgcgactggctgcgcgtgatcgcctccaacaaggaccgctccgtgtacgagctccgctacttcaacattgcggaccaggctgaggaggaggaggacgaggagtaagctgcttgtctgcacaccagcaggcgagcgccctccccgcagcagcagcgcgcggggggcggagggggtgaatgcagcgcgcgggtgccccctccgnccgcaccccgcccacccgtcttgcttggggccgcccccgcggcggcagcttgtaaggcacacct

SEQ ID NO: 7290 - DNA, 294 bp, Chlorella sorokiniana
  Clone ID: LIB3602-066-Q1-K6-D1
gggcgctccatgcagctcacatccccctggcaggctggctgagcgcttaggctggtcggctgctgcccgttggcctctttgctctcggttttgctccctttgcttccacaacccgcttgcagcaacgttgctcgtgcactgctcccagcagttggtggtgctcaacgatggggtcacccggacacccgacctccgctgttgttgtttcattccagcattgcatgcccacgttgtgttgtttccagagccagtcagcctgtggaccaggcccagcctctgtaacccaagcaagcc

SEQ ID NO: 7291 - DNA, 425 bp, Chlorella sorokiniana
  Clone ID: LIB3602-066-Q1-K6-D10
gccggtgctgctgctgggcaagcagcgcttctccacgtggacatccgcatccgcgtcagggcggcggccaggtgtcccagatctacgccatccgccaggccatctccaaggcattgtggccttctaccagaagtacgtggatgagcagagcaagaacgagatcaaggacatcctgctgacctacgaccgcacgctgctggtggccgaccctcgccgctgcgagcccaagaagttcggtggccacggtgcccgcgcgcggtttcagaaatcttacaggtgaaggctgccccgtgggacggttgggcgcctctggaggcttcttctgcgccgctggcgtggcggcagcggcgtctgcggcctatgcagctgccctggagcagcatgccctcagcgaaagcaccatgagtacaccttgcgtgtgtgac

SEQ ID NO: 7292 - DNA, 477 bp, Chlorella sorokiniana
  unsure (1)..(477): unsure at all n locations; Clone ID: LIB3602-066-Q1-K6-D11
gngcaccaanatgaaccgcacgattgtggtgcgccgcgactacctgcactacatcaagaagtaccagcggtacgagaagcgccacaccaacatctcggcgcacatctcgccctgcttccgctgccacgagggcgacaccgtggtcatcggccagtgccggcccctgtccaagacggtgcgcttcaacgtgctgcgcgtcatccccgcgggctctggcgccaagaagggcttcggctccttctaagcaggctggactaagggcctcttgccttgctggctgaagccctcgacagcagcagcagcagccccagcacggcatgcaagcgctgcagacgccctgctgccctgagtaagcgccgccatgtgccggcggtggcagcagcaccgcccgccttgcatacacctggcccctaggatgccggccacggggcgcccagtagtcgccagacggcggngcgcagcgcatgtaaccgtgtg

SEQ ID NO: 7293 - DNA, 207 bp, Chlorella sorokiniana
  unsure (1)..(207): unsure at all n locations; Clone ID: LIB3602-066-Q1-K6-D12
cccacgcgtccgtcaacgatggggtcacccggnacacccggacctccgctgttgttgtttcattccagcattgcatgcctacgttgtgttgtttccagagccagtcagcctgtggaccaggcccagcctctgtaacccaagcaagccggnnnaaaaaaaaaaaaaaaaaaaaaaaaaaaaaaaaaaaaaaaatattgggggggggag

SEQ ID NO: 7294 - DNA, 415 bp, Chlorella sorokiniana
  unsure (1)..(415): unsure at all n locations; Clone ID: LIB3602-066-Q1-K6-D2
ccctggnagagctcaggnaggcgggcatcccctccaagctggcgcgctccatcggcattgccgtggaccaccgccgccgcaaccgcagcctggagagcctgcaggagaacgccaaccggctcaaggcctacaaggccaacctggtggtgttcccccgccgcgccggcaagcccaaggcgggcgacgcctcggccgaggagctggcgaccgtgcagcagctcaagggcaagctgctgcctctggccaagccggcggcggcgctggagaaggtggcgatcactgcggagatgaagaaggagagcgcgtacggcaagctgcgtgtggagcggatgaacgcccgcatggtgggcgtccgcgccaagcgcgccgccgaggctgctgctgccgagaaagacgcgttagcgccctgcgcgca

SEQ ID NO: 7295 - DNA, 633 bp, Chlorella sorokiniana
  unsure (1)..(633): unsure at all n locations; Clone ID: LIB3602-066-Q1-K6-D3
cacgcgtttgcnagacacagacacgcccaccacaccgggagcccagcgatgcggcggcggatgtcgaggcggatgctgccggatggggtgcaggcggcctggggccagcaggtagtgccgggcccggcggcgatgcggctggccttctgcgccatgcggtgggtgcgctggcagccttcgaggggcggggggctgttgcggcgctgctgcnggcgctggcggcctgtccgcccgaacagctggcactgcgccgctctttttttctctatctgcttctggtgccttgtttacgacaatgttgtcttctctttttctttttttttttttttttttctctttttttccttcttttttttccctcttttctcccttcttccttcttctctttttttccttttctcttctccctttttttttttatctttttcttgtgggggttttttccccccctttttcttttttttttttgttttttttgttttgcttcttttttttttctttttttttttttttttttttttttgtttnttttccttttttntttttttttttttttttttttgttttttttgtttttttttttttttttttttgttttaaagtgtnatttttttttttttttttatttttgtg

SEQ ID NO: 7296 - DNA, 82 bp, Chlorella sorokiniana
  Clone ID: LIB3602-066-Q1-K6-D4
cccacgccgtccgaaaaaaaaaaaaaaaaaaaaaaaaaaaaaaaaaaaaaaaaaaaaaaaaaaaaaaaaaaaaaaaggggcg

SEQ ID NO: 7297 - DNA, 475 bp, Chlorella sorokiniana
  Clone ID: LIB3602-066-Q1-K6-D5
ccgcaccatcaaaagcctcaagtggttcttcatcatctcctgcggcctgctgctcatcattgctgccggactggtggcccagggcgttgtgttcttcacctccgccggtctatttggcaccaccttcccctacgagtaccgcccctggtacaacaccatcctgtggaacacctcgggctgctgcgacatgtacaacaaccaattctggtccatgatgcgcgcgctgtttggctacacggaccagcccacgggcctcaacctgatgtactacctgctgtactgggctattgtgctgagcatcacgatctggaagtggtacaccggcaccctcaccgaccgccgccaggcccagattgacgacctcaagtcgtttgcagtccacctgggagagcgcatggacgccgacgccggcctggacaagggcaagcagctcaccaacagcagcagcagcggcgggcggctcaacagcgacgtg

SEQ ID NO: 7298 - DNA, 309 bp, Chlorella sorokiniana
  unsure (1)..(309): unsure at all n locations; Clone ID: LIB3602-066-Q1-K6-D6
aaaaaaaattctcgtgttgtaaggggggggaaaaaaaaaaaaaaaaaaaacgggccaaaaaaaaaaaccatcatatcaaaacactccacccccctatttctcctcccctttcaacaacaaccccccccccccttctttttccccccttttnnnnctcccctttttttttttgtttgcccccccccccttccccttctttttttccccccccttttttttctcccccccctttttttccacccntcttccccggggccaccccttttctcccccccttttttccctttttcccccttccccttttccccc

SEQ ID NO: 7299 - DNA, 212 bp, Chlorella sorokiniana
  unsure (1)..(212): unsure at all n locations; Clone ID: LIB3602-066-Q1-K6-D7
cctggnacgacctgggcatcccatattaacggcggccagccggttttggacaagcacacacaacatatgagattcccaacctccctgcgcactgcttgtaacaatcctggctccctcttgtacccttgacccgcactcgggcgtggatatgtaacgttccgcgggaaaaaaaaaaagggggggggaaaaaaaaaaaaaagggagaacgtttt

SEQ ID NO: 7300 - DNA, 552 bp, Chlorella sorokiniana
  Clone ID: LIB3602-066-Q1-K6-D8
gtcgtgcaccgcctgcgtgtacacttgctaccacttcctggtcaagaacccggatgtgcactttgtcaaggagctgaagcaggacgagctggcggagagcgcgcggtggtcccagcaggccaaggccgtccagggcaacgtgttccgctggctggcgcagacgcgcgacaccgccgcgggcgagcagaaggacacccgcatcttccgcgtttgagcgcccgccaggctgctgcgctaaatcggcgcgcaataccagccgctcaccgccactcgccgccgctgcgcccccctgtgcttgctctcagggcctgaggccctctgccagtcagccacctggggccggcacccccttgccgctatgatatgcgtccccaaagctggagtgaggcattgcggaacccaatgctgtttttccaccgccctgcttttaatatatctgcctcgaagcacggctgacgggcgagcgctcgcccgccaacgatgataacctgttcttttatgcgtatgtgtagcatcccctctgcattcgctcagcgtgtaacctgtaccaag

SEQ ID NO: 7301 - DNA, 502 bp, Chlorella sorokiniana
  unsure (1)..(502): unsure at all n locations; Clone ID: LIB3602-066-Q1-K6-D9
cgcttcgactccctggntcaccccatagccaccatgcagaccgtcgccgcccgcaccggcgtggccgcctctggcgccacccgccgcgtgacctccatgcgccgcaccgtgaaggccaagcccgtcaagtccgacagcgtgtggtacggcccggaccgccccaagttcctgggccccttctccgatggcctggtgcccgcctacctgaccggtgagttccccggcgactacggctgggacacctctggcctgtccgccgaccccgagaccttcaagaagtaccgcaccatcgaggtcatccacgcccgctgggccatgcttggcgccctgggctgcatcttccccgaggtgctggagaagtacagcggcgtgcagttcggcgaggccgtgtggttcaaggctggcgcccagatcttcgctgacggcggcctgaactacctgggcaactccggcctggtgcacgccccatccatcgtggccaccctggtggtccaggtgctgc

SEQ ID NO: 7302 - DNA, 586 bp, Chlorella sorokiniana
  Clone ID: LIB3602-066-Q1-K6-E1
cggccgcgtggggccgtggccgcaactacgccactgccatggaggcggcgctcaaggtgaaggaggtgtcgtacatgcacagcgagggcatcaacgcgggcgagatgaagcacggcccgctggcgctggtggacgacaagctgccgattgtggtggtgtccaccatggacagcatgcactccaagatggcgggtgtcatccagcagctcatggcgcgcaacggccgcctgattgtgctggccaacgaggaggacgacgagatggtggacattgtggcaggcaagtaccccatcatccaggtgccgcgcgtggacgacgcgctgcaggcggtggtgaacatcatcccgctgcagctgctgtcctaccacctcaccacgctgcgcggcttcaacgtggaccagccgcgcaacctggccaagagcgtcaccgtcaccgaggagtgatgcgggtcgccagcaactccagctagcaatatcccccggacaggcccgtgcgccattcagcttcagcccctgtctccaatgtagccaagctagcgtagccaataggcagtgtcagtgtcagctagtcacggttaggtgtcttt

SEQ ID NO: 7303 - DNA, 226 bp, Chlorella sorokiniana
  Clone ID: LIB3602-066-Q1-K6-E10
gcagcacgctgctgcaggcgccctgcccccgtagactgtcagttgcagagcgctgtgctgctgcctgacgcccacggcagccctcccgctcatccagcttggcatgcaactcacccattgccaatctccccctgtgctgtctatttccttgctcgtttgtcccagcttcctgctgccctctctctgtggcccacaccatacccactctttgcaacattgcagcaca

SEQ ID NO: 7304 - DNA, 532 bp, Chlorella sorokiniana
  unsure (1)..(532): unsure at all n locations; Clone ID: LIB3602-066-Q1-K6-E11
cggtccggatccccggtcgccccgcgtccgccctcccctttttttttttttttttttttttttttttttttttttttttttttttttgccggtccatttaatgggcgttgctgcggctggagggctcggtcacttggcggccttcttcatcgagttgaagcgcgggcacctgcccgctgcgctccatcttctgcaccggggggggggggggccaaagccggtcgcgccgccttggccccgcgccttggccgcttctggccccacgcgctcttggcgaacttggcctcaacctccgtcttctccatcgccttcttcatcacccccttcttgcctaggcgggggatgtccaccgtgaagtcggtgagtgccagccgcttgaagctggtcacgcgccgcgtctggccggggaagtccacccgggccccgttggggctgaccacctcgcttntcgccaccagcttgccggcctccccctccgggtactggacgagcgcccattacccgttcaacgcccctcctgctccattcctcc

SEQ ID NO: 7305 - DNA, 417 bp, Chlorella sorokiniana
  unsure (1)..(417): unsure at all n locations; Clone ID: LIB3602-066-Q1-K6-E12
cccagnaggccaatacaccaataagatgtgctgcgtctggcctgcaccgtgtgcaaggcccagcacatgcacgccatcaagcgctgcaagcacttcgagatcggcggcgacaagaaggtcaaggggctatactagtnaaaaaaaaggagagcggcaggcggagagcatgaccgagaaatggaggcagcggcgcccgctcaccctgggcggcctgctccccgcccggcgcctcgctttggccgcctctggccactcgtacgcctccttgtccatgcccttgtgcttcctgagctgcccaacctggcatgcaagcagcctggccgtctgtaatgccattggcgtgtgaaaaaaaaaaaaaaaaaaaaaaaaaaaaaaaaaaaaaaaaaaaaaaaaaaaaaaaaaaaaaaaagggcggcc

SEQ ID NO: 7306 - DNA, 66 bp, Chlorella sorokiniana
  Clone ID: LIB3602-066-Q1-K6-E2
cgggttgacccagcgtccgtgtgctcgtattttctgttcagttcggctctgtaagcctcggaagcc

SEQ ID NO: 7307 - DNA, 506 bp, Chlorella sorokiniana
  unsure (1)..(506): unsure at all n locations; Clone ID: LIB3602-066-Q1-K6-E3
cgggttttacccacgcgtctctgcgcancggcggcgccgggcagcagcgtgctgggcaagctggcgcgggtgttcaaggagaaggctgctcaggacctggaccgcatccgcnagggcaccagcaagacgcgggagaagctgggggtgattgnggagctgtttacgttctggaacctggactactcggacgagacgctgggggggggggaggacgcactcattatgtccgnctttgggcccnngaccgcgttcatgattgtggccggcctccgggacanggtcatggctgggcngctcangacgggggagccgatccgtgcggngctcanggcctccatcgcatcgctcctgctgcnncncggcggcngcgcggngctggcgctgcccgcggccctncccgctgtgctgctggtggtgggcgtcttcggctgccgcctgcccccccccttcggcccgctggcccgccgttttcctccgcgggcgcctttgtgttgctggctgcgggg

SEQ ID NO: 7308 - DNA, 497 bp, Chlorella sorokiniana
  unsure (1)..(497): unsure at all n locations; Clone ID: LIB3602-066-Q1-K6-E4
cggccgcgtgggnaaaaaaaaaaaaagaaaaaaaaaaaaaaaaaaaaaaaaaaaaaaaaaaaaaggggggggcggtcctttctagggcgaccctagcttccgcccgctgtgcgtcggcctgttgtgttctttttgtgtgggcctcccctgaaattcattgctctggcccgtttttttcaccacgtactgggggggggaaccccctggctttaccttattttaatttgccttgcatcctctccctttttgctcgggtgggtgtctggcggagcgccccgcccctctctctcttcacctgttttgcacgttctgtgtggcgtgtggcgccccctttggcgcggcattttcggcgggggtggtgggggggtctcgcgcggtgggccctttactttggcccgcgccttagcctcctttcctttcgtttttttccttttttttcgcgtcggccgggccgtttttccctgtggtgctctatttggggctctccttttggggtt

SEQ ID NO: 7309 - DNA, 394 bp, Chlorella sorokiniana
  Clone ID: LIB3602-066-Q1-K6-E5
gcaagcccctaaccccccttgtgtgttagcagcctagcgctccctgccgcatggggcccctcggctcacgcggccgtgtgtatttggttctaaaggtttcattttttgatcggcagttttcgttgcaagaagatcccatttgcttgcggggtgccgggcccgccccgcccgcattccttcccactgcatcatatcttggcctgccgctgatgattcggcgttgactgccctttcgtttctctgttgtccccccccttcccgccccctctccccgcacaacgcccgatccttgcccgccccgcgctgtccagcttcctgcgcacttccctgctacccctcacttgctgtcacgaaaacgaatcgacggccgacgaggccctgtaacactgccatg

SEQ ID NO: 7310 - DNA, 632 bp, Chlorella sorokiniana
  unsure (1)..(632): unsure at all n locations; Clone ID: LIB3602-066-Q1-K6-E6
ccgggttctacccacgccgtccggtcgcccaagctgcgcgnaaaagctgccggcngctgatcgaggcggtgcagcaggcgggccaggtggtggcctgggtgtgcgaccccatgcacggcaacacggaggaggtgtcgggctacaagacgcggcgctacgacaacatccgtgccgaggttgaggccttcttcgatgtgcacgacgagtgcggctccgtgcccggcggcatccacctggagatgaccggcgatgatgtgaccgagtgcatcggcggcggcgcgtgcgtgaacgaggtggacctcagcagccgctaccacacgcactgcgacccgcggctcaacgccgagcaggcgctggagatggccttctacgtggcctcccgcctgcggcagcggcgggagcgcatccagaaggagaaggagcaggcggccaagagcaagggcggcgtgctgctgtactgagctgcgcgctgcacagcgcagcgcagccaccagtgcctcgtggccagccgtcagctggggccaccttgctgacgcgggccgcggcagccgctaggtgactgcggaggcagcgtgtgtggcgcccagcaggcatgtgccgtgtgatacaacgcggcgccaatgcctgctagc

SEQ ID NO: 7311 - DNA, 518 bp, Chlorella sorokiniana
  Clone ID: LIB3602-066-Q1-K6-E7
ctggcaggagcaaccacctctgttgcttctgtggcatctgcccttgtgtgctttggacctacttattccagtgaggtgcggtggtcggtttactgcttctacgagttccaccaggcacgtccaagacactaggaacttgtaacgcactgctggcactatcaggatactgacgacactatggtacgtcctacatgaactgaacagccactgactcatggagacatgccctttctattaccaacccaacaagctcactcaccacacggcccttgcgcacattaagatatcttacacatgaacggtggcccatgctacggctgcacgacagtctgagcttcttatgcacccgtgtgctgcaggccacgtgaactgaggaacaggacagctcactgtggctgcttgcgctcagctaacccaccatgactacacctgttcatgaggcacataacgccacccactttgacttcatgcgctgcacacattttgcattggttatgctgctgtatttactgcacact

SEQ ID NO: 7312 - DNA, 324 bp, Chlorella sorokiniana
  Clone ID: LIB3602-066-Q1-K6-E8
ccgggtcgtacccacgccgtccgtataaaaaaaaaaaaaaaaaaaaaaagggggggagaaagaaaaaaaaaaaaaaaaaaaaaaaaaaaaaaaaaaaaaaaaaaaaaaaaaacaaaaaaaaaaaaaaaaacaaaaggggccgcccctctttaagtgcacccaactctaactttccgggggctgcccccttatatgccccctctttttctccccccccttgggggggggggcttggcctttttttttggaccccccccacctttattacccctgggcggggtttccccccttttccccccttggggaacccccccctcttccccc

SEQ ID NO: 7313 - DNA, 571 bp, Chlorella sorokiniana
  Clone ID: LIB3602-066-Q1-K6-E9
gctgtgcggcaactgcgcagcattgcctggggctgctacatgagtgtgtcgtgcatcaaccaggcgccctctgcagcctgcgcagcggccgcggcagcaacagccgccctgcaggccagccaagtgcaggagtgaccagcgctctcctggtcaagtgtcgcttgctgcgccagtcaagctgctttccccaacatgtccgatcctgcagcaccagctgccaatctaatgaatgaactgcgatggccaacgattttatggcatgatacattaacacgccttggctgcaactgcccgtacatctgtacagtggccttcccccttgacccttgaattttcccccacccctcccgcttgcaattcttgtacccgacccgccctgcttgtatgcagcctctgccctgtccctctgcaatgcaacacgcctgtctgccccagttttctcaaatgtttgcctcactcctgtcgtgcgttttcccaccgcctgcttcattacaaatcgcccaggccgtgcgtcattgcagcgccgccctcaggcccgccaggcgctgcctggcctgtaacgaaagccccg

SEQ ID NO: 7314 - DNA, 261 bp, Chlorella sorokiniana
  Clone ID: LIB3602-066-Q1-K6-F1
ggcgaccgctagccggtaacggcggcccaccagccatgccagcctagcagcacagccgccctagcccccttgttggcttccagcccgggcctgacccctatacgtcatgcgatgcacgaggaagaacaaccactgcccattctgcgctctacttgtgccgatccggtgcgcgccctccggcgccgcacgtgtaccaaccgtgtggtctggcactgcctattctgggagtccatgagccccaacggcggcggcaagcccaac

SEQ ID NO: 7315 - DNA, 476 bp, Chlorella sorokiniana
  unsure (1)..(476): unsure at all n locations; Clone ID: LIB3602-066-Q1-K6-F10
cttgggccttttggtactcaagaaggagcacggccacctatggccctctgcccgcatgacccacctaaatcctctattctacgtttccctcgattgatcgtcccttttgctcatccgtcccgccggcacttgccgcaccaggtttcctcgatcagtcctgcttgcatgcccgcacctggctttgttgatccgttcctcctcttgttgatctgtcccctcccacaacagcctgagaacctgcaccgaaccgcaccaaccccaagcatgctgagcacatttccgctcagcacccttccctggatgcctacccccattccaccgcggattgctacgctcacacgatggactcccctcaatttcaatgtgagggccgtactgcattccccagccccctggtcccatgcatgctcctgtaaccgtctgtgcgttgaaaaanaaaaaangaaaaaaaaaaaaaaaaaaaaaaaaggggcggc

SEQ ID NO: 7316 - DNA, 535 bp, Chlorella sorokiniana
  unsure (1)..(535): unsure at all n locations; Clone ID: LIB3602-066-Q1-K6-F11
tcccgggttcgnacccacgccgtccgtaaaaaaaaaaaaaaaaaaaaaaaaaaaggagaaaaaaaaaaaaaaaaaaaaaaaaaaaaaaaaaaaaaaaaaaaaaaaaaaaaaaaaaaaaaaaaaaaaagggcggccgttttttggggttccaagtttaccttccccttccttgccgggttttcgcttttttttggggggccctaatttcatttggggggggggggtttcccaccgtcgccaccgggaaaccccgggggtcccccactttaatcggcttgcgccacttccccttttccccagttgccttatttgcaaaagggcccgacccgtcccccttttccacctttttccccccctgtttggcttttgggcccccccctgtccgggcccttttaccccgccgggggggggggttcccccctttgggcccgttccttttgccagctccctagggccctttcctttgggttttttccttttttttctccccccgtgcgccggttttccccgttttcctttaaatggggggctccct

SEQ ID NO: 7317 - DNA, 529 bp, Chlorella sorokiniana
  unsure (1)..(529): unsure at all n locations; Clone ID: LIB3602-066-Q1-K6-F12
gttgtgcccggctngccggcaagctggnatatgaaccttcaccccggctttgacggcggcgagcccccagnnaagtttgagatnncttcaacttcaaggggcgatgggcgtnnggccctgggcatgtacaacacgngaggagaagcattcgcggcttttgccgagtcgtgccttccagtacgcgctgtgcccgcaagtggccccgctgtacctgtcaaccaagaaccacgatcctgaagaagtacgacggccgcttcatgcagatctttgacgagatctaccgcaccaagtaccagcagcagtttgagaacctgggcatctggtacgagcaccgcctcatcgacgacatggtggcgcagggcctcaagtccagcggcggctttgtgtgggcctgcaagaactacgatggagacgtgcagtcggacattgtggcgcagggctacggctccctgggcctcatgacctctgtgctggtcacccccgacggccgaaccgtggaggcggaggcagcgcacggcacggtgacgcg

SEQ ID NO: 7318 - DNA, 579 bp, Chlorella sorokiniana
  Clone ID: LIB3602-066-Q1-K6-F2
gggcattgaggtcaagtttggcatccacccagtggcagggcgcatgcccggccagctcaacgtgctgctggcggaggcgggcgtgccgtatgacgtggtggaggaaatggacgaggtcaaccccgagatggagtccttcgatgtggctgtggttattggcgccaacgacaccatcaactccgccgccatcgaggaccccaactcggtgattgccggcatgccggtgctggaggtgtggaagaccaagcaggtcatcatcatgaagcgcagtatggcgacgggctatgcgggcgcagacaaccctgtgttttacaagcccaacaccgtcatgctgctgggcgatgccaaggtcatgtgcgacaagctgaagacccagatcttcgagatgctgcacatctaagcgccatcctccacactcggagccgcgccgcttatggccgttgctgcaaggccggcctgcgagccggcctcacttctagccggcttccttctcccctctcgcaccactgctgctgggatctcgaacattttgttgcatctgcgctggctgtgccctcgcaccccactagcactggtttt

SEQ ID NO: 7319 - DNA, 400 bp, Chlorella sorokiniana
  unsure (1)..(400): unsure at all n locations; Clone ID: LIB3602-066-Q1-K6-F4
tccnacgcgtccgaaaaaaaaaaaaaggagagaaaaagaagaaaaaaaaaaaaaaaaaaaaaaaaaaaaaaaaaaaaaaaaaaaaaatataaaataaaaaaataaaaaagggattttaatttttaatatttggggggtttttttttggggtttttttttttttttttgtttttttttttgggcttttttttggggggggggggtttttttttcttctttcttgccttttttttttccttgggtttttttgggtttttttgttggtttcccctttttcatttggcgggggggggttttttttttttctttcttgttgggtttgtttggttttttgttctcctttttttttcttttttttttctgccgtgttgttttttttttttttttttttttgtttttg

SEQ ID NO: 7320 - DNA, 587 bp, Chlorella sorokiniana
  Clone ID: LIB3602-066-Q1-K6-F5
cgcctgcacctgggggaggctgtgcggaccgtgcccaccatcggcagtaatgtggagcaggtcaaggtgtccaagcacatcacgtttgagatctgggacttggcagggcaggccaacctgcggcccagctggtcaaactactaccaagccacgaatgcaattattgtagtcgcggacagcacagacagggcgcggataggcatcctcaagcaggagctgttcaagcagctgcagcacgagcacttgtccaacgcatgcgtgctcatctacgccaacaagcaggacctgaacggcgccatgactgtgccggagctttcggaagggctggacctgatcagcctgaagagccacaactggcacgtgcaggcctcctgcgcgctcacaggggaggggctgctggaggggctgcagtgggtggcggaggagctgcggcgcaaggaggcggcgccacatgcgcagccgctgccgccgcctgggccgccgcagcaaccagcgggtgcagcagcgcagcagccagcggctgcgccgccgcagtgagtgcaccgtgagacacacttctactcgccagccgcgtgcaatgtgccata

SEQ ID NO: 7321 - DNA, 532 bp, Chlorella sorokiniana
  unsure (1)..(532): unsure at all n locations; Clone ID: LIB3602-066-Q1-K6-F6
cggccgcgtgggcggaggtgctcaaccaggtccaggagcggtttgacgtggacatcaagcctctgccagagcacattgacgccagcacctacatgaacgcggcatgaggcggcgccgcaaacctgcggctggtctggccgcctaggccacgcacgccctgctccgctcgcccaccgggggggcgtagccagccgagatgtacccggcgctgttttgaccgcgagcgggcccgcctgccctgccctgcatgacctctgctttctgttttatcatccccccgctcctcctttgctgcttgcttggctttgtctcctcgctctcgtcctcccgtcgccttccatacgttgcatgaccatcgcccgtccctccagggcgccccactccctttcctcgaatgttaaccaaaacacgacctttttttttttttttttttttttttntttgttttttttttttttttttttttttttttttttttttttttttttcttttttttttttttttttttttttttttcttttcttttttttt

SEQ ID NO: 7322 - DNA, 430 bp, Chlorella sorokiniana
  Clone ID: LIB3602-066-Q1-K6-F7
ccagacgcggcagcagagccgaacgcaggcggcggagcgggacgaggcggcggagcggggggagcagcagggcgacggcccgagcacatcgcagcagcagcaagccagcaaagtggtctacctggggcacctgccccacggcttctacgagaagcagcttaaagagtacttctcgcagtttggcaaggtgaccaaggtgcggctgtcccgcaacaagaagagcggcaagagcaagggctacgccttcctcgagttttcgtcggccgaggtggccaagatcgcgtcggcagccatggacggctacatgctgttctcccaaaagctggccagccgggtgctgcccgcggacgaggtgcacccagacatgttcaagggcgccaaccgcgtgttcaagcaggtgccctggcagaagattgagcgggagcgtcag

SEQ ID NO: 7323 - DNA, 376 bp, Chlorella sorokiniana
  Clone ID: LIB3602-066-Q1-K6-F8
cggccctggtggacttccccggccagacgcggcgcgtgatcagcttcaagcggctggcactcaccgacttcacggtggacatcccccgcctcgccaagaagcggtgctgaagaagcgctggaggaggcggaggttgaggccaagttcgccaagagcgcgtggggccagaagctggccaagcgcgcggccaaggcggcgacgaccgactttgaccgctacaaggcggcggtgcagaagatgaagcgcagcgcgcaggtgcgccgcgccttcaactcgctgaagaaggccgccaagtgagcggagctcctcgcagccgcagcagccgcccaattcattgcgcccggctcgccccctggtgtaatgtagcacgcaacgc

SEQ ID NO: 7324 - DNA, 491 bp, Chlorella sorokiniana
  unsure (1)..(491): unsure at all n locations; Clone ID: LIB3602-066-Q1-K6-F9
cggccgcgtgggcaccgctagcgggctgggagaggagctggcggcgctgattgccagcaagcagatcacggcccgcatcgacagccacgccaaggtgctgtacgctcgcaagccggaccagcgcagcagcacgtaccagcaggccatcaagacagcggacgagtacctgcgcaacagccgcgcgctgctgctgcgcgccgcgcttatccagcacgacctcatccagaaaccgtcgggcggtggcggcggtggcggcggcggcgggccggaccgccccgatcgtggagaggggccacccggccggcacggcaggcacaggggcgaccgccgcgcggagcgcggctctcgcttcnatcgcgacagggatgaggagcggggcggcggcatgttcagctcgctcatgggccgcctgggcggcagcatcatgggcgccggcgactgaacggcggcggccagcgcggtcaccactgaatgcggtcctggtgattacc

SEQ ID NO: 7325 - DNA, 533 bp, Chlorella sorokiniana
  unsure (1)..(533): unsure at all n locations; Clone ID: LIB3602-066-Q1-K6-G1
gcgtggngnaaaaaaaaaaaaaaaaaaaaaaaaaaaaaaaaaaaaaaaaaaaaaaaaaaaaaaaaaaaaaaaaaaaaaaaaaaaaaaaaaaaaaatgtgggggcccttttttggggttccaggcttccgtccgcgtgcttgcgccttcttggctcttttttggggtccccttgtttcctttcggggggcggggttttcccccgtcctgcctgggtttcccctggctttcccctttttactcgcctcgctgttcctccccttttcgccggttggcgttctggcgttggggccctccccgtttgcccttcccccccgtttctctccttgtttggcttttgggccgcgccttgttgcggctttttttgcgctttggttttgggggtttcgcgcggtggggccgctcctctggccggggctttttttttctgttttttgtgngncctccccccgttttttcgccgcgttggggggtttctcccttgggggctttttttttcggtggcttcttttttttgttttctttttttttgttt

SEQ ID NO: 7326 - DNA, 553 bp, Chlorella sorokiniana
  unsure (1)..(553): unsure at all n locations; Clone ID: LIB3602-066-Q1-K6-G10
cggncgcgtgggcacatgatgatcaagccctgggactaccacgacgagctggcctccatggacattgttgacaagttccagtaccaggccaccaaccccgacctgggcaaccccgccaccacgcgctgggtggagtgagcaggcacgcagtcgcagcagactggtgcccgggcacacacgccccatcttgttctgcaccctcagctgtcagcaacacgggacctcagccaactccgatcgatcagccgttcctgtcatttcaagcccccctctgcttctctgcgtcagcttttcctagctacgaaaatgaatgccaactactgcccccgaaacccttccgtggcaacagtgaccctgcctgcttgcacccccaagactccaagtgaccccctttctactggccgctgagcatgctggccgcggcgccgtgaggccgcccggccggctgctcatgcctctattcagcctgaatcgacttggtttcatttgccctcagtacgatggttggctgctgcaatcccttttcgtgatgctgccccgtggtgattttgtg

SEQ ID NO: 7327 - DNA, 524 bp, Chlorella sorokiniana
  Clone ID: LIB3602-066-Q1-K6-G11
cacctgcagcctccataactgcctgcctcccttccacccgttgcaaacatgtcttgcaggacgaccccatccagatagagcgtgcgctggagcgcggagaggcgcgcctgcgcgaccacctgcacccagacccttacatcgtgccctaccgcccaggcggcagcatgtacgcgcgcaacccgcccttcgacccgtctgtgcacatccatctggactttggccgcgagggccactgagcgcttgctggcggcggctgcagaccgacgcagggcagccactggagccgctgtcctgccgtcctgcagcagcgcacaaccggcagccctgaagagcctctggatgtagcggcggccctgcagagtctgctagtgcagccgcagtaatgagcctgtgctgtggaaccctgctgcatgttgtcgggcatgggttgtgctgcgccgacgggcctttgcagcctgaggctgctcccgtttcgcatgcggcactctgaactttgccaccctcacactgtaatcctcctggcg

SEQ ID NO: 7328 - DNA, 549 bp, Chlorella sorokiniana
  Clone ID: LIB3602-066-Q1-K6-G12
taaaaaaaaaaaaaaaaaaaaaaaaaaaaaaaaaaaaaaaaaaaacggacgcgtgggaaccacacaccaagtgggtgctggcccgagcccggcttcctggagggcgtgacctccaaggaccgcgccatcctgaagatgcccgccgggaacttcaagtaccccaccgccgagacgcgcatcctgaacgacgtcaacgtgcaggtgtcgttgaacagccgcgtggcggtgctgggccccaacggtgccggcaagagtaccatgatcaacctgctgacgggcaagctggaggcggaatctggcctggtgtggaagcaccccaacctgcgcgtcgtgtacgtggcgcaccacgcgttccaccacattgagaaccacctggacatgacccccaaccagtacatccagtggcgttacgccaccggcgaggaccgcaagtcgctgaacaaggtgtcgcgcaagctcaaggaggaggaggagaaaaaaatggctgaggtcaaggtggtggacggcataaagcccgtggtggacaagctgctgggccgccgcaagcag

SEQ ID NO: 7329 - DNA, 562 bp, Chlorella sorokiniana
  unsure (1)..(562): unsure at all n locations; Clone ID: LIB3602-066-Q1-K6-G2
cccgggttgtacccacgccgtccggtacgacatcaagtngtgcaggtgtcccctgnaccgcgtgnctgaccatcagcgggngagcgcaagggaggagaagcgggaggggtcagaggaggagggcggcactctgcgggtggagcgctcctttggctccttcatgcgccgcttccgcctgccagacaacgttgatgtggagggcatcaaggccagcgcgcgcgacggcgtgctgacggtgacggtgcccaagacggaggagcccaagccaaagtcgatcgacgtgtcggtggagtgaatgccattcgcaagccagtggcttgacgaaacccagacgtaaggagcgcaccgcagcacacggttgctgcnggttgtgacgcacatgttgaagataaacccttatgatctcagaatgaatgactctgtcacgcacagtttcgctgcgcccgcnttgaggcgcggctgccccctttnctgttgggcccatcccgccgtcattccgattttgtttggcccctcctgccggcttccgttgctctgtgtgttggcctgnacgcctttcctt

SEQ ID NO: 7330 - DNA, 622 bp, Chlorella sorokiniana
  unsure (1)..(622): unsure at all n locations; Clone ID: LIB3602-066-Q1-K6-G4
ccgggtcgncnccacgcccgtccgtcccccgccttcagnccatnngggtaagaacnntcgcggtnnatgggnaaagctggcncnngcaagctnngcggctgcnnaccgcaagggacccgagcgcntnngggcggnaccaagggggactacaagaaagtncnngcacctgggnnctccgnagtggnaagaaagnncccttcnngccggcgccttttcgcacgnccccaagggcatncnngtgctggnagaaagnaatcggcngnattgaggggcgcaagcagnncccaactnnnccgctatncnncgcaagnntgcgccgccgtgnnntgcagcntgnatncanagaaancggnnncaagnaagnaattgcnnnggcgtntnncgtgccccannaacgacggctnnngcctcaacttnnncatcgaggnagaaaaacgacgagnngtgctcaaatcgccgnngtttcggcccgccccgcggccaaacgccgtgggtgaatatcnnncccggcgtgccgccttcaaaggtggtgaaagggtgtnnccggtgtgtccccttgctnnggcgctctnntccgcggcaagaaagggagaaaaagccccggaacttaannacggcccgc

SEQ ID NO: 7331 - DNA, 546 bp, Chlorella sorokiniana
  unsure (1)..(546): unsure at all n locations; Clone ID: LIB3602-066-Q1-K6-G5
ggncgcgtgggctttgcgcagttgctaagaggagacaagaggtgactcctctggtgcgcgtgaagagcatcaagaagcgcaccaagcgcttccagcgccaccagagcgaccgtaggatcacggtcaaggagagctggcgccggcccaagggtattgactcgcgtgtgcgccggaggttcaagggatgcggcatcatcatgcccaacattggctacggcaccaacaagaagacccgccacgtgctgcccaacggcttcctcaagtttgtggtgaacaacgtgaaggaccttgagctgctgctgatgcacaaccgcaagtactgcgccgagatcgcgcacaacgtgtccaccctcaagcgcaaggcgattgtggagcgcgcggcggagctgaacattgccctgaccaacggcaacagccggctgcgcagccaggaggacgagtaagctgctcgcccccctgcgtcaccagcagcggcgccagtaccttgggagcatagcagcggcttacattggggtgctactgctcccatgtaaggcaccccaatca

SEQ ID NO: 7332 - DNA, 593 bp, Chlorella sorokiniana
  unsure (1)..(593): unsure at all n locations; Clone ID: LIB3602-066-Q1-K6-G6
ctccttacagcgactgacttgacagttgcaagaattgaatccggactctgcatttacttgacaatacgaaacagttaaaaaaaaaaaaaaaaaaaaaaaaaaaaaaaaaaaaaaaaaaaaaaaaaaaaaaaaaaaaaaaaaaaaaaaaaaaaaaaataaaaaaaaaataaaaaaaaaaataaggggggggggggggaatacactgaaaattccttttacaacatcatcattggtagatccttgctgttgcccacctttttctccttctccctcttcccctttttttctcctggcgttttttcttttatgcccctcccgtttttcctttcctccacttgcccctcctcctttttctcatgtttccctcctttttttctcccctttttcncctctttttttgtggttcctctcttcttttcgcttttccttgtttccgctctactagccccttctttcgattcttttcctcctttcttttttcccttttctccctctttttccttttattttttttttttttttgttttctttttttttttttttttttttccttttttttttttctgatccnttcttaaacttgtttttttttt

SEQ ID NO: 7333 - DNA, 160 bp, Chlorella sorokiniana
  Clone ID: LIB3602-066-Q1-K6-G7
taaaaaaaaagaaaaaaataaaaaaagaaaggaggagagaacaaaaaaaaaaaaaaaaaaaaaaaaaaaaaaaaaaaaaaggggcggcctgttttaggaggacccatgcttacctgccctgtgcgtgcgcacgccttactttcttttatcgggtacccta

SEQ ID NO: 7334 - DNA, 559 bp, Chlorella sorokiniana
  unsure (1)..(559): unsure at all n locations; Clone ID: LIB3602-066-Q1-K6-G8
tgatggtgngaggtctgngacggcagctggctctgtgcgactccggcacagccccttcctggtgctccgacacccagctgctgtcccagctgcgcacggcgctcgaccacctgtggagcacgatcgtgaacaacgctgacgtggccttctccgaggtgtggagctggaagtttgaaaacggcggctaccgcaccgcctccctggcggagacctctgcaaccagcacagagagcaatgcagttcagctgtggagccatgccttcatcgctgttcccggtcccagcggcggtacactgctggagctttgatgtggccactggcggctggggatcccacacgctagcaagcttgcaaggattgcctctggcgagtgcacatagacttactgggaacgagcaaagcagtcgggacctcgccgctgttgagccgagtgggtgggtgcacagcatgctagcagctgcggcagtgacatgcctcccattcattcaagtgtagccatttcttgctgtcaccagtttgccaggagcgtgtaaatgtgaccattgccaacagtccgccc

SEQ ID NO: 7335 - DNA, 635 bp, Chlorella sorokiniana
  unsure (1)..(635): unsure at all n locations; Clone ID: LIB3602-066-Q1-K6-G9
cccggtcgacccagcgtccgcataagctcggcccatcaccttacgggacagcaaaggcggacgagcaacatggggcggcggccggcgcggtgctaccgccagatcaagggcaagccctaccccaagtcgcgcttctgccgcggcgtgcccgaccccaagatccgcatttatgatgtgggcgccaagaaggcgggcgtggacttcttccctcactgcgtccacctggtcagctgggagaaggagaacatctcgtccgaggcgctggaggcggcccgcatcgcggccaacaagtacatggtgaagaacgcgggcaaggacgccttccacctgcgcgtccgtgtgcaccccttccacgtgctgcgcatcaacaagatgctttcgtgcgccggcgcagacaggctgcagacaggcatgcgcggtgcgttcggcaagccatttggtgtgtgcgcgcgcgtgggcatcggtcagatcctgctgtccatccgctgcaaggacacgcacgctgcggtggcggaggaggccctccgtcgtgccaagttcaagttccccgggcgccagaagatcgtggctagncagaactggggcttcactccctacctgcgcgacgattacttggagtggaagcgtgaaggccg

SEQ ID NO: 7336 - DNA, 583 bp, Chlorella sorokiniana
  unsure (1)..(583): unsure at all n locations; Clone ID: LIB3602-066-Q1-K6-H1
aaaaaaaaaaaaaaaaaaaaaaaaaagaaaaaaaaaaaaaaaaaaaaaaaaaaaaaaaaaaaaaaaaaaaaggaaaaaaaaataataaaggatctcatatttaaggggcgcgccctttctaggggctccggtcttccctgccccttctttgctttcttttttcttttcctttcgttccccctttgtgggggggggggccttggctttccccctttttggtcgggtggcccctttcgttctcccgtttttttggcctttgctgccctgtggcgcctttcccggtccgcccctcctttctgtttggcccccccgcttggggcccttcccccctcttttgtgtggccccttttcttttggggcccctcttttgtttcggccttttgtgccctctgctttgggggtgccctcccgggggggtctgtttttttttgcttgcttttttttggccgccccctttgggcgtnnnnccccccggggggtnncggccccttggggcgcttttttcccggggccggctttnttgtgggggggtcgctttttttgtttttttttttttttttttttttttgggccccttcccccc

SEQ ID NO: 7337 - DNA, 361 bp, Chlorella sorokiniana
  unsure (1)..(361): unsure at all n locations; Clone ID: LIB3602-066-Q1-K6-H10
ccggtnccggaatcccccggngtcgnacccacgccgtccgtaaaaaaaaaaaaaaaaaaaaaaaaaaaaaaaaaaaaaaaaagaaaaaaaaaatataaaagaatccaagctaacaaaagcgtgcctgctctaaaatatctctgctttcgtgccccttctttccattcattgcccttctttttagacccttgattctggttaaaccccgggtggttccaaaatgagggggctgggcaaaacattcccttttccccagttaatttccttgtgaaaaggcccctttttatcggcctggccaacacttgctcggccttaatggatagtgctacccgccctgtggccggcctttatgccctgtggg

SEQ ID NO: 7338 - DNA, 584 bp, Chlorella sorokiniana
  unsure (1)..(584): unsure at all n locations; Clone ID: LIB3602-066-Q1-K6-H11
tagttctaggacgcgagcggccgctcgcgatctagaactagtcgcgcgtgcccatcgtgtgcacgggcaacgacttctccaccctgtacgcccccctgatccgcgatggccgcatggnagaagtactactggaacccgactcgcgaggaccgcatcggcgtgtgcatgggcatcttccagaacgacaacgtgagccgcgctgacgtagagacgctggtggatgccttccccggccagtccatcgactttttcggtgcgctgcgcgcccgcgtctacgacgacaaggtgcgcgaatggattggcggcatcggcgtggagaacatgggcaagcggctggtgaacagcaaggagggcaaggttgagttcgacaagccctccatgcccctgtccacgctcatgcactatggcaacctgctggttgaggagcaggaaaacgtgaagcgtgtgcagctggcggacgagtacatgagcggcgcggccctggcgggcgccagcggcagcagcctgcccgagggctaccgcgctcggtagagagttcaagccaatgtcattattgccgttcgcgccatgctgcaccggcagct

SEQ ID NO: 7339 - DNA, 435 bp, Chlorella sorokiniana
  unsure (1)..(435): unsure at all n locations; Clone ID: LIB3602-066-Q1-K6-H12
ggagccttcaggctgagnaagagagcgtaaactcgtcaccatggtggccgccaagaagaccaagaaggctcaggagagcatcaactcccgcctggcgctggtgatgaagtcgggcaagtacacgctgggctacaagaccacgctcaagacgctgcgctccggcaaggccaagctggtgatcatctccaacaactgccccgccgtgcgcaagtcggagatcgagtactacgccatgctgtccaagaccggcgtgcaccactacaccggcaacaacgtggacctgggtaccgcgtgcggcaagctgcaccgcgtgtccgtgctgaccgtcaccgaccccggagactctgacattgtgtccggcatgtaagcggcgcagcatggcatgcgtacccgggcgctgtctgagctgggactgcccctgtntaagaaacagag

SEQ ID NO: 7340 - DNA, 537 bp, Chlorella sorokiniana
  unsure (1)..(537): unsure at all n locations; Clone ID: LIB3602-066-Q1-K6-H2
tccggaaaagccaaanatganatatgttgacccacccacaatgatgctgtacagttgccctttttgcaaaacgaaccttttccgccacgctgcctggcccggcctcgcgcgcggtacgatgcctgccgagggctcgccgcccattttgcatgactccctaggctgctggccagccacgcgcccccaagctgcacctgttttccctgtttcctgcccatctgtgtaccccttcagcccccctgccgacccgttttttcctgcccccatcctcacccaacccacaagccacgcggcccacaaacgcatttggttgcaccgccaccctctcagctgcccttcagagtaccatctgaaagctaagcataacgccaagccactgctcgctcctttcggatcgcccatttggttggttgtcggcccctcttccaatcggccccgcctcgacttgatcctcatcacgtccgcttttgtctgcactcctcaggggcgtgccaattgtgcgcgccgccgttgtatcctgccaactgtaacattaat

SEQ ID NO: 7341 - DNA, 193 bp, Chlorella sorokiniana
  unsure (1)..(193): unsure at all n locations; Clone ID: LIB3602-066-Q1-K6-H3
tctttcccgcgctttcttctgggtgggggttctctcgtgtcccctcccttccctttcctgcccgttgttgtgcccctccttcccctgggtggccctggcgtttcccctctcnttccccttccctctcctcctcctttcccccgctctcctttcccctccccggccggcccctcttccccttcccccccttttc

SEQ ID NO: 7342 - DNA, 519 bp, Chlorella sorokiniana
  Clone ID: LIB3602-066-Q1-K6-H4
cggggaagcgggttccagggcatgtggtggtgctgagcccggactgcgcacgcacggtcgcgtgtgttgaaggccagccgctgcacttgggccaagacacggcaccgcatgcgctctgtctcgcccccaacgcctccgacggagccgggtcgtgtgctggtgtgccgatgagctgcagcggtcccaagtacgatgctcgctcgccaagccttttggagcgccgcctggatggctctgcgcgtgtacttcgcctcgagtggaaggatggcacgtgctttgttgcaaggtttgacctgctgaggtaccgcgaccaacccgcctcgcgcgcccacaagcgcctcaatgtgcagatgtggcaagcggttgaggcgcacgtgcgcctgctggagcggtccggccactgcacatttgttctggagaggggggatgtgaacgccccggcgggcgccaccaggagcgggctacaaaaggacaagaacagggcggagctctagctgcgccagcgtgtgcagactgatg

SEQ ID NO: 7343 - DNA, 579 bp, Chlorella sorokiniana
  unsure (1)..(579): unsure at all n locations; Clone ID: LIB3602-066-Q1-K6-H5
gtggttggnaaatttacacaactgtgctttgatcattgacggcaccgttgtctgctggggttgggatgattacggccagaccagcgccccctccacctaccatgggtctctactctcgcagctgggcaagcctacacctgtgccgtcatgatgagcaatcgtgccgttgtctgctggggtgacgatacgtatggcgggagcacagtccccagcggcatgtcggccgtcttccgagtatgggccgggagagaccacacctgcgccttgcagtatggtggcaccataatctgctggggcgacaatcgcagtgggcagcgcaccgtccctcccggcctgtcgaacgtcctttggattgcgactggaggtgaccacacctgcgctctctcactgggttgatttaacgcgactgccaaacacatgtgaatcccgttttcacttgatgacctggccaagaaagtgaatgccatgtagtaagaccggctggctttcttgccattcacaccagctttagacaaatgaccagaattccgcccatgacatgactcatacacgtttgggcacgtgatacaaggttgccct

SEQ ID NO: 7344 - DNA, 237 bp, Chlorella sorokiniana
  Clone ID: LIB3602-066-Q1-K6-H6
gcacatcctacctcccacacctcactgccatgtgccacgccttcacccgcgccttcacacccagcggctgctgcccatgcaaagctgctgccccaaacccatccatcatgctcgcacacccactcacccacacgtccaacgtatccagacccattttcaaggcccgactgtacagtgcctttttgcgtccttatgccgatctggtaccaggacttaatgtgtaacaaatggtatgtt

SEQ ID NO: 7345 - DNA, 486 bp, Chlorella sorokiniana
  Clone ID: LIB3602-066-Q1-K6-H7
gcctacaccgccttgcccagcggctgccgatccactgatagctgtggggcgggtggcgggccgcctgtttgcgggcagtgtggggtccaccacagcggcggccctcatgggcggcctaggggtgctgcgcctcggcatgggcgtcgtcaagtttggcatgcagctcatgctgttcctggcgctgctctactacctgctggcagcacagagcgaccccctgctggcggccgtgggtgtgctgccgctctccgaggcggggcggcagcgcacggcagtggccctcaactgcgcgctgggaggcgtgctcatctcggccgtgaagctgattgccttccacggctgcttctcatggatcaccttcagagccctggctcttcccctcacatacacggcgtcagtggcctcggcagtgtgcgccctgctgccctttgtgcccacctatgctgtggcgctgccccgctgcgtggtgctgctggcgcaagggcg

SEQ ID NO: 7346 - DNA, 599 bp, Chlorella sorokiniana
  Clone ID: LIB3602-066-Q1-K6-H8
cattcacatcccttcaaatggcctgcaccatcgccgccgtcgcgcccgtggccgtgcgccccgtggctgccacccccctgaagcaggcccgcaacaccttcgcggtccgcaccgtgagcaatgccaccatcaagaagaccaccgccatgcaggtgtggacccccctgaacaacaagttcttcgagaccttctcgtacctgccccccatgaccgacgcggagatctcccgccaggtggactacatcgtgtccaacggctggaccccctgcctcgagttcgcgggcgctgagtctgcctacaccagcaacgagaactgcgtgcgcatgcagaacaccacctgcctgtactacgacaaccgctactggaccatgtggaagctgcccatgttcggctgcaccgatggcggccaggtgctgcgcgaggtgcaggcgtgccgccgcgccttccctgacgcctacatccgcgtggtgggctttgaccccgtgcgccaggtgcaggtgtctggcttcctggtgaaccgccccgcctctgtgcgcgactaccagggcccctccacccgctccgtgtaagcggtctgcggcatgatggccagactgtgc

SEQ ID NO: 7347 - DNA, 617 bp, Chlorella sorokiniana
  unsure (1)..(617): unsure at all n locations; Clone ID: LIB3602-066-Q1-K6-H9
ccggngtcgnacccacgccgtccggnagccgcaggcgcatnnttttggccctgcccggctgnncggttgtggcttggcgcccctgctactganntggccctccactgtccatggtnnngctgctgaacaagnngtggctctgtcccctcgtttgccccttccagtcggccacttgcgctgcntcttnnctttcagtgcgcgcctggcangtggcgctggtgcatggcctgcaaggcggcagggcttggtgcaggtgngaggagctgctctggggcatcgtgcgcatctggctccccgtcaatctcctatttgtagccatgattgccaccagcttctgggcgcttcagaatctgaatgtcgccatgatcacagtgttgaagaatttgaccaacctgttcacgctgggcggcgactatgcgctgtatgggcgaacatacaaggccaatgtgtgggcctgcgtgggcctgatgctgctctcagccatctgcggcggcgctacagatctgagtttcaatgctgttggttacggctggcaggttgtcaactgcttgctcactgcggcatatatgcttgcgatgcgtggggccatggaccgagtggcacaacacaccaacgat

SEQ ID NO: 7348 - DNA, 591 bp, Chlorella sorokiniana
  Clone ID: LIB3602-067-Q1-K1-A1
acggcggcggcggcgcggcagcgaggcgtgctggtgcactgcgatgcagcgcagtcgattggcaaggttgcagtggacgtgaggcagcttggcgtggacatgctgacaattgtgggccacaaattcggcgcacccaaggcgtggcagcgctgttcattcgccgcggagtgtccattgagcggctgctgtgcggcggcggccaagagggcgggcggcgcgccggcaccgaaaatgtgctgctgctggcagggcttggcaaggcggcagagctggtttctcgcgagctgcctgccacctcagcccacatgcgcacgctacgagactcgctgcagtcgcagctgctggcggggctgccaccaggggcagctcgcatcaacggcccagccaaggatggccagcgcctgcccaacacgctcagcatcggcatccggggcatccaagcctcggcgctgctggctgagctgtcggagcagctggcggcctcagcgggcgcagcgtgccacagcggagggcagtcggtgtcggcggtgctgcgtgcgatgggcgtgccgcatgagcacgcgctgggcacgctgcgcctgtcggtgggca

SEQ ID NO: 7349 - DNA, 501 bp, Chlorella sorokiniana
  unsure (1)..(501): unsure at all n locations; Clone ID: LIB3602-067-Q1-K1-A10
ggctgacgaccccgacaccctggctgagctcaagtgaaggagatcaagaacggccgcctcgccatggtgtccatgtttggcttcttcatccaggccattgtgaccggcaagggccccgtgcagaacctgtccgaccacctggcctccccctccaccgacaacttctactccctgtacgccaagaccctggcgtaagcggcctgcacttgctcctgcttgagcctcgactggcggcgggcgtgaccctgtggcagtgcgctcccgcttgcgcccgctgcctgacttgacttcagctccactgttgcaccgaggggatggtgtaacatgtatgctggggaaaaaaaaaaaaaaaaaaaanaaaaaaaaanaaaaaaaaaaaaaaaaaaaaaaaaaaaaaaaaaaaaaaaaaaaaaaaaaaaaaaaaaaaaaaaaaaaaaaagggggggccgtttttaaaggatcaaagtttacttccccgggcttgccaagtaatagtttttt

SEQ ID NO: 7350 - DNA, 497 bp, Chlorella sorokiniana
  unsure (1)..(497): unsure at all n locations; Clone ID: LIB3602-067-Q1-K1-A11
ctacacgcananaaggcgacgcgctctatgcctttgagctggcgctggctctgcagaagctgaacatggacaagctcaaggcctgccactcgctggccgacaagtcggatgacttccaggcccaggatttcctggaggacgagatgagcgcccaggccaaggtggtgaaggagctgggagactatgtgtgcgagctcaagcgcgtgggcaagggccacagcgtcttccactttgatgagaggattgaccagggaggcctgactgctgcggcgtgagctgaccaggcagcaagttgcaaagggcgcagctgcagaaatggcctgcaagcccagcggcgccagcagggcggcaggcgtcggcggcggcaggcgtcggcgtggcatacgcactgatgcccacctgccacacaccactagcttgcgttgaatgatggttgatgaagatggcaacaaaaacagctgttcaatgttccattccttgtaaagcagcgagcattt

SEQ ID NO: 7351 - DNA, 437 bp, Chlorella sorokiniana
  unsure (1)..(437): unsure at all n locations; Clone ID: LIB3602-067-Q1-K1-A12
cagaagaatgaggagataatagttcctcctcaccgcccggcgngaggatgcccgctccgtgaagatcaanaagagcggcgacgtgaccaagttcaaggtccgctgcagccgctacctgtacacgctgtgcgtggcggatgctgacaaggccgacaagctgaagcagtcgctgccccccggcctgcacgtccaggagatctgagcggctgccggccggctcagcgcgctggcgggagcagccgcggcgtccccggcagcatcagtgtgatatgccgtgcagcgccgccacccccagtgtaacttgaggcttcgaaaaaaaaaaaaaaaaaaaaaaaaaaaaaaaaaaaaaaaaaaaaaaaaaaaaaaaaaaaaaaaaaaaaaaaaaaaaataaaaaaaaaataaaatattatataatataanttaaaataaaattaaa

SEQ ID NO: 7352 - DNA, 587 bp, Chlorella sorokiniana
  Clone ID: LIB3602-067-Q1-K1-A2
ccgtagccgtcttcccggtgcatgccttaaggtactggcgtgcggctcgggcggtgaagcagggcgccgacggctgcaaggccgagatggtcactccctatgccgacaactccggcctgatcagcaacgcctgctcggtggacaagtgctccgtgagcctgggcgatgcctacctcgaggtgcagcagggccggccagatgtggagggcctgctgcgcaaggcggcggctgaggccggccccggcaacgtcgagggcgtgtacgctggcggcccgccgccgctcatgaccgctgtgcacctggctgtggcccgcctgaacggcggcgcctgcagcggcggcgcagagggcgcctacctggagcttcacaaggaagcagtggagctctaaaattgaaaagagaggagagctgcagcattgatgctgcctcatgcagcacttactgtgccggtacaggacataagcctgcacacctgccggccgtgcccgccggtgcatggcaacacaacatgtgcagcgtggccggctggacatccagaccagcctgggcagcgcccatgccagcctgagcagcatgccgttaccact

SEQ ID NO: 7353 - DNA, 582 bp, Chlorella sorokiniana
  Clone ID: LIB3602-067-Q1-K1-A3
gtccggcgacccgcgtcgtggggacacgcctaccatgggctgcttacaagtacatcgaggagctttggaagaagaagcagagcgatgtgctccgcttcctcctccgcgtgaggtgctgggagtaccgccagctgcccggcattgtgcgcctcacgcgccccagccgccccgacaaggcgcgccgcatgggcttcaaggccaagcagggctacgttgtctatcgcgtgcgcgtgcgccgcggcggccgcaagaagcccgtgtccaagggtattgtgtacggcaagcctgtgcaccagggtgtgacgcagttgaagccgacccgcaacctgcgcaacgttgctgaggagcgggtgggccgcaagtgcggcggcctgcgcgtcctgaactcgtactgggtgaaccaggacgctgtgtacaagtactttgaggcgatcctggttgaccccgcccacaaggccatccgcaaggacgcgcgcgtcaactggatctgcaaccccgtgcacaagcaccgcgagctgcgcggactgacctcggccggcaagaacttccgcggcctgcagggcaagggccacctgcacacca

SEQ ID NO: 7354 - DNA, 557 bp, Chlorella sorokiniana
  Clone ID: LIB3602-067-Q1-K1-A4
tgcctccgcccctgcttgccgcccatgcctcaccccctctgcattttggagcactgcctgtcggccattcgttcccgcccacccacgttcgttcccgcccacccacattcgtcccccacccacccacattcgtcccccacataactactcagtgcaagccttgatgtgtgaaagtgcttcagcaaaaaaaaagaaaaaaaaaaaaaaaaaataaaaaaaaaagaaaaaaaaaaaaaaagaaaaaatagaaaaaaaaaaaaaaaaaacaaaaagggggggccgtttggaaagaatccaagttaatggcctggaggatcaacagtaatagcttttttttaggggacccaaaatgaaattaattggccggcatttaaaaaggtggcaactggaaaaaccctggtgttccccaattaaagatggttgaagaaaatcccattttaaacagctggcgaataagccaaaaggcccgaagcagatcgccttttccaaaaatggcccaccctaaatggaaaatggaacgccccttgtaggggagcataaagcgcggggggggtggg

SEQ ID NO: 7355 - DNA, 392 bp, Chlorella sorokiniana
  unsure (1)..(392): unsure at all n locations; Clone ID: LIB3602-067-Q1-K1-A5
ctggcctgcctggcacttcccaaccgtgccggcgggggagcacccaaccgggccgccttggccggtcaagccgcaggactatatggatgtgctgctgccgctgggcttcacgctcgtcaaggagtacgctgtgcctgctgagctgtcgcaccctggccgcggcggcaaggaggccatgctgctgttcaggaaggactgatgccagctagccctgactagcgggagagcgacatgagagcgagacgagaagcgcacgccgctgggccgcacagctggagcgtgctgctgcgcacggcgcgtgctgcaacccctattgacagcacatcatctgacccattcatttctggtgcatgcttgcacaacatgccattcttcgttgtaatgtccgcant

SEQ ID NO: 7356 - DNA, 533 bp, Chlorella sorokiniana
  Clone ID: LIB3602-067-Q1-K1-A6
taaaaccccctccccaccccgcagccaagcacgacctgcccagctatctgtccctgctgaagaccgacggcgcgctggtgatggtgggcttgtcgcccgatccgctggagattgcggcattctccctcacctcccgccgccgcatgctggcgggctcgggcatcggcggcatcaaggagactcaggagatgctggacttttgcggcgagcacaacgtgacgtgtgacattgagttgatccagattgactacgtgaacgaggcgatggaccgcctggagaagaacgacgtgcgctaccgcttcgtgatcgacatccagggcagcctggtggcctgagctctgcggcagcagcgccggcagcagcagagcagccgcagctgccgtgcacgttgtgcaccaagagggagtggcgcctgcgcggcaacgctgttaggcttggtgcggccaagcctgcgccgcctgcgccacccttccaagttgaaatgcttgcttgcgtgaaccagctgaagttgcttgcctgtaattcgcaactgc

SEQ ID NO: 7357 - DNA, 495 bp, Chlorella sorokiniana
  unsure (1)..(495): unsure at all n locations; Clone ID: LIB3602-067-Q1-K1-A7
tgtaagttccttgaagcccgggcaggtggtcatccttctgtccggccgctatgccggcaagaaggcggtcatcgtgaagaactacgatgatggcaccagcagccgcccctacggccacgcgctcgtgtgcggcctgtctaaggagccccggaaggtgatcaagcggtcgtccctcaagacccaggcgcgccgctccagcctgaagaccttcatcaaggtggtcaactaccagcacatgatgcccacccgctacacgctggaggtggacctcaagggcgtggtgaccgccgagtgcgtggacaacagcaccaagaaggtggaggccaacaaggaggccaaggcgctgctggaggagaagttcaagagcggcaagaaccggtggttcttcaccaagctccgcttctgagggagtttcttggagagcctaggttgcagcagccgtgacgtgacgtgctccttgccccgagacgccatgtaacgtcacaccccgcnnna

SEQ ID NO: 7358 - DNA, 456 bp, Chlorella sorokiniana
  unsure (1)..(456): unsure at all n locations; Clone ID: LIB3602-067-Q1-K1-A8
cgctgagcagaggggcgtgcagccccaggcagcgtgcagccatgattgaggtggtgctgaacgaccgcctgggcaagaagatccgtgtcaagtgcaacgaggacgacacgattgggngacctgaagaagatggtggcagcccagacaggcacacggccagagaagatccgcatccagaagtggtacacggtgtacaaggaccacatcaccctcagcgactatgagatccacgatggcatgggcctggagctctactacaactgattggtgcaccacagcacaggcatggcggggcaacaaactgccgacataccaatgccaagctggcctgtgccacgctgcattatgccatccccctcctctaatcttctgaatgtgttatttgttgaaatcagctctgtgacttagacactggctaggctgcagcacatctcaatcgtttaaacttgcancana

SEQ ID NO: 7359 - DNA, 572 bp, Chlorella sorokiniana
  unsure (1)..(572): unsure at all n locations; Clone ID: LIB3602-067-Q1-K1-A9
cccagcgtccggttcctgctcatgcacttcgtggaggtgcgccgctggcaggacatccgcaagaaggactccgtgaacgcggaccccttcaccccacctcaagtgcccaaccccgagctgggctaccccggcggccccttcgaccccctgggcttctccaagggcaacttcaaggaggcccagactaaggagatcaagaacggccgcctcgcgatggtggcgtttgcggccttcaccatccaggcccaggccaccggcaagggcccgctgcagaacctgaccgaccacctgtcggcccccttctccaacaactggaccaccaacattggccactgcatggtgcccacctctgtggacgtccagggcctgaccatccccctgagctgcctgtggcccggccagcagatggtgtaaggcggcggcagcagcagcaggggncggcagtgtgcacccacctgcaccgccgccccagccccggccccgcgtgtaactggttaccctccttcgtcccatttccttgctccgcccgccgccgcggcgtgctagcgcacccgcccgggcacctctcccgt

SEQ ID NO: 7360 - DNA, 589 bp, Chlorella sorokiniana
  Clone ID: LIB3602-067-Q1-K1-B1
cccacgggccgtgcagcagcgccggggcagcttgcagatacagaatgccatctcgcggcaacgcaaggaggagactgtggagcagctggagggcctgctgcagtccagcgccgtggtggtgggcctgcggtaccagggcctcaccgtgaagcagctgcaggagttccgccgctcgctggcccaggagtccaagatgctggtctgcaagaacacgctgatgcgcgtggcggtggacaaggtggagggctgggagaacctgaagcccgccactaagggcgacaacgcgtggctgtttgtgaacgaggaggtgattgcggacagcatcaaggcgtacgtggcgtttgagaagaagctggtggatgcgctgcccaaggaggagcgcgcgacggcgcggcccattgacatcagcggcggcgtgatggacggcaagctgatggactacctggaggtgaagaagctggagaagctgcccaccaagctggagctgattgccaccattgcgcgcctcatcaaccaggtgcccaccaaggtggcccgcggcatcaaccaggtgcccaccaagctggccctacggcgtcaaggcgctggc

SEQ ID NO: 7361 - DNA, 441 bp, Chlorella sorokiniana
  Clone ID: LIB3602-067-Q1-K1-B10
gatgtctcccgccctcgtccaggcggggggagcgcccgctgtggcggtcgcaggggcccgccccagcgtggggggccgccccgcctctgctggcgcgcccctgcggcctgcggcgcggtctgcggcccgccagcagtggcgccgtgggggatcggtgcaggcggtggccttcctggtgaagcccgcgacgggcgccaaggccggcggcaaggcgtcgatttgggcggaggacgcgcacaagctgtactatgacatggtgctgggccgtgagtttgaggagatgtgcgcccagatgtactaccgtgggaagatgtttggtttggtgcacctttactgcggccaggaggtggtgtgcactggggtgatcaatgtgtgcctgtgcaaggacgatttgatgtgctctacctaccgagaccacgtgcatgccctgaccaatggcgt

SEQ ID NO: 7362 - DNA, 487 bp, Chlorella sorokiniana
  Clone ID: LIB3602-067-Q1-K1-B11
aaaaaaaataaaaaaaaaagtgaaaaaaaagggaaaaagaagggggaaaaaaaaagaggggaagggagaagggggggggggggggaaggggggggcggggggggggggggggggggggggggaaaaaaggggggaaagggggggggcggggggcgaaaaaaagggggaagaatgggaactattttgacaagaaaaagggggggaaaaagggccaaaaaagagagaaaagggaagggaaaagagcccaaaaaaaaaaagcatcagggggggccagggcgcccaaatggggaaaaaaaaggccctgggggggacccgaggccaaaaacaaagcctgggggaaggggccaaccaaggggcaaacttggggaagggggaagccctagaggagccccttttagggaaagggggggggcaaaagagaaccaacttaaagggcagggcaaaggaaattaaaaggcccagtaaagggaacccaaaaagaaagaaa

SEQ ID NO: 7363 - DNA, 364 bp, Chlorella sorokiniana; identical to SEQ ID NO: 6139
  Clone ID: LIB3602-067-Q1-K1-B12

SEQ ID NO: 7364 - DNA, 487 bp, Chlorella sorokiniana
  Clone ID: LIB3602-067-Q1-K1-B2
gttgaaaacaccaatatgaaccgcacgattgtggtgcgccgcgactacctgcactacatcaagaagtaccagcggtaccgagaagcgccacaccaacatctcggcgcacatctcgccctgcttccgctgccacgagggcgacaccgtggtcatcggccagtgccggcccctgtccaagacggtgcgcttcaacgtgctgcgcgtcatccccgcgggctctggcgccaagaagggcttcggctccttctaagcaggctggactaagggcctcttgccttgctggctgaagccctcgacagcagcagcagcagccccagcacggcatgcaagcgctgcagacgccctgctgccctgagtaagcgccgccatgtgccggcggtggcagcagcaccgcccgccttgcatacacctggcccctaggatgccggccacggggcgcccagtagtcgccagacggcggggcgcagcgcatgtaaccgtgtgcatg

SEQ ID NO: 7365 - DNA, 573 bp, Chlorella sorokiniana
  Clone ID: LIB3602-067-Q1-K1-B3
gcacctccttgtttcttgccctgcaccaaatctccaagcacgatgcaggctgcccagctccaggctcgcgccacccggcccgccgtggctcgccgcaccaccgtgcgcgtgcaggctcagcaggccgcgccccgcgctcaggcccccaagccccagcagtttgctgctggcctggctgccgccttcgctgccgtgaccctggtgctggcgcccgccgccaacgctgctgaggcccgcgcggaagtgaagagcgtggtgtgcgccagcaaccccacctccaagatctgcctcaaggacagcgccaagaactgaggcgtgccagctggactgagcgagcgctgagcccttgctggccgcacctgaggcaggcagccattgctgactgccggggggcaccgggccgccacccgctgcccggcagcatgggcgaggcggcgtgagaaagagaggacttgtgcactgccacacagttttttggacacctgtgctgtaacatatacttgaggagaataactggagtctttactggcgtacgccaagcagaccgacaccaaagttcagggcggccgcttt

SEQ ID NO: 7366 - DNA, 57 bp, Chlorella sorokiniana
  Clone ID: LIB3602-067-Q1-K1-B4
aaaaaaaaaaaaaaaaaaataataaaaaaaaaaaaaaaaaaataaaaaaaaaaaaaa

SEQ ID NO: 7367 - DNA, 564 bp, Chlorella sorokiniana
  unsure (1)..(564): unsure at all n locations; Clone ID: LIB3602-067-Q1-K1-B5
gcaacccacacancgcgcctcccagcccaccagcagcctcgccggtgcacgctgcgctacgtgagttttccctcctgttcctccagtattgcactgccccccagtggctcgcgcttagcagcggcccgcctttttcactgcattgtagattaaacgcgcatgctgcagtgagcagcctgtgtttatgcttgagggccatgttgttgtagtcctggcctctgcctgcaagcctgccgtacgcagacttatctcgcctcaccacacccgcatgccttctccgagcgttcaactgaacctgcacattccgccccgcttcattccgcacccttcatccttcatcttgtgtaatgtgctttgtgttgaaaaaaaaaaaaaaaaaaaaaaaaaaaaaaaaaaaaaaaaaaaaaaaaaaaaaaaaaaaaaaaaaaaaaaaaaaaaaaaaaaaaaaaaaaaaaaaaaaaaaaaaaaaaaaaaaaaaaaaaaaaaangggggggcgccctttttaaaagaaccaaattttactacccggggcttggaaaaaaaaaagttttttttttggggcc

SEQ ID NO: 7368 - DNA, 436 bp, Chlorella sorokiniana
  Clone ID: LIB3602-067-Q1-K1-B6
acataccatttgttacacattaagtcctggtaccagatcggcataaggacgcaaaaggcactgtacagtcgggccttgaaaatgggtctggatacgttggacgtgtgggtgagtgggtgtgcgagcatgatggatgggtttggcagcagctttgcatggcagcagccgctgtgtgaagcgcgggtgaagggtggacatggagtgaggtgtgggaggtaggatgtgcggcggtgagcggcaggaaaggtggcgggtggaagatgggtgcgggtgagggggcggcaggtggtgcagcggcggacgtgcgtttggggtggcagatttggtggatggggaggatggtgcatggagggcgttgagcgggtgatgggtggtgagtgggtggcagaggttgtggcggagggaaggtgagtggatgggtggcaggtggatggtt

SEQ ID NO: 7369 - DNA, 598 bp, Chlorella sorokiniana
  unsure (1)..(598): unsure at all n locations; Clone ID: LIB3602-067-Q1-K1-B7
aaaaaaaaaaaaaaagacggccgctcgcgatctaggaacagatcgagagcggaagaaataaataaaaaaaaaataaaaggaagcgtaaataaaaagggaaaaaaaaaaaaagaaaaagggggggcgtaaaagaatataaatatagtgagataatattaaaagggggggggtgttttttgttttttggggggtttgtttgggtttttttttttnttttttgtttttttttttgtggtgtttttgttttttttggttttttttgtttgttttttttttttttttttgttgttgtgttttgtgtttttttttttttgttgtgttttttttgtttttttttttgttttttgtgtgtggtttgtttgttttttttttttgtgtttttgttggttttgtttttttgttgtttgttttttgttttttttttttttgtttgggtttgttgtttttttgtttttttttttttttttttttttttttttttttggttgtttttttgttttttttttttttttttttttttgtttgttgtttttttttttttttttttgtttttttgtttgttttttttttttttgtttatttttttgtgttgtttttt

SEQ ID NO: 7370 - DNA, 341 bp, Chlorella sorokiniana
  unsure (1)..(341): unsure at all n locations; Clone ID: LIB3602-067-Q1-K1-B8
gcgacatggnngggccatgtgcaaggggnaacatcaagtatgccattagtcaccgcgacgttgtgcagcagtggggccgcttcccgcaccgcaacgccatcctgggtcgggagagcacgcccgaggaggcggcgggcatcgcggccggcacaatacccaagtggtgaagctcctggcctgtcaacagccctgtatacgtatgcggctgtaactttggtgaacagggccgattgatgcctcgccgacaatcttgactgcggcaagcggcaagcggcggtagccgggtgtgtgctctctgatcctttgaagttgtcaatatcctcgaggcttactaagtaatg

SEQ ID NO: 7371 - DNA, 64 bp, Chlorella sorokiniana
  unsure (1)..(64): unsure at all n locations; Clone ID: LIB3602-067-Q1-K1-B9
cccacgccgtccgnaaaaaaaaaaaaaaaaaaaaaaaaaaaaaaggacggaacgatgtagaaga

SEQ ID NO: 7372 - DNA, 442 bp, Chlorella sorokiniana
  unsure (1)..(442): unsure at all n locations; Clone ID: LIB3602-067-Q1-K1-C1
cgctggnagagctcaagcgccgctcaggcctccttccagatgcgggtgctggaggacggccccgtggacgctttctgcggctggtttgacacgcagttcaagggcagcgagcagaacgccaccaccacggaggtcacgctcagcacggcgccagacccgaccggcgccacgcactgggggcagcagtcgttcttcctgcacccgcccatcgagtgcgcggagggcgacgtgttggcctgcgacattgaggtggtgcggcgcaaggacaaccagcggctgatggacgtgctggtgcggcaccgcgtggaggggcgcgccggcagcgagcgcaccagcgccttccacatcgagtagcctagtagcctgtgctggggccctgtgcattgacttctcccccctcccaaccattgtgacgccgagtgccctgtaatcatacactgac

SEQ ID NO: 7373 - DNA, 581 bp, Chlorella sorokiniana
  Clone ID: LIB3602-067-Q1-K1-C10
ccattggtctgtggagctgggagggaggagccttggcttgtgggcggtggtaggcagtcggcgaggctgccagtgtgttttgctccctccgcaggcgctagtggctggaatctcaggagaccaagcggtccacctgctgtggcggctgcagaatggggaggggccgcgggggctcaaccccaaggccgtttcggtcatgattgggaccaatgatgtggcgcacctcagctccatgcatgggtacaacgccagccggatagggcacattgtggcgctgggcgcgcagcagtgcgtgcgcgagctgcagcggcaggtgccacaggccaccgtggtggtgctggcgctgctgcccatggaacccatgatgctgcacgcccctcagcgcatgtttgggcccatggtggcggcagccaatgcggagctgcagcagtatgtggcggcgcagggcagcgaacggctcaagttcaaggactgcggcgccccgttcacacagccagatggcggcgccaacttcgagctgatggaggatggggtgcacccgcgagggcgcggcgcagaggtgctgctgcagtgtatactcc

SEQ ID NO: 7374 - DNA, 481 bp, Chlorella sorokiniana
  Clone ID: LIB3602-067-Q1-K1-C11
gcctttggcctgcgctggtagagcagtcaagaggcgaagggcgacaagcgctaggaggtgtgcacccgcgagtacaccctcaacctgggcaagcggctgcacggcatcaccttcaagaagcgggcgccccgcgccatcaaggagatccagaagtttgcggccaagcagatgggcaccaaggtggtgcgcgtggacgtcaagctgaacaaggcggtgtggagccagggcatcaagaacgtgcccaaccggctgcgcattgtggtgcagcggaagcgcaacgaggacgacgaggactctgaggagatgttctccctggtgaccctggctgaggaccagaacaccaagaagggcgtggttgtgctggaggcgtaagcgcctgccgcacgccgcagcaccaaattgacgtcacctcccaccgcagcagccgcactctcccgacttccctgcacgcgttgcagcagcatgtaacgcgcgcgctagc

SEQ ID NO: 7375 - DNA, 594 bp, Chlorella sorokiniana
  Clone ID: LIB3602-067-Q1-K1-C2
tgcaacgcaaaatgtggcgtgagcgaggctggcggccgctccactgcccacaaccctggccagtgcaaggccagccgccagccggccgctggaactggaccagcagggtgtggaacaggttgtggctgtgagatggcagctccgcaacaacccctagctgaggttggacaaggtgctcaccagccagttaatcaggaggacttcgaggagctcttggcattcgccaccgctcccccgtggaaccggtgcgctgccaatgcaggccgtaacgcgcaagtggatcatggtaggtgctgctaaatacttgtctatctaaatatggccatgcgctgcacaacgcacaagccgggaacggccgcgcactaggcaggtgactggcatcagcagggcggcagctttacatcccgcctgggctttgtgatgcggcgccgtggactcagaccaagtggaatgcggagcaggtacggcggccttggctacatgtggacagaagctggaagtgttaggattgtccaccacctctcacatagtgcttatgcttggctgatgccgcaccccattttttggcgccagccgccgggagcggctcccttg

SEQ ID NO: 7376 - DNA, 588 bp, Chlorella sorokiniana
  Clone ID: LIB3602-067-Q1-K1-C3
cgatcatgtctgcctgctgtttggggacggcttcaacgccaccatcggcggcgtgctgcgcggcgcggggcgacaggagctgggggccctgctcaacctgctgtcatactggggcctgggcctgcctgtggcttacctgcttgccatcaaggcgggctggggcctgaaaggcctctggtgcggtctcgcattctgcacctctgtgcaaggagtggtcatgctcatcgtgctcagccgcttcaactggcagaaagaggcgcaacgagcagctgcggtgctggaaaaagttggcagcggccccatcgatggcggcaatggcggcagcagcagcgcagccaatggcggcttagatgcagcggcggcggaagcgggggcagcaggaggcttgggttcggaggatagcgcagcgctgctgagcgccagcaagcagggcggtcggtcggaccgtaagccccctggcagcttcgcggcactgcatgttgctggccaggacgagcgataatggtgcctttttgatgcttttccggttcggccatgagaccccttgtgtacattaatttcccaacatctcctgatccactctcctga

SEQ ID NO: 7377 - DNA, 581 bp, Chlorella sorokiniana
  Clone ID: LIB3602-067-Q1-K1-C4
tgagacatccaccagccggcagccatggcgcaggcggtggcactccaggcggcggtggcgccggccagccgcagcagcacggcccggcccttcagcagcggcaaggcgctcgtgcccctgcggccggcgcgcgccgaggcgcggcaggccattgtgtgcgcagcggccactgcggagatcaagagcctgggcccggaccggtggaacgacacatactaccccagcggcgcggatgccgctaacgtgcacaagcagtggtacgtgattgatgctgaggggcagacgctgggccgtgtggcctcgctggcggcctactacatccgcggcaagcacctgcccacctacacgccctccatggacatgggcgcctacgtcgtgattgtgaacgcggagaaggtggctgtgactggccgcaaggagaccgacaagttctacttccgccacaccaacggccgccccggcggcggcaagatggaggcgctccgcgacctccgacaacgcctgccggagcgcatcctggagaagtgcgtgaagggcatgctgcccaagggccgcatcgccagcccgctgttcaaccacct

SEQ ID NO: 7378 - DNA, 317 bp, Chlorella sorokiniana
  unsure (1)..(317): unsure at all n locations; Clone ID: LIB3602-067-Q1-K1-C5
gtggnaagccatgctgtcctgcaatgccgctctgctggacggcgccagcctggcgtcctgcctggcgggggtgggccacctgctgacccgccggcaaatagccgccaagctggctcgagaccccaccttcctctaccagttccagccgctggaggggcagtcccgaggggagcgcgatgcagactacctcgccgaaatgtaccgagcggcgtgagggcttgctgcgtgaaagctgcaggctgacggaagttgaaattttgatagaactttatttgtgtatcacctgccttcagacctgatatgtaaccattgcaatt

SEQ ID NO: 7379 - DNA, 581 bp, Chlorella sorokiniana
  Clone ID: LIB3602-067-Q1-K1-C6
taaaaaaaaaaaaaaaaaaaaaaaaaaaaaaaaaaaaaaaaaaaaaaaaaaaaaaaaaaaaaaaaaaaaaaaaaaaaaaaaaaaaaaaaaaaaaaaaaaaaaaaaaaaaaaaaaaaaaaaaaaaaaaaaaaataaaggggggaaaattttagggggtcctttttttgtttccagtttttttgccaccgtgttttgctttttttttgggctcccttttattttattctttggtgcgtttattttgcccgggtttttaatggggaattcccttgggtttccccgttttttcccctttggactctttccctttttcccccgttggtttattcttgatggggccgggccggtcccctttttcaaccgttttcccattttttttgggatttggaccccccctttttccgcctttttttccccggttttttgggggtttcctccccttttttccctttttttttccggccctttggcgggctttttttgcgtttttttttttttttttttcccctttttgtccggttttcccgttttttttttaattgggggtttcctttggggttccgttttggggccttttgggg

SEQ ID NO: 7380 - DNA, 483 bp, Chlorella sorokiniana
  Clone ID: LIB3602-067-Q1-K1-C7
gcttgaccaaccctggtggtgtgacgcggcccgcggctggcatcccgcgcccgcagccgcccgctcgctgctgcttcttgcaagcagcccctagatagcgagcaggcggcacggaagccgggcagccagccgccgcagcttacctgtccatgtgtgcgcctcggcgtgctgttgcagttaccacccgtattttttccctcggttggcgcgcctcccgtgcgtgtactctcccctcccacccttgacggcgacgcgcgcccggctgcccacgcgccccgcgcaattttatgtgccctccgcctttcatcgcagccgcgcattgataagcgacctgagcagaacctgccccctgccgcccccggcaggcgggtgcccctcatttcattcctttccgccgcacaggccgcaacccagtgaccgccgccaatctgctcccctccctcctgcctttgtcccccgatgccttgcaaatctgaccgccca

SEQ ID NO: 7381 - DNA, 102 bp, Chlorella sorokiniana
  Clone ID: LIB3602-067-Q1-K1-C8
gcaggatgcaactttgactcaatcccatgttgcaccgtttccaccaagagcacctctgcttacctgttcatgccctctgcttcagtaattacagctgagcag

SEQ ID NO: 7382 - DNA, 588 bp, Chlorella sorokiniana
  Clone ID: LIB3602-067-Q1-K1-C9
cctcggccggccccgctgggcaagtgaagcccgggccagcgctgcaacgcgctcgccagtagcgctaccgcaccgtgcgcttggatggcgcaggcatgcgcctttgcagccgacgtgcgcctttgcagaccagccagcgcagagatgcgcgcctggtgctgcaccagtgcagtagctgcctagtggcagctctcgcatcccatgcttcccacctgcctgcttcccacctgcctgctcccagtggctgctgccgcctcagcgcagcagcctagcacagttagagagacctaggcggccccgttttcccctgccgcacggttttggtgtttgtgatgtaccccctctctttgttcattcccctcggacctatgacccgcttctctcgctgacgcctcctcgcctcctgaccatgcttgctttgttggcttgaccctgcttttcgcccaccctgtgattgtactacttcttttctcctttagttcgatgtgcccgcggctagcgcctgtcctgcactcatgcccctctgaaaaacaaaacaaaaactgcactgcatgtcactttgcatttccttgcacctcggcatctcct

SEQ ID NO: 7383 - DNA, 598 bp, Chlorella sorokiniana
  unsure (1)..(598): unsure at all n locations; Clone ID: LIB3602-067-Q1-K1-D1
ctctcactctgcgacctggcctgtcctcgcctgcccataccccccttcaccctcctttcgttctttcgttccctggttcgatgcgattcagtgttgccccttgtgtaaccagtgcgnaccatgaaaaaaaaaaaaaaaaaaaaaaaaaaaaaaaaaaaaaaaaaaaaaaaaaaaaaaaaaaaaaaaaaaaaaaaaaaaaaaaaaaaaaaaaaaaaaaaaaaaaaaaaaaaaaaaaaaaggggggggcgcgttttaaaaggaccaaagtttacttccccgggcttgcaaagtaaaagtttttttttggggcccccaaaataaaattaatgggccgtggtttaaaaacgtgggaacgggaaaaaccttggggttcccaaattaaatcgcttggaaaaaaatccccttttccccagtgggggaaatagcaaaaaggcccgccccgatcgcctttccaaaaatttgcccaccctaaatggcaaagggaaccccccttgaaccggccaataaagcccggggggggggggggttacccccaggggaaccgttaaattggcaagcgccttagccccggttcttttggtttttttcctttcttttt

SEQ ID NO: 7384 - DNA, 594 bp, Chlorella sorokiniana
  unsure (1)..(594): unsure at all n locations; Clone ID: LIB3602-067-Q1-K1-D10
ggggcaaccatnaccaagnagcggaggaacggagggcgcaacaagcacggccgcggccacgtcaagcgcgtgcgctgcgagtcgtccgccgccatggtgcccaaggacaaggccatcaagcgcttcatcgtgcgcaacatggtggacgcctcggccatccgcgatctgcaggacgcctgcgccatcgacggctatgcgctgcccaagatctaccgcaaggtctactactgcgtgtctgccgccatccactccaagattgtgcgcgtgcgctccgtcaaggaccgccgcaaccgcgagccgccccgccgccccggctttggcgcccgccccgagcgcaagtgagcgtcggcatggccgcagcagcagcagccgctgaggagcagtgagggcggcgctctgcagccgcgcctcgtcctgcgatgagtcagcaccgcggggccgcccggcgcacggcacgccacccggcaggcagcttatttatgtgcgctgggccgcgcgccggcgccccgtgtaaatcgcgatntgaaaaaaaaaaaaaaaaaaaaannaaaannnnaaaaaaaaaaaaaaaaaaaaaaaaaaaaagggcggccg

SEQ ID NO: 7385 - DNA, 587 bp, Chlorella sorokiniana
  Clone ID: LIB3602-067-Q1-K1-D11
taaaaaaaaaaaaaaaaaaaaaaaaaaaaaaaaaaaaaaaaaaaaaaaaaaaaaaaaaaaaaaaaaaaaaaaaaaaaaaaaaaaaaaaaaaaaaagagaatataaattttaaataaacaaaaattaacaaaccattgttgggggcggccttttttgggtttccattttccgtcccccttttttcggccggggggtttttttttttgggccccttaattccttttcctggcccggctttttcccccttgggttttggacaattcctgggcgtttccccttttttttgctttggccctatttcccccttttttcccgttggggttttggcgtgtggccccaccgggaccccttttcttacggtttctccaccccggggggctttgggtcccccccttttgtggcccttttattcgcggggtttttttttttcccccctagggttcccctccctttttcctgccccttttcccccgttttttcccttttttcccttttttttgcccccctttcggcggtttttcccggggcttttttaatgcggggccccctttagggtttccgctttggggtttacggcctctttcccc

SEQ ID NO: 7386 - DNA, 539 bp, Chlorella sorokiniana
  unsure (1)..(539): unsure at all n locations; Clone ID: LIB3602-067-Q1-K1-D2
gctgaaggagatcaagnacgctcgcctggccatgcttgccttcctgggcattgtggcgcagcacaacgcgcagccgggcagccccctggagcagctgggtgctcacctggccaacccctgngaagaaccacttcatcaacaacggcgtgtccctgcccttcatcaacgacaccgtgcacaatattttgggcggcagcgcatgatgccttgtaatgcagcttccagcgccgatgagctgtgcgtgagcgcagcttgagagaaccgagcaggcgggcacgctgggggccctcccccctgcaagcctgcctgccgcgttgtaccggcgtgccccgcgccagccacgtcaccaccctcctcctcatcccctctatccgcccgccgctgatgggtgcacggagccccgggaccaactcccacgcccgcggcggcagcgccggcctgactgcggccgctgtgctctgagcgccgctgccttgcacccgagaagaaaaacttactgttcctccactaccaagtgatgtaaccgaaagcagagcnna

SEQ ID NO: 7387 - DNA, 561 bp, Chlorella sorokiniana
  unsure (1)..(561): unsure at all n locations; Clone ID: LIB3602-067-Q1-K1-D3
cctcagnccancaaacagcacaccatgcagaccgccctgtgccaggccctgcgcgcccctgtggcctccaaggcccagacccgcagcaacgccggccgcaccgtcgtggtgtgccgcgcgcagcagcagaacctggccgctaaggccgcggctgcgggcgtgtctgtccccgccctgctggcggcgcaccccgctctggcgctggtggacgaccgccttgcgggcgagggcaccggcaagatcctgggcatcaacgacccctccctgttctgggccatcaccattgtgttcaccatcgtgtggggcgtgttctacgtgtccacccgcgagattgacgctgcgtctgaccgcgagaacgacgatgactttggcctgaccctctgagcgggcgcccagcatcaggcggcccgcgcggcgtaggcccacgggcctgccgggcaaattttcgtccttctgttgcagcttgtccgccatgtgtacgctaaatccaaatttcaccccgagaagagaactcgctatgtagcacccttgtgtgaacaccgcccctctggggctcccgac

SEQ ID NO: 7388 - DNA, 559 bp, Chlorella sorokiniana
  Clone ID: LIB3602-067-Q1-K1-D4
gaaaaaaaaaaaaaaaaaaaaaaaaaaaaaaaaaaaaaaaaaaaaaaaaaaaaaaaaaaaaaaaaaaaaaaaaaaaaaaaaaaaaaaaaaaaaaaaaaaaaaataaaaaaaaaaaaaaaaaaaaaggaaatcgggggggggcttttttaggtgcgccgggttttcctcccgcggtctggcgggctttttaggtttttttttggggccccgtatttgccttgcgggggcccaattttttcccggtggaggccggggaacccccgggctttcccgcttttagtgtttttgccctttttccccttttttcccattggggaatttccccgggggtgcccctttgctcgcttttccccacctttttggcccttgggggccctgggggccccccctttttggggcctttctgtggggggggccggggcgttcccccccttgggttcgtttccttttgagggccccttatccccggttttttccgttttttcccttccttttgccccccttttcccggtttttcccggtgggggcgtatcccgggggccccttttgggggcccttt

SEQ ID NO: 7389 - DNA, 297 bp, Chlorella sorokiniana
  unsure (1)..(297): unsure at all n locations; Clone ID: LIB3602-067-Q1-K1-D5
gcttgggtgngacacagcggctggcacccatgtcgaagcgtactaagaaggtcgggatcgtcggcaagtacggcacccgctatggcgcttcgctgaggaagcagatcaagaagatcgaagttagccagcactccaagtacttctngcagncttctgcggcaagttcgccatgaagcgccaggtggttggcatctggaagtgcaaggcctgcaagaagacccaggctggcggcgcgtacgtgctcaacactgcggcgntcccgtgactgtnngcggtccaccattccgccgncctgcg

SEQ ID NO: 7390 - DNA, 577 bp, Chlorella sorokiniana
  unsure (1)..(577): unsure at all n locations; Clone ID: LIB3602-067-Q1-K1-D6
ggggngagcacatatagggcatcgacctcacgccggtggccgcaacaagcgggtgcaccgcaccgctcccaagagcgagaacccctatgtcaagctgctggtgaagctgtaccgcttcctggtgcgccgcaccgagagcgacttcaacaaggtggtgctcaagcggctgttcatgtccaagaccaaccgcccgcccctctcgctgtccaagctcgccaagttcatggccggcaaggacggcaagattgcggtgctggtcggcaccatcaccgacgacgtgcggctgtttgaggtgcccaagctgcgcgtgtgcgcgctgcgcgtcaccgagaccgctcgcgcccgcatcctcaaggctggcggcgagatcatgaccttcgatcagctggcgctggtggcgcccaccggcagcaactgcgtgctgctgcgcggccccaagaacagccgcgaggccgtcaagcacttcggccccgcacccggtgtgcccggctcccacgccaagccgtacgtgcgcagcaagggccgcaagtttgagcgcgcccgcggccgccggaagagcaagggctacaaggcgtaa

SEQ ID NO: 7391 - DNA, 591 bp, Chlorella sorokiniana
  unsure (1)..(591): unsure at all n locations; Clone ID: LIB3602-067-Q1-K1-D7
ctcagccatnatgatcaacgagnagtcggccatcaagatcgactttgagctgcaaggctatgccgccgccagcaacgtgcgcggcacggtcttcctggaaaccatcggcatcaatccaagcgaactgacgctggacatcatcatttgtgacgtcttttgggccggactggtggtgcttgcctttgcgatgctctatctggtcatgccccgccctcgcagcctggcccgcgtgctgcccaccagcagcccgcccgccagcaagtgaagtagcacaatgcccctgccagtgatgcacagcgcctgacgcactctccctgactttagcactacctgcccttatcgagtgtttcacaatgccaccatctcaccatcaccgcattacctttgcatgcatcctcacattgactgttgccccatcagcgattgcatcctgccgattcgtcttgacttggcactcgccgcatcgcactttcttcctactgactgcgcctccagctgcaaggaccactttctcccatcttcctccctgctgcccgctgcatacgttgcatcacagcccatgtgcattttgttacacgtcgagctgcaaaa

SEQ ID NO: 7392 - DNA, 600 bp, Chlorella sorokiniana
  unsure (1)..(600): unsure at all n locations; Clone ID: LIB3602-067-Q1-K1-D8
aacgacggcacctctccgctgctggctgcgctgngaggagggcatcgccgcaccgctgaggccctgctggcagctggggctcaggccagcggcactgcaggcgggcggaccgcgctgcactgggccgcgcaccatggcatggtgaaggtgctggaggagcttttgtccaagggagatgccagcggtgtggatgcagtggatgaagcaggcgagacgccgctgctgctggcggcgcggcgcgggcacacgcaggcggtgcagctgctgttgcagcatggagctgccaccgacaagcccaacagcgcgggcgtcactccactcatcgccgccacgttgttcggccacgatgagacggtggctgcgctgctggccaggggtgcgggcatcactgtgcgggacgcgactttcaagcgcacgccgctgcactttgctgcgctggccgacgccgagcgtgtggcgcgcctgctactgcagcacggtgccgacgctgctgcggtggacaccagcggagcgacgcccatggacctggctgttgagtacgaatgcaccatggtagtgncgtgtgttcaccagccgcggctgagggccagcaagggagcc

SEQ ID NO: 7393 - DNA, 346 bp, Chlorella sorokiniana
  Clone ID: LIB3602-067-Q1-K1-D9
agcgatcaataagctgtggcccgcctgtacgacatccagaccaagaagacaacaccctcatccggcccgacggccagaagaaggcgtacgtgcggctgaccgccgactacgatgcgctggatgtggccaacaagattggcgtgatctaaagcgtgcggctggagcggggcggctcccgcccctcccaacccacccttggcctggtgccaaggcgccggcagcctgcacggccaccccacgcggccggcggcgccggcgcagcagcggcagcggcgcgtcgggcgcagtgcgcagcccggcgcgccaccccggttgcaacaccacgtgctgtaaccaatccttcggc

SEQ ID NO: 7394 - DNA, 317 bp, Chlorella sorokiniana
  Clone ID: LIB3602-067-Q1-K1-E1
ggtgcgagttatcacaatggccacccacaagttggcaacagaaacaagcacggggctctgtaatgagcaggcaaacacaaaccacatcatcatcacaggcagttcaggcggacggagaatcgagccacaacaacaagccaatggaaaacaggtgcagggaagcaatgaggccaaaagcagcaaggggacgagcaacaggtgcgacgcaataaatgatggtcggctgaatgggagtgcaaggtgaaggctggggttcgcccagccccgcaccttgcaaagtaaaaacaggtgaggcgtgggacaaggggcacgggtac

SEQ ID NO: 7395 - DNA, 504 bp, Chlorella sorokiniana
  unsure (1)..(504): unsure at all n locations; Clone ID: LIB3602-067-Q1-K1-E10
ccggtttccccggccaagaacgaggatgccgttcgccaggcaggtctccatcgggcgcgtggcgctcgtccagtacccgngagcggaggccggcaagctggtggtgattagcgatgtggtcagccccaacgcggccctggtggacttccccggccagacgcggcgcgtgatcagcttcaagcggctggcactcaccgacttcacggtggacatcccccgcctcgccaagaaggcggtgctgaagaaggcgctggaggaggcggaggttgaggccaagttcgccaagagcgcgtggggccagaagctggccaagcgcgcggccaaggcggcgacgaccgactttgaccgctacaaggcggcggtgcagaagatgaagcgcagcgcgcaggtgcgccgcgccttcaactcgctgaagaaggccgccaagtgagcggagctcctcgcagccgcagcagccgcccaattcattgcgcccggctcgccccctggtgtaatgtagcacgc

SEQ ID NO: 7396 - DNA, 590 bp, Chlorella sorokiniana
  unsure (1)..(590): unsure at all n locations; Clone ID: LIB3602-067-Q1-K1-E11
ganagccgggngggcaagcggcggcgcagccgcagccgcgatggtggcgagcgcgaccgccgagagcgacgcagccgctccgagtctccgtcccgccgcgacagcaagcggcggcgcagcgagggggaccgcgagcggggcgcctctgagctccgctccgacgcagccggcatcagcggccccgcagaggatgcagcagcggcgggcggcagcgccgatggggtagcagcgcccatggatgcagacggcggcgaggggcgggcgggcggcagcggcggcggggaggaggagcaagagggcggggagggcggcgggctggctttggatgcggagctgacccctgaggagatcatgatgatgcagcagatgggcatcccattcggctttgacacctcccagggcaagaagcacgaggacgctggagccatcaaaatcaagtccacccgcggcgcgcggcaatacatgaaccgccggggcggtttcaatcgttccctggatggcgaggggacaggagagaaggtccgtatcgagtggctgcgcagctaggcccggcccgtcagtgggacgtgaatgcagctcagctgtccaaa

SEQ ID NO: 7397 - DNA, 587 bp, Chlorella sorokiniana
  unsure (1)..(587): unsure at all n locations; Clone ID: LIB3602-067-Q1-K1-E12
gctcccttcagcgagaagcgaccaggnagcggctgcagttcctgtacgaggagtgggcgcacccctactttgtgtccaaggaggagtacggccgcatcatggagggcaccggccagctggagcaggttgagctggccgactggacggcgcccaccatcaactcgtggcgccactccatctgggtgggcgtgtgggacccctggatcgtggtgttcaagggcccacgcatttggtacaagactgtgcgtgagattgtgacgctggagcgcatgcaccgcgcctttgacgacggcctgatggagtacggcatgatgaaggccaagaagaaggccgcgtgaccgctcggaggctgcacttgagccagcctgcaatttcactcgtggcagcatttgccagcggagcagcggcgcattctttccgttcccccttttattgttgacctccattcacgattgcaccaaggttttggcttcagtatcattcgcccatcaacgcaatgagtgcacgttgtcaagaacggcatgaacaaanaaaaaaaaaaaaaaattaaaaaaaatgaaaaaaaaaaataaactaaagaagtaaaa

SEQ ID NO: 7398 - DNA, 392 bp, Chlorella sorokiniana
  unsure (1)..(392): unsure at all n locations; Clone ID: LIB3602-067-Q1-K1-E2
cgnaacggtgatgctggacctggnaactggcaagatcaagnacttcatcaagttcgatgtgggcaacctggccattgccaccggcggccacaacaacggccgtgtgggcaccattgtgcacaaggagaagcacaagggctccttcgacattgtgcacatcaaggacgcggccggccacacctttgccacccgcgtgaacaacgtgtttgtgattggcaagggcgacaagcccatgatctcgctgcccaagggcaagggcatccggcagagcatcctgcaggagcaggccaagctgtacggcaagtctgcctaagcgcaggcgacgccacatgagctgagccgacgccggcgagggccgcccgccggcggcccccacggcagacgcgcagcag

SEQ ID NO: 7399 - DNA, 597 bp, Chlorella sorokiniana
  unsure (1)..(597): unsure at all n locations; Clone ID: LIB3602-067-Q1-K1-E3
tccggcggccgctcgcgatctagnactacaggcatgtcggcaggggcagcaggagcaccaggcagccatgctgctgcgccaaccagtgcagctgcgacgcacctagagcgcatacggcagcggatagctgcagccaaagcagccggggcaactgaggcccagccgactgctccgccgacagctgctgcagccagtggcgttgcggctgccgctgagccaggccgcagccgcagtcccagcaggggtggcgccggcagcggcgatgaggaaaggcggcacaaacgcagcagcagccgacggtcgggacgcagcagaagccccagcaggagccgcagcaggagtaggagcaggggtgccaagcggcggcggcacaagcatggccacaagaagcgcagctgtagcagggagcgcagcaggagcggcgaacgccggcatggctccagccgcaagcagggcagcaagcgcagcaggcgagaccgcagcccgagcaggagcaggagtgcggctgcctcccccacttgtagcaccggccgtgccgccggcagcggcagaggggccgaggctggagcagaggcagcggctgtgcgcccagcggtg

SEQ ID NO: 7400 - DNA, 305 bp, Chlorella sorokiniana
  Clone ID: LIB3602-067-Q1-K1-E4
cagccaaggcatacggctcgcctagtcgctgcagctggcctggccgcagcagctgccgtgttgcctgcctccctcagcatccgctgctgcttggtgggaggcgcctgcagcctggctgcctgcagcagcagcatgtacattgctcttgtaccattgaacttgactacccttgtaacacgtgcccaggatgggctgagttgaaaaaaaaaaaaaaaaaaaaaaaaaaaaaaaaaaaaaaaaaaaaaaaaaaaaaaaaaaaaaaaaaaaaaaaaaaaaaaaaaaggggcggcccgttttaaaagaac

SEQ ID NO: 7401 - DNA, 592 bp, Chlorella sorokiniana
  Clone ID: LIB3602-067-Q1-K1-E6
cttgaggaagcacgttagtgctgagagcgccatgaaaaggtgttcgtgcggacggaccgcacgcatgtgctggacctcgcgtccacggccaccgtggccgatgtgaaggccgccatcgaggcgcgccagggcatccccgccgaggagcagcgggtgatgttcggcggcaagcagctggaggacggcctgtccctggaggcttgcggcatcagcgatgactcccagatgtacatcctgatgcgcctgctgggtggtgccaagaagcgcaagaagaagacctacaccaagccgaagaagcagaagcacaagcacaagaaggtgaagctgcgggtgctcaagttctacaaggtggacgacagcggcaaggtgcagcgcctgcgcaaggtgtgcccccagtgcggccccggcatcttcatggccacccacttcaaccgcgtgtactgcggcaagtgccacctgacgtacgtgtacgacaaggagggccagaccgcctaagcgccccgctcccccctgcggatgcacgcttagcagcagcacacgcggcgggtgcgcccggcatgccggcacaccagccacggagcggcggggcgta

SEQ ID NO: 7402 - DNA, 461 bp, Chlorella sorokiniana
  Clone ID: LIB3602-067-Q1-K1-E7
acataccatttgttacacattaagtcctggtaccagatcggcataaggacgcaaaaggcactgtacagtcgggccttgaaaatgggtctggatacgttggacgtgtgggtgagtgggtgtgcgagcatgatggatgggtttggcagcagctttgcatggcagcagccgctgtgtgaagcgcgggtgaagggtggacatggagtgaggtgtgggaggtaggatgtgcggcggtgagcggcaggaaaggtggcgggtggaagatgggtgcgggtgagggggcggcaggtggtgcagcggcggacgtgcgtttggggtggcagatttggtggatggggaggatggtgcatggagggcgttgagcgggtgatgggtggtgagtgggtggcagaggttgtggcggagggaaggtgagtggatgggtggcaggtggatgggttgggtaaagggtttgaatgaaggtg

SEQ ID NO: 7403 - DNA, 536 bp, Chlorella sorokiniana
  unsure (1)..(536): unsure at all n locations; Clone ID: LIB3602-067-Q1-K1-E8
ggnatgggcaattcgttcgcgaggtgacgtcccgaagacaaaaagccttctgcaagggcaaggagtgccgcaagcacaccatgcacaaggtcactcagtacaagaccggcaaggcgtcgctctacgcgcagggcaagcggcgttacgaccgcaagcagtccggctatggtggccagaccaagcccgtgttccacaagaaggccaagaccaccaagaagattgtgctgcgtctggcctgcaccgtgtgcaaggcccagcacatgcacgccatcaagcgctgcaagcacttcgagatcggcggcgacaagaaggtcaaggggctatactagtaaaaaaaaggagagcggcaggcggagagcatgaccgagaaatggaggcagcggcgcccgctcaccctgggcggcctgctccccgcccggcgcctcgctttggccgcctctggccactcgtacgcctccttgtccatgcccttgtgcttcctgagctgcccaacctggcatgcaagcagcctggccgtctgtatgccttggcgtgtg

SEQ ID NO: 7404 - DNA, 100 bp, Chlorella sorokiniana
  unsure (1)..(100): unsure at all n locations; Clone ID: LIB3602-067-Q1-K1-E9
cccggngtcgacccacgccgtccgnaaaaaaaaaaaaaaaaaaaaaaaaaaaaaaaaaggggcggccgaatctaaaagaatcaaaacttacatacaacaa

SEQ ID NO: 7405 - DNA, 385 bp, Chlorella sorokiniana
  unsure (1)..(385): unsure at all n locations; Clone ID: LIB3602-067-Q1-K1-F1
gcgacgtgnacgacgacatcgtcaccttcaccgattggaccgagaccgacttccgtaccggcgaggctccctggtggaactgagcgggtggcggcagcagcggctgatgaggcgcaatgttggacccccagcagcacaccccgccagcccgcagctccccactcgccgcccgttgagcggcggcggcttgtaaacccggcccagctccgcggctggctgtcctattctttgattgcagctttcgtccccttgtgggctgcgcgcggccggggcggcgggcagcgcggccccgccccctgctgcgctgcaccccgccaatcttatcatcccctaccgagaagaatcgctcaatattctaatgacactcctccgcgtgtgtaagcac

SEQ ID NO: 7406 - DNA, 587 bp, Chlorella sorokiniana
  Clone ID: LIB3602-067-Q1-K1-F11
ctgcactttggcgcaggccccgggctcatcgagactcgtgaggcgttcgtgggcgctagcaggcttgtagagcagcagcagcggtggcggcagcgatgaacaagctgatctttgccgactcggcgggccccgccttccagcggatttacaacaacagccactttgcgctggcggccctgctgcccgcctcgctcgtgtcgccgcaggacggcaccattgccaaggtggcggacgtgggcctggcggcgaccatcactgtgcacaaccacatcgcgctcaactacgtcatttctgactacgtgccgcgggcgctccaggtgcctgttcggggcggcgtgctggcgctcagcgcgctgacggctgtggggctgacgaagctggcgctgtccggccctggcatcggcggcgcagtgaaggagctttggaagaagaagtgaaggcggcacaactggctgctgcacacgtggcaaacttggctgctgccatggccagccacacgaagcttcttagttagtgccaaacacgtccgcccacatgcaacccatgaaatgaaccaacaatgccagcggcagctgccggagtggcgg

SEQ ID NO: 7407 - DNA, 584 bp, Chlorella sorokiniana
  Clone ID: LIB3602-067-Q1-K1-F2
ccggcggcggccgggacagcggcagcaggccggccagggtcggccggggccgccagcggcgggcaagcggctgccagcaacggccacctgatcagccagcggtaccgcacagcaaagaggaggtgagcgggtgggctctccgggcttccagggctggccggccacaggcgcggcgcgggcggcagagtggcgcgccagcggcggccggtcagcggaggatgcctgggacgcagccatggccctggaggtagcgggcagcacccgggaggcacccacccccaagtttggtagcggctggcagtcggcgccagggtcggcaggcgggcagagggtggtggtggacgcagcccgggcaggcagcttgcctgccgacccgctgggggccttgcagcagcagcagcagcggcagcagcagcagcgaggcgcggcggcggtgccccccagcgacccgctgccggtgccggcgccgcgggcggggctgcagctgcgcctcgctgccacgcgcagcctggaccccgacttcaccacctctgccgagcgcacagggtttggggagtcgccggtcgaggcgctgcccgactact

SEQ ID NO: 7408 - DNA, 583 bp, Chlorella sorokiniana
  Clone ID: LIB3602-067-Q1-K1-F3
ctgctgttgccagatcgcacagcccacgagtgcagtggaccgccaagcagtggaccgctttgaggcagccgggcagcgcagcagcatggccgccgcggtggacgtgaagctggaggaccagcagaagatcaaccggttcagccggctcaacacgcggctgcacgagctggaggcgcagctggcggccaagcggtcggatgccgaggacttggaggaggcgggcaacgaggtgatgctgctggacgacgagacagcgccctatgtggtgggcgagtgcctggtgcacctgccacgggagcaggtggaggagcggctgcagacggcgctggacgaggcgcaggaggcaatccagaagctggagggcgacatccggtcgatcaaggggcagatggcggagctcaagacggtgctgtacgccaagtttggcaacagcatcaacttggaagagtgatgtgcgctgctgtggcccgccgcgagcggcttgcgcagccatcagtctgcgcttgactgaccctaccatgtactgttgtcgattatctcttctactagccttcgactatccacaaccatccgttctttacaa

SEQ ID NO: 7409 - DNA, 598 bp, Chlorella sorokiniana
  Clone ID: LIB3602-067-Q1-K1-F4
tgtttttccgctgccccgcaggcgacgaggtgtgcggcgaggatctgtcgcgtggcggccccgcccccaccgactggtcccgcctgctggagccgctgcccttcttcgagctgttcaagcacttcctgcaggtggaggtgctggcgggcagcaaggaggactttgaggtgtgggagggctgggtgcactcccgcatgcgcctccttatcaagagcgcgggcatgatggtggatgtgcggccctggcccaaagccttccgcccgccgccgccccccgagcagcagcagccgccgccgtagcaggccgatggcggcgacccagcgcagcaggcacagcaggcgcagcagcctcgctgcttctacttcatggggctgagcaagaagaaggcgcaggcgtacaacgccttcagcagcgcgctggtcatccctcagtcaaaagtggacctgaccgccccggtgaacgagtttgcgcacaaggtgaggcatggtattgttcattttatggttgattgttggagtgaacctgaccgctcccgtgaacgagtttgcacacaaaggcgagtcggggtgtaagatggctggctggtttcaaacacgtt

SEQ ID NO: 7410 - DNA, 591 bp, Chlorella sorokiniana
  Clone ID: LIB3602-067-Q1-K1-F5
ccgcaacggctttaggcaccatcgcaaccagttccaaagcaccatgtccaaccccaagtcttcttcgatgtgtctgcgggctccacccctctgggccgcatcgtgatggagctgcgtgccgatgtggtgccccggactgcggagaacttccgctgcctgtgcaccggcgagaagggtgtgggccgctccggcaagcccctgcacttcaagggctccaccttccaccgcgtgatcccccagttcatgtgccagggtggtgacttcacccgcggcaacggcaccggcggcgagtccatctacggcgagaagttcgccgacgagggcttccagctcaagcacaccggccccggcgtgctgtccatggccaacgccggccccaacaccaacggctcccagttcttcctgtgcaccgtcgccaccccctggctggacggcaagcacgtggtgtttggcaacgtggtggagggcctggacgtggtgaagaaggtggagagctacggcagccagagcggcaagacctcccagaccatcaccatctctgactgcggccagctggcgtaagccgccctggcggctgcccaagcaagccca

SEQ ID NO: 7411 - DNA, 578 bp, Chlorella sorokiniana
  unsure (1)..(578): unsure at all n locations; Clone ID: LIB3602-067-Q1-K1-F6
ggnatcccctgtagtggagcagcccgccttcagcctgggtaagactcgcggtatgggagctggccgcaagctgcggctgcaccgcaaggacgagcgctgggcggacaaggactacaagaagtcgcacctgggctccgagtggaagaagcccttcgccggcgcttcgcacgccaagggcatcgtgctggagaagatcggcattgaggccaagcagcccaactccgctatccgcaagtgcgcgcgtgtgcagctgatcaagaacggcaagaagattgcggcgttcgtgcccaacgacggctgcctcaacttcatcgaggagaacgacgaggtgctcatcgccggtttcggccgccgcggccacgccgtgggtgatatccccggcgtgcgcttcaaggtggtgaaggtgtccggtgtgtccctgctggcgctcttccgcggcaagaaggagaagccccggaactaaacggcccgcgcccagcagcggcagcagcggcgcgcctcggcaacggggggcgccgcgtccgccagcactgcacctgcctggcggcggcttgggagggcgtgcagcgcatgcagcg

SEQ ID NO: 7412 - DNA, 517 bp, Chlorella sorokiniana
  Clone ID: LIB3602-067-Q1-K1-F7
gctgcgtgtggagcggatgaacgcccgctggtgggcgtccgcgccaagcgcgccgccgaggctgctgctgccgagaaggacgcgtaagcgccctgcgcgcagccgcgactggcagccgcctgtgcggccgggggcgcggtggcggccggcgacgcggcggggggcaggcgatccccaggcccgcccgctgtggagcgcagcgcagcgcagcgcagcatgcatgtcagttggccagccgtgcgcgctgccgcgcccctgtaacacacccctgaaaaaaaaaaaaaaaaaaaaaaaaaaaaaaaaaaaaaaaaaaaaaaaaaaaaaaaaaaaaaaaaaaaaaaaaaaaaaaaaaaaaaaaaaaaaaaaaaaaaaaaaaaaaaaaaaaaaaaaaaaaaaaaaaaaaaaaaaaggggggggccctttttaaagaaaccaaatttaactcccggggccttgcaaagaaaaaacctttttttaaggggaccccaaaaataaaatcaatggcccgttttttaaa

SEQ ID NO: 7413 - DNA, 610 bp, Chlorella sorokiniana
  Clone ID: LIB3602-067-Q1-K1-F8
aaaaaaaaaaaaaaaaaaaaaaaaaaaaaaaaaaaaaaaaaaaaaaaaaaaaaaaaaaaaaaaaaaaaaaaaaaaaaaaaaaaaaaaaaaaaaaaaaaaaaaaaaaaaaaagggggcggccctttttaggggaccccaattttcactcccgccggccttggcaagtttttaattttttttttgggggccccctaaatttaatttcctgggcccggctttttaccaccgttggggccgggggaaaaccccggggtttcccccattttattccgcttgggaacacttccctttttccccggtggggttattaccaaagggccccccccggttcccctttccaaaattttgcccccccttatgggaaatgggccccccccttttgggggccttttaaccccggggggtggggggtttccccccaggggcccctttccttttgccggccccttacccccctttcttttggttttttccctttctttttccccccttttcgcggttttcccccgtaagtttttaattggggggctccttttggggtccctttttagggttttgcggcccttgcccccaaaaaattttttttggggggggggttcccgtgggggcc

SEQ ID NO: 7414 - DNA, 312 bp, Chlorella sorokiniana
  unsure (1)..(312): unsure at all n locations; Clone ID: LIB3602-067-Q1-K1-G1
gcgaggagcagtgggaggcgttcatggcggcggtgcggtgccaggtggcgcgcaagctgcgcgacggcgcctggaagcaggcggctgcctccaaggcgccgcccatgatgtcctgcccccgcttctgagcaagcacgccccacggccccaacaaccctcacggcccacttgcaaggtggcgctggctgctcagaggcgccgcctctggggcggctcccaagccgctcctcccaagggagggtgtggcgggcaccccgtttgcccgcccgcccgccaacctgggcggccgccgcggcgccggccaggcagntg

SEQ ID NO: 7415 - DNA, 510 bp, Chlorella sorokiniana
  unsure (1)..(510): unsure at all n locations; Clone ID: LIB3602-067-Q1-K1-G11
gctgtggggcagcagcggcgggcacacagcctcagnatcgttcctgcctttcctggctgatacgctctgatcagtgcacagactattcgttacgctctaccaaagcttgctgggcacacgagccactcttagctactcggcactgcattgacagaacactcttgactgctgactcgcttgacctcatttgacggttgaccgaactgcttggcatgcacgcatgcatgatttgccggccagatacacaatgcaagcatcgctgcttaaaaaaaaaaaaaaaaaaaaaaaaaaaaaaaaaaaaaaaaaaaaaaaaaaaaaaaaaaaaaaaaaaaaaaaaaaaaaaaaaaaaaaaaaaaaaaaaaaaaaaaaaaaaaaaaaaaaaaaaaaggggggggccgttttaaaggaccaaagtttacttccccttgcttgcaaagtaaaagtttttttttggggcccccaaaattaaatcaatgggccgggttttaaaaacggggggatgggaaaaac

SEQ ID NO: 7416 - DNA, 289 bp, Chlorella sorokiniana
  unsure (1)..(289): unsure at all n locations; Clone ID: LIB3602-067-Q1-K1-G12
tccgccccaccanatgtacctgggtgcacgtcaaacccatgcgctagctgctgactgtggggtgcgggcgcatagcccgctgcccgagagagctccccctcccctgaccaaacgtgaccatgcatcctttccctggcatcctttcccccccttcttttcctggcgtgtcgcccaaccgttgcccgggccgcccattctgcggctcgtggcccattcagctgctgctgcggcctgatcgcaccccatctctggcattccgggtctgtatttgctgtaagcaatatgttac

SEQ ID NO: 7417 - DNA, 561 bp, Chlorella sorokiniana
  unsure (1)..(561): unsure at all n locations; Clone ID: LIB3602-067-Q1-K1-G3
cccgctgnttgggtggaccagcaccgccgacccgctggagacgtggcgcgccagctgtacttccccaccaaggaggacgccatcgcttttgcggagaagaacgggttcacatacgaggtgcaggagtaccacaacccctcgggccagcggccaaagcgcttcctgggctatggagacaacttctccgtgaagcgcaagggcctgcccaccggcggcctgcggtcggagcagaagaagtgaggcggcttcggcgttcgctgggctggccgcacagcagccctgcgtctacaccgccccttgcggacagggcatgtgtgaccccgcgccagctcaactgcctttgcttgcatgcaccccgactgcttccgctgtgctagttccctcgctcccgctgcgcgcgcggtgcacgccatggcatggcaggcctgaggcccgcccctggtgcgcgctgcgcatgctgcgtttgttacatgttggcaccactggggcgcatctgagcgccgctgtgcttcaagcccgccgccgggtatcaatgtggcgcggcgtttggctgtaagaatc

SEQ ID NO: 7418 - DNA, 582 bp, Chlorella sorokiniana
  unsure (1)..(582): unsure at all n locations; Clone ID: LIB3602-067-Q1-K1-G4
cagcggcgcaggcggcttggngagagcctcgcttttcgcccgaggagctgcggggcgtcatcccagccgaccccaagcagccctttgatgtgcgggcggtgctggcgcgcctgctagacggctcccgctttcacgagttcaaagcgcagtacggccgcacgctggtcaccggctttggcagcctgtacggcatgcctgtgggcgtggtggccaacaacggcattctgttctctgaggccgcgctcaagggcgcgcactttgtgcagctgtgcgcgcagcgccgcatccccctgctcttcttgcagaacatcacgggcttcatggtgggccgcaagtacgaggctgggggcattgcaaaggatggagccaagatggtgatggcggtggcaaacgcggacgtgcccaagctgacgctgctcatcggcggctcgtttggcgccggcaactacggcatgtgcgggcgcgcctactcgcctgacttcctctacatgtggcccaatgcgcgaatcagtgtgatgggcggcgagcaggcggcaacagtgctgtcactggttgaagccgagaagcgggcgcgggaggggc

SEQ ID NO: 7419 - DNA, 583 bp, Chlorella sorokiniana
  Clone ID: LIB3602-067-Q1-K1-G5
cagcgccgcaggaggtaaagagcaaagagccggcgggccagggctaccgcgcgcgtacgcgccacatgttcagccgcggcttcaggcagaagggcttcatcccgctgtccacctacctgaccaactacaagctgggtgactatgtggacatcaaggtcaacgccgcggtgcacaagggcatgccccacaagttctaccacggcaagactggctgcgtgtggaatgtgaccaagcgcgccgtgggcgtggagctgctcaagcaggtcaacgggcggtacatcaagaagcgcatccacgtgcgcatcgagcacgtgacccccagccgctgccacgaggagttcctgcgccgctgcaaggagaacgacgcggcgcggcacgcggccaaggtggagggcaagccgctgccggtgctcaagcgccagcccaagggcccccgcaccgaggccatcatgctggagaacgtgaagatggagaccatcacggccatcccctacgatatcctcaaggagggcgtgctctgagcgtgatcggcggcgacgttctgttgattgcggctgcagcttagtgagatgtaaccccgcag

SEQ ID NO: 7420 - DNA, 576 bp, Chlorella sorokiniana
  Clone ID: LIB3602-067-Q1-K1-G6
acccctctctccctgccgctcccaaaccaacccaccaaggtaccgccgcaactaagtgcgcctcaactgcatgagccatccagtgcccgctctcttccccaagcgcaccaacgtttttccatcaaggcctgatgcccgtcagcgccgcaagggtgcgttgtgctgccgagcttatttccgcgtaacctttttcctacacgactggcatggctgcgcgcgtggccctccaattttttcacgagcatcttttccacagatggctgcactctgctggagttcaccccgcctgttttccgtgttccgcctcccttcaccctcacgtgcccagcactacactctgcccctgcccacccatcttccacatttttgcttccggggtgacatcttggtttgagtatccttcggttcctctcctgcgtttcctttcctggctctctctaccccatcaggccctccgagaaagcgtctcttgagcatgctatgtaaccgtcagatctgaaaaaaaaaaaaaaaaaaaaaaaaaaaaaaaaaaaaaaaaaaaaaaaaaaaaaaaaaaaaaaaggggcggccgttcta

SEQ ID NO: 7421 - DNA, 253 bp, Chlorella sorokiniana
  unsure (1)..(253): unsure at all n locations; Clone ID: LIB3602-067-Q1-K1-G7
tctctccacanaacagcgaagagcgcgctaagtggaggaagaagcggatgcggcgcctgaagcgcaagcggcggcggcagcgggccaagtaagcggcctgccccgcagcccagcagcgctgcggcgcctgggcgcagccgcccgctcgcacgcgtgcaacggcgctgcagcggccagccggcgtcacggagtccgggcgcccggcagccgccgatgaaatgtgacggccgagtgtgtaatgctcacgaccgtg

SEQ ID NO: 7422 - DNA, 592 bp, Chlorella sorokiniana
  unsure (1)..(592): unsure at all n locations; Clone ID: LIB3602-067-Q1-K1-G8
ggcttcggaaggtgtgcgaccctgtggnagcaccacgaaatctgcgagctggacgatggaacggtgcacagcgatgataatgagaaggccgcgcccacggagctgcacgccgagtgagcggcgcgcccaagcggcgctgcatgcgcagcggcgtgagcgctgctggtgcaatgtgcctgcccagcacggcggctgccgccgctgagcacggtgaacaacctatctgagcgccgctggcggaagcggctgcacagccagcgccgctccgccgcccgtgcggcgcccactgctttgatgcgcataaacgcctgacagctatttggccacttgcctgctatgcctgatgaacatgagctgccgaaatgcatcctcccgacggcggccgcggagcccgccatccccgcaccgcatgcccgatgcctcgcttgcgttttccatatacacaaataggagcgcccggagggcctccctcgcttttgctttgacccctttgcgcgccagcaagcggtatgaattgcctcgccctctgtgtcacttgcccctgcccacccactcaactcacccgtgtctgagccctcacctccgcagcgcc

SEQ ID NO: 7423 - DNA, 513 bp, Chlorella sorokiniana
  Clone ID: LIB3602-067-Q1-K1-G9
ccccgcgtccgaaaaaaaaaaaaaaaaaaaaaaaaaaaaaaaaaaaaaaaaaaaaaaaaaaaaaaaaaaaaaaaaaaaaaaaaaaaaaaaaaaaaaaaaaagataaaagggttaaaaattttttataggggaacacggtttattggttttgggggggcggggtttttttcaccttgttttcgggggggcatcgcggggggttgcccgttttgttaagggtggagccgtgtcccccttttaccccggtgggggttattggcgtttgtagggcggggcgcggttgtctttttcttgggctggggcgttcttgtttggggggtggggggccctttttgtgtttgtgctttttgttgcggggctgtttggggggtttggcgccgctttgggcggtgctgttttgcggcgccgggggtggccggccccttttccccttggtttccctcttttttttcggccaggttcccgccgctttttcccccttgttgacttttatattgggtgtttttttttttg

SEQ ID NO: 7424 - DNA, 591 bp, Chlorella sorokiniana
  unsure (1)..(591): unsure at all n locations; Clone ID: LIB3602-067-Q1-K1-H1
ggccaccccaggttgacacagcagcgcggcagccatggcgtccaagcgtaagggtggcgtgggcggcaacaagttccgcatgaccctgggtctgcccgtggccgcggtgatgaactgcgccgacaacagcggcgccaagaacctgtacatcatctcggtgcacggctggggcgcgcgcctgaaccgcctgcccgccgccgcccccggcgacatggtcatggcgaccgtgaagaagggcaagcccgacctgcgcaagaaggtcatgcccgcgattgtggtgcggcagcgcaaggcgttccggcggaaggacggcacctacatctactttgaggacaacgcgggcgtgattgtcaacaccaagggcgagatgaagggctccgcgatcaccggccccgtggccaaggagtgcgccgacctctggccccgtgtggcggcagcagccaacaccattgtgtagagcggcggccgtccggctgggcgtcgcggcagcgcggaccacactgcagtacccaccgactgccgcgctcccggcgcagcatgctgtaatgcacatccagcgaanaaaaaaaaaanaaatnaagggcggccgct

SEQ ID NO: 7425 - DNA, 489 bp, Chlorella sorokiniana
  unsure (1)..(489): unsure at all n locations; Clone ID: LIB3602-067-Q1-K1-H10
ctcgctgccgcactgcggcgcaccatgctccttccccacaccgaccctgcaccttggccctcgtattgctgccgtccgtcgcctgccgtgccccgccagcccgcctcatggggcgctccatgcagttcacatccccctggcaggctggctgagcacttaggctagacagcagctgcccgttggcctccctgcacccggttttgctcccttcttgcttccacaacccgcttgcagcaacgttgctcgtgcactgctcccagcagccggtggtgctcaacgatggggtcacccggacacccgacctccgctgttgttgtttcattccagcattgcatgcccacgttgtgttgtttccagagccagtcagcctgtggaccaggcccagcctctgtaacccaagcaagtnaaaaaaaaaaaaaaaaaaaaaaaaaaaaaaaaaaaaaaaaaagggggggccattataaaaggggccgggctttctaacggatc

SEQ ID NO: 7426 - DNA, 524 bp, Chlorella sorokiniana
  Clone ID: LIB3602-067-Q1-K1-H11
tcgggtaggctggtcaggactggcgggtgcttagtactggcagctgcatcggaggtggcatgcatgttagcagcacatgctgaggctgcagcctgccgctgtgccagggcgcacgtggggacccagagcctgcacttgcactgccctcacgcgctagccatgcatgctgcaactggggcggacccctgtgcaaccacattgcattgcaagaatgccgcatgcctcccgtgctgctgctgctgcagggatacaaggacgccattgcctggtgcgacgaaaacggatacaacgtgtaggctgcttctcaggcgccatcatcagtcgcctttgcacacatcaacttgtccctgtctgcttcatttacagttggctttgcccatttggcttctgtctttgcgctccatcgcacgcaacgtgaccgtcgcaacaatgcacaataggcaataaacaagcatgactctgctcctgatcgtgcgccgtattctgcaccttatctatccatggacctgtaacactgctcactg

SEQ ID NO: 7427 - DNA, 591 bp, Chlorella sorokiniana
  unsure (1)..(591): unsure at all n locations; Clone ID: LIB3602-067-Q1-K1-H12
gcgttctggcggcaaggnacattaagtcaccaacgacaacagnagagaattgtcaacctggtggcgcggcaccgcatgaccaccgccatccgcggccagatcgaggccttcttgaaggcttctgggagattgtgccacgcaagctcatctccatcttcaacgaccacgagctggagctgctcatgtggggactgcccgaaatcgatgtggacgacctgcgcgcgcacacagactaccagggctacaccgctgcttcacctgttgtgcgctacttctgggaggtggtgcgcgagatggacaagcaggagctggcgcagctggtgcagtttgtgacgggcacgtccaaggtgccgctgggcggctttgccacgctgcagggcgtgcacggcccccagcgcttctccatacacaaggccttcggcccccccgtccgcctgcccacggcccacacctgcttcaaccagctggacctggttgagtacgagagcaaggagcagctgaaggagcggctgcttactgcgatttcggagggcgcggtcggcttcgggtttgcgtgagcggcagggaagtccacatctcacagcggcgtcg

SEQ ID NO: 7428 - DNA, 395 bp, Chlorella sorokiniana
  unsure (1)..(395): unsure at all n locations; Clone ID: LIB3602-067-Q1-K1-H2
gcgttcgctcccctgcacacactcccggcattttgtgtgtgggcagggagcgtgtcctaactatcacccgcgtctcgtctaacaaataccaaagcgtgccggcgtgcgcgtgcgccctccaatgcacgacgcccggtgccccacacccagtgtacctccccacctcacccacccctatcctctgccctgcaaatgtgattttgttgcgatgctgtttattctcaagacccaaaacgaaccaacatgagtgtgtaagatataaagtagtnaaaaaaaaaaaaaaaaaaaaaaaaaaaaaaaaaaaaaaaaaaaaaaaaaaaaaaaaaaaaaaaaagagaaagacaaaaaaaaaaccaaaaatatagagtcacactaaagtgaaaccattagctcat

SEQ ID NO: 7429 - DNA, 587 bp, Chlorella sorokiniana
  Clone ID: LIB3602-067-Q1-K1-H3
gacacgcgccaccacggacaacagaacgtgttcagactacggagcgacaactggcattcttgaagctggagttttgaagctgcaccaggatgcttgccgtgtgtgaccatcccgttatcacacttacggccccttgcacccacctacccccaggcgtcattctgtacgagctgctgacgtggacggtgccttggggcggcgctgacttctgggaggtgcgttcgtggcaacgaaacacgttagcgactgcacgtttgctggtggtgctggtggtggtggtggtgctgctgctgctgctgctgccggcgccaccgcctacccttgcttcctggtgcatgccgtgccattctttgcaccagcctgatgttcacaaccatctgtgtgcttgctgtctaaaccctccacagctgcccattgcacgtctaccttgttcactctaaacaacgcagattgtgagcgccctcacgcgcggcgagcgcctgcccatccccgaccggccctagctccccggccccgacacactgcgctttgctgggctggcgggctatatcgtgctcatgcatcgctgctgggcacacgagccggcg

SEQ ID NO: 7430 - DNA, 591 bp, Chlorella sorokiniana
  Clone ID: LIB3602-067-Q1-K1-H4
ttgcaagcctccttcacctccacagcccgcagtggtaccccgcagccaagatggccaagcgcgtgatgtttctacttgccgccgccctgctgatttcgggcgcttgggccgccaagcccatcaagcagacctgccagggtgggcagacggaggtcggcgggtgctatcagtgccagaacaagaacacttgcaagatctgctggtcgcccgtcggcgagcgtggctatggcgtgaacaacagcaacaagggcggcaacaagggtggctgtgtgccctgcccccagaactgcgagaagtgccagggcaacgcccaggtttgcacgcgctgcctgcccggctttggcaagggcaacggcaccaagaacccctgcgtgctgtgcgaccccgacacccaaatcgtggaccccaacagcaagaagtgcgtgtgcaacaaggccgccgggtatgtgaagcagggcaaggcctgcgtgctggacgcggctccctaagctgcaacacctggcacagcttgccatcctggattggcaaggccaagcaacccatgactgcttgcaatgcaagcatggatgccctcaattgaggcatgcccca

SEQ ID NO: 7431 - DNA, 79 bp, Chlorella sorokiniana
  unsure (1)..(79): unsure at all n locations; Clone ID: LIB3602-067-Q1-K1-H5
naaaaaaaaaaaaaaaaaaaaaaaaaaaaaaaaaaaaaaaaaaaaaaaaaaaaaaaaaaaaaaaaaaaaaaaaaaaaaa

SEQ ID NO: 7432 - DNA, 561 bp, Chlorella sorokiniana
  Clone ID: LIB3602-067-Q1-K1-H7
gttgagccccactccctgctatcccgtccctgtcttgctcacacctgtagttacgcttgcaccctgcgcccacccgcctgccagcgttgcttgatcatgcgcacgccttccgacccccgctgcgtgcacacccaagtgccgccggggcgtccagcttaccccaccgtagtaccctcgcctcctctgcggtagaccagacatttctctctcccccctatgcccctaggcagccgtgttttatcacgaattatgccgtgtgaggagatgtgcggcaggtggtgtgccgctgtttgctgctgcgtttcacgtttttaattctgggccctcggtgttctgagcgatccacgttttctgagccttgcctgcatgcccacctgccaccattctcaccgcctcacttgcaccccgtcactgccaagcctcgctcgcggtcattagccactccgccgtcacaccctcaccctgctactcccatgcccctgcatctgcctgctgtagacccgcacgctgcggcgctccccctgcatgctttcctgttgccgttgtaacacgtgacgactc

SEQ ID NO: 7433 - DNA, 396 bp, Chlorella sorokiniana
  unsure (1)..(396): unsure at all n locations; Clone ID: LIB3602-067-Q1-K1-H8
accctcctcgaccaggcccaacgacgcttgcttgagcctggacatacctactataaccgttggtccaatctacacactcatatggatggccgcagccccggtacgacagctggcagcggggcacgctccatggcgacgagtgtcgttcctcgcgcagtgctgacggcacgaactagtgaaccataggatagatgctgaggagccgcacacgcgagcgtcgcaaggtgcggctcctaggtaggaagaatagcgtgaaagnactcgggcagtggaagccagcgcgactctccttacatacaaagcatncagcctntctagtgcgtgagattcactctgtgacgagtgcatacagcgtggcgacacacgaccgccgaacgtagcacgctctcgtctctg

SEQ ID NO: 7434 - DNA, 570 bp, Chlorella sorokiniana
  Clone ID: LIB3602-068-Q1-K1-A1
tctcgcttcgagcccgcccctggcccagcccagccgcgccgctccagcgcgctccctcctcgacccttacgctctgcgcccctggacccgacccaaacgcagccatgtccggcaaggcggtgattcgggccacgcagatgttcaccaagaccggccaggccagccgcgtcagcctgggcaaggagattgccatcggcctgaccctgggcgcgtccctcggcttctggtggcagacttatcactgggatctggcgaagaagtgggacaactactacaaggcgctggaggcccagaagtgagctgctcgctggcagccggtgcggcgcgatgatagcatagcgcgccaagcaaagcagttttatgtgcttggcgcaacccacgcgccctgcgccggcccccagtttttgcttgtctcggcggcgcgggcttgcgcagagcggctgagccgcacgccgcagccgcgcgccgcatgatgttccccagcacttgtgcctctcgcttgatgcccccaacgacccacgctgtacccgcccagccctgtttcgggagctgtttgtaacgtatgtacac

SEQ ID NO: 7435 - DNA, 605 bp, Chlorella sorokiniana
  unsure (1)..(605): unsure at all n locations; Clone ID: LIB3602-068-Q1-K1-A10
tgatgagccagcggnaccagcccagtttgtgcgggagttgcgggaggccttcaaccagctggacgcgctgcccatgcccacagtggccgttgtagacggatttgcgttggggggcggcgctgagctggcgctcgcctgcgacgtgcgggtggcggggcgggacgcgcagtttgccttccctgaaacacggctgggcatcatcccgggggcgggcggcacgcagcggctgcctcgcatcgtgggcacctcacgcgccaaggagttgatcttcactggcaggcgcatcgacatgcacgacgcagtgaagatggggctcgctgatcatgccgctgatgagacaggagcggaggatgtggcgttgaacctggcgagggacattgcacggggcggcccgctggccttgcggctggccaagcaggccatctcgctgggcggcgagctggacctgaacagcgggctgaagctggaggaggcgtgctatgcgcaggtgatccccaccaaggaccggcaggagggcctggccgcgtttgcagagaagcggcagcccaagttcacgggcgagtgaggacgaagcatccttcggaacagcgagagaaaagtgcagc

SEQ ID NO: 7436 - DNA, 585 bp, Chlorella sorokiniana
  unsure (1)..(585): unsure at all n locations; Clone ID: LIB3602-068-Q1-K1-A11
cgnacanagtgccgccggtgcagcaattacctggtggggacacgccgcagtttgaagggctggctgcctacattgaactgatgcagcgctgctgggcgcaggaccccgcagcacggccggatttctcggccgttgtggctgagctcaaggcactgctggcctcctgctcagcggactcggtttgacagccacccactgagcacacgtgcgaggcagagctgccggcgagcggcggcagcggcctcagcgcagcggcggcagcgccggcagaacagattctcatcgggaacgaagtcgctgcagctcaaagcagcaagcacacacctgttggacgtaccggcgccctcttttcgcatcgagtgctagtggcatcggcatcacgctccgggcccatgccattacctgcgccatcgtgacttctgcatattctcatcaacgtgacttttgcgtgttgtcattttcggttccgcttctgcgcatttgacctctacatatcagcattattgcgccgcgcgagcggcctgcatatccttccttgagctggcagctgtggcggcaccgccgacggtagtgctgcttggcctc

SEQ ID NO: 7437 - DNA, 595 bp, Chlorella sorokiniana
  Clone ID: LIB3602-068-Q1-K1-A12
gcgttcgctcgcagaacgcccgatggctgtggattggctgctcagactcgcgagtgcctgccaatgagctgctgggcctgggcccgggcgaggtgtttgtgcagcgcaatgtgggcaacctggccacacacaaagacatgaacgtcatgagctgcatggagtacgcggtaacggtgctgaaagtgaagcacatcatcgtgtgcgggcactatggctgcggcgcggtgaagggcgccctcacgctgccctgcaagacgcctggcctggtcaacctgtggatccaagacattcgtgacacacgggacaagaacattgagattctccgcaagctgcgagggccggagcagattgacaagctggtggaactgaacgtcatgcggcaggtgttcaatgtgtgcacgagccccatcgtgcagcaggcctgggacaatggccagacactggcggtgcatggccttgtgtatgcgctgagcgatggcatcctgcagcaactcacgccgcccatcacgtcacttggcgatttcgaggtgttctcccacgagaacgagctggatgggctgcgccacctcagcctgtctgtcctggagcacatgtc

SEQ ID NO: 7438 - DNA, 586 bp, Chlorella sorokiniana
  unsure (1)..(586): unsure at all n locations; Clone ID: LIB3602-068-Q1-K1-A2
gngtacctgcagnacgtgggctgcaaaatcatccccgtgccagtgtattacccggaggtgaaggagattctgggggagccggtggtgcgcgacctgaagcagatccagcagcctgtggacattctggacgtgttccgccgcccgcaagacctggcgggccacctggaggacatcctagccatggagccccggcctgactgcgtctggctgcagagcggcatcagtgaccccgactttgagcagaagctggcggatgcaggaattaaggttgtgcccagccgctgcctcaaggtggaccgagcggcggcgggcagccgcagcgcgctctgaggccggccgctgctcccagcggcagattccaggactcagatcagccaccgtcacacatgcaatgtgtgctcttgtgattcacaattttgcgcagcaccatgtgcatcctgtgacaacccatctgagcctttctcgcagcctgtacatttcatgcctgcctgctgcacaaccgccatcgtgtggcgcagcacatgcattgctgcacagccttgtgacacttgcactttaaaaaaaaaaaaanaaaaaaaaaanaaaa

SEQ ID NO: 7439 - DNA, 578 bp, Chlorella sorokiniana
  Clone ID: LIB3602-068-Q1-K1-A3
cccagccacacagcgcaagcaccgtgcagcgttcgatgacctggtggcggggctgcgctacggcagcgtgtgcatcaacgtgcccacactgatcggcttcgcgaccccaactgacatggggagccttcctgccgggcggcacaccacaggacattggctccggcaactgcgcggtgcacaacacgctgctgctggaccacgtgcagaaaagtgtgctgcgcgcgccctggcgcttccacccaatgcccttctggtcgccatcgcaccgcaatctggaggccgtggggcgggcagcgctgcgcttctgcgccaacccctccatgcgcgccatgctgccgctggcagggcaggccctgcagggctgagctggcggctgtgactgctgtgcagcatcagtggaaacaggagccaaccaaggcacttcagctgacgcctcgccggctgcaacaagagcaggcagcggctttacaggcctgaccgaccagcaacaagttagcataggtgcatatggacagaccaaccggatgaaacggcaataaatttcgaagcaaaaacgccgctcaaatgcgagcgggcag

SEQ ID NO: 7440 - DNA, 603 bp, Chlorella sorokiniana
  Clone ID: LIB3602-068-Q1-K1-A4
cgtgggccaggcccccgccctgctgctcagcagcgacaacggctgcacctacgccgagtgcggcaaggcctctgctctggagcagcccgccgacggcgccagcggcagcctgcccaccaacgccgccgccatggccgcccccgccatcgtgctgaccctgattgtggtcgcctttgtggaggtgctgatgcacttctgctgagcgcctcatctgaagtgctgaggtgatcctgtcaggcccccatgcagcacagcccaaacagcatctgcctggcgcggcacagcaccgctgctcggccggcacgctgttcttgggctgctgtgcattgcagcatgctgctccggcggcgcggcagggcacctccccttcctctgccgcacacaagtatgcccgcccttccacgcctgcttcccaagcaagttaccctaccctgtccctcgtacccccatgccgtggtgccgatctgtgctgccgctgttgcccgcccagcgcagccggcccgcccggccacctcagctgtcgcttttcgcatgttgcagcctcgcccgtttcttctcctgcctttgcctttgtgacgtctcagctgcggtgcgcagccctcg

SEQ ID NO: 7441 - DNA, 584 bp, Chlorella sorokiniana
  Clone ID: LIB3602-068-Q1-K1-A5
atacatgcgcgtgcacgaccgcgtgctgtccacgccgcagtaccgccaggcctttgacctggccaaccagctggcggcgcgggtggagcagacctggctgtacagcacggcgcgcgcccgcctgcccgcctcggctgtggagacggccacgccctacctgaccaccgtggtgcagcacctgaagcccattgccgcgtgagcagcgccgtggtgaggcgcgtgcgcggcacaggccgcagctgctccctgtgggacagcccgccttgccacccgatgcttccaacatatgtagcggtatggccgtgcctgccgtggctgctaggactgggataatgttttgcaacagcagcccactgccaggcgtccaggccatgcccatcggcagccttgcgggcagcagcccagcatgtcagccccctttgaacaatggttcgatagagatcccctgccctgtttcataattgccatcccctagcgctgtacttccgctgccacaaattgattgctgcttgggcgccccatacatacccacatgtcatacatgcgtgctgaacgcccctctgctccagctccgtctgtttcaa

SEQ ID NO: 7442 - DNA, 604 bp, Chlorella sorokiniana
  Clone ID: LIB3602-068-Q1-K1-A7
ctggtgctgtggaccacgcgcgccatcctgcgcgacatttcggacgtgctcatggagcgcgtgcctcgcggcctgtgcatcaagacgatcaatgatgacatgagccgggtggttggagtggaggaggttcatgacctgcatgtgtggtcgctgaccccaggcatcccgctgctgtgcgcgcacatcaacctgtcacccgaggcagaccccaccgcagtgctgctggagctcaacgagtactgccgctccaagggaattggccactccaccatccagctggtggtcaatggtagcgcctgcccctgcgtctgctgatgccgccgctctgcgcacagcgcggctgcagcacgcagcggccgcgccatgcagcggcgcccgcagctggcctgtcgctgccggtagtgcagcggtgcggctgcaatctgtagtgactgccagcaattacgatgccacatgcgtccgctggcgcaaaacagccctgggctgcggcctgcttccccctgaatcgttcggctgcactagcgctgtcttagccatgcaccttgcttctttgcattctatgcctggttttccggcatggctgtattaccatactttttccctt

SEQ ID NO: 7443 - DNA, 588 bp, Chlorella sorokiniana
  Clone ID: LIB3602-068-Q1-K1-A8
cccctatgtgccacccccccttgcagcccccacaccttctccaacctgtactttgtggagctgaccgagaacaagtggcacaagaagaagtggaaggggcccctgcagtacgaggacaagagtggccagctgatgatgctcaacacggacatgtggatgctctgggacaagaagttcaagccctacacgctggagtacgccaagaacgaggacaagttcttcgccgactttgcctctgcatttgccaagctgctggagctgggcgtgcccttccccgagggcgcacaggccgtgtaaggcagccttggcagccgtgaaggcagcagccagctgggccaggcagccttggcggctgtgcaaggcagcgagcggctgccccgctggaggagccgcccactcgctccaaatgaattgatggagggtctaccgccacccgtgtagcaaacaacaccagcgcttccaggacgaatctgctttgcctgaaccgaccagccagccagcaaccagcgctctgccttcccgcggcagccagcacgcagcggcctgcaagccctgtaatttatgcgcttgcccagctcggttttgtgg

SEQ ID NO: 7444 - DNA, 292 bp, Chlorella sorokiniana
  Clone ID: LIB3602-068-Q1-K1-A9
cgccatgctgcaccggcagctgggaactggccggctctgctttacctgcagcttgcaccacctctgcttgcatggtaccccgcatgccatcccttgacatacacacaagcactcgctaaaccagtcaccttgccttgtcttcgcgcctctctgattgtggacggcgcccttgtttcgcggcgtctctgcatggcgcccaagcaaaatgtcctttcatcggcctaagctactcccccttgactagccatctgataccatttcatcctatgtttccactgtaagccagaaggac

SEQ ID NO: 7445 - DNA, 408 bp, Chlorella sorokiniana
  unsure (1)..(408): unsure at all n locations; Clone ID: LIB3602-068-Q1-K1-B1
cagcccctttcgcaactccaccagctccccctgtctgcacacgccatggctcccaggttttcagctggaacttccccggcgcttacgccgtgcagttcatgaccgtggtgtcgtgcaccgcctgcgtgtacacttgctaccacttcctggtcaagaacccggatgtgcactttgtcaaggagctgaagcaggacgagctggcggagagcgcgcggtggtcccagcaggccaaggccgtccagggcaacgtgttccgctggctggcgcagacgcgcgacaccgccgcgggcgagcagaaggacacccgcatcttccgcgtttgagcgcccgccaggctgctgcgctaaatcggcgcgcaataccagccgttcaccgncactcgccgccggtgggcccccctgtgcttgc

SEQ ID NO: 7446 - DNA, 133 bp, Chlorella sorokiniana
  Clone ID: LIB3602-068-Q1-K1-B10
ctttcctgcctgcaaccttgattgtgtaacagccttggttgccaaaaaaaaaaaaaaaaaaaaaaaaaaaaaaaaaaaaaaaaaaaaataataaaaaaaaaaagagaaaaaaaagagggctggagcgattcta

SEQ ID NO: 7447 - DNA, 446 bp, Chlorella sorokiniana
  Clone ID: LIB3602-068-Q1-K1-B11
ccgcggtccgcacgtccagcgctgttttcgtcgactttggcttcccgcccggcgtgcgccccgccctggccggcttcctactcttccagcagctgatcgggccagtggatgaggtgctgggcctgctgtccaacctggtgtctcgtaccttcgagttccaggccgatgcgtttgcggcctcctgtggcaaggcagacgacctcaagagagcgctgctggtgctggacaaggagaacaagggtgccctggcatccgaccctctgtacagcgcctatcactactcgcaccctcccctggtggagcggctggcggcgctggatgctgcgggcaagaaggccttgtgaggcggccgccaggaggtgcacgcagcaatgcagccaaactgcaaagttctaaacacctgatcttgtatattacttcttctgcactgcaaatcttctggctca

SEQ ID NO: 7448 - DNA, 554 bp, Chlorella sorokiniana
  unsure (1)..(554): unsure at all n locations; Clone ID: LIB3602-068-Q1-K1-B12
gcgtttttcgccgtgaanaagagcagtggctgccggcgtgaccgccgccgccgccgcggtgctggccaaccccctggctgcccaggctgctgccacccccagcctgaacaacctgatcggctccgtggtggcgggcggtctggtgctggccgccattgctggcgccatcaccgcggtctccaacttcgactccatccgccgctaagctatgcggactggtgtaccgcaccccgagaagagaatcaaccccttgcttgctaggccctgcttagagtttttgctgctcagcgctggggcgccggcgggacgccctatgtcggacaacacctgtgtgcactaaagaggaattttatcctgtaacttcccggcccaaaaaaaaaaagaaaaaaaaaaagaaaaaaaaaaaataaaactaaataaagaaaaaaagttgcaccaccatctgaaatgctatcaccctaaataaaaaaaaaaaaaaaaaaaagggggggcccgttttgtggggttcccaagtttcctatccccggggttgcgaacgtaaaagcctttttttt

SEQ ID NO: 7449 - DNA, 590 bp, Chlorella sorokiniana
  Clone ID: LIB3602-068-Q1-K1-B2
ccacttctcggttacacgtacaagggtgggatgcggtgcacaacacacaggccaagcagcgcatcaacccgcagcggccagcaccggcgcgtcccggcatcaatcagctggccgaggcgtttgcgcagcaggccaacatccaataacaaggccgcctcagactggccaggatggcggagatggcggctgtctttggccagccagcgattcgtccgctaatgcttttgtcgcgccatgtacactccctgcatacacccccctcaacaacccttgactgcctgcttcattacaactatccattcaccccttggccacacacacactgcaatctcgctcccaggaaaaaaaaaaaaaaaaaaaaaaaaaaaaaaaaaaaaaaaaaaaaaaaaaaaaaaaaaaaaaaaaaaaaaaaaaaaaaaaaaaaaaaaaaaaaaaaaaaaaaaaaaaaaaaaaaaaaaaaaaaaagggggcggccccttttaaaagaaccaaagtttacttccccgggctggcaaaagaaaaagtttttttttggggcccccaaaataaaattaccggcccgggttttaaaaacggggggacgggaaaaa

SEQ ID NO: 7450 - DNA, 490 bp, Chlorella sorokiniana
  unsure (1)..(490): unsure at all n locations; Clone ID: LIB3602-068-Q1-K1-B3
gccctgcaccagnactccaagcaacgatgcaggctgcccagctccaggctcgcgccacccggcccgccgtggctcgccgcaccaccgtgcgcgtgcaggctcagcaggccgcgccccgcgctcaggcccccaagccccagcagtttgctgctggcctggctgccgccttcgctgccgtgaccctggtgctggcgcccgccgccaacgctgctgaggcccgcgcggaagtgaagagcgtggtgtgcgccagcaaccccacctccaagatctgcctcaaggacagcgccaagaactgaggcgtgccagctggactgagcgagcgctgagcccttgctggccgcacctgaggcaggcagccattgctgactgccggggggcaccgggccgccacccgctgcccggcagcatgggcgaggcggcgtgagaaagagaggacttgtgcactgccacacagttttttggacacctgtgctgtaacatatacttgagg

SEQ ID NO: 7451 - DNA, 584 bp, Chlorella sorokiniana
  Clone ID: LIB3602-068-Q1-K1-B4
gtcgtaagggcacagtcgagtcaccatgactcgcgtgtcggttcttgctgatgccctgaaaactatgtacaatgccgagaagcgcggcaagaagcaggtgctgctgcgcccctcctccaagtgctgatcaagttcctctcgctcatgatgaagcacggctacatcggcgagtttgagtttgtggacaaccaccgctcgggcaagattgtggtggagctgaacggccgcctgaacaagtgcggcgcgatctcgccccgctacgacattgcggccaaggacattgaggcgtgggtgggccgcctgctgccctcccgccagttcggccacatcatcctgaccacctcccagggcatcatggaccacgaggaggccaggcggaagaaggtgggaggcaaggtcctcggcttcttctactgagcggccttgttggatgcgccgcagcagccacggtggaccacagccgtggcggatgcagcacggccggcgcgcccggccgcggtgtttgctgcagcaccggcggcagccctgggtgctgcccccctcttagattgctgcaccgcacggttgtaacagaggttaccatg

SEQ ID NO: 7452 - DNA, 577 bp, Chlorella sorokiniana
  unsure (1)..(577): unsure at all n locations; Clone ID: LIB3602-068-Q1-K1-B5
nctagttctagnatcgcgacggccgccctttttttttttttttttttcggacgcgtgggcaagtactggatggacccctacagcctgttctggattgaggccatcctcatgaacttcgcggagctcaagcgctggcaggacttcaaggagcccggcagccagagcaagcagtacttcctgggcctcgaggccgtgttcggcggctccggcaaccctgcctaccccggcggccagtggttcaacatgctgaacctgggcaagacccccgaggagatgaagaagctgcagacaaacgagatccgcaacggccgcctggccatgattgcgtgcctgggctgcgcggcgcagggcgtcatgacgcagaagggccccttcgccaacctgctggagcacctggccgaccccgtgtccaacaacctgctgggcaacctggccaccatcctgaagcagtaagcgtgctgccccaagccccggcctgggtgtgagggctgccagggcggcggccagccacatctagagcctttgcattccttggctcggggcggcgactggtggcgggccctccggccgtgcctgc

SEQ ID NO: 7453 - DNA, 484 bp, Chlorella sorokiniana
  Clone ID: LIB3602-068-Q1-K1-B7
gccgagtgtcatgcttacagcgccccgcccaagctactctggaggagtggctccggaaatgtcctgacaactggcaggtgcgcgagctgctgggccgctcagctctgtacaattggcggcggcgcccgctgaccgaagcagaccttctggcagctcagaagcggctgcacgcttttgccgccgtgctgctactagagcagccggctagcagcatggcgctcatgcagcggctgtttgggtggcggcatgtggattgggaggggcagcgggcgggttctaggcacggcagcgatgcagaggcggagctggcggggcagccggctgtgctgcagctgctgcggcagagaaaccggctggatgagcggctgtatgagtatgctgcagcactgcatgatgcccaggtgcaacggctgaccgaaccttgagcaatgacatgccgctggaacttccgtgcaaggctgtggttactgtaaacccaagtgtg

SEQ ID NO: 7454 - DNA, 216 bp, Chlorella sorokiniana
  Clone ID: LIB3602-068-Q1-K1-B8
agagaagcaatgatggactgctgctcaactcgtggcacctcatgatggcaggccagactcccaatgatgagcggctcccttggagcggcggtgctcgcatgccatatagatagaaacattaaaaccatctccttgacgccgtcacatcagcgtgcatgtgtatctgccatagtgtacccatctcatggcatttttgtgggctgtaatgcctcctcc

SEQ ID NO: 7455 - DNA, 381 bp, Chlorella sorokiniana
  Clone ID: LIB3602-068-Q1-K1-B9
cttgcctgtagtggaggtaaagtctcaccatgggcaagtgcggcaagggcacgggcagctttggcctgcgccacaccaagacgcacacgctgtgccgccgctgcggccgccgctccttccacatccagaagagcacctgcggctcgtgcggctaccccgcggccaagatccggaagtacaactggagcgtgaaggccatcggccgcaagaccaccggcaccggccgcatgcgccacctgaagaacgtgcagcgccgcttccgcaacggcttccgcgagggctctgctgccaagaagatcgctgcctaaacagctggtgtctgcagctacgcggcagcacgttgagccagctgtgtagcaggatgtaacaccgcgacacaca

SEQ ID NO: 7456 - DNA, 605 bp, Chlorella sorokiniana
  unsure (1)..(605): unsure at all n locations; Clone ID: LIB3602-068-Q1-K1-C1
tccgcggncgcgtgggngaaggtaagctgccataagcggagcggcggccgacagccccgcaaaccagcaagcttccgcgcgcaagtatggcacaaccgggcttgcaagccgagccggactacaccttcaagatcctgcttgtgggtgacagcggcgtcggcaagtcgagcctgctgctgcggtttgccaccggcggctttgaagagctggtgcccacgataggcgtggatttcaaggcaaaagtggtgcagctgggcggcaagacggtgaagctcacaatatgggacacagccgggcaggagcgcttccgcacgcttaccagctcatactaccgcggcgcccagggcatcattcttgtgtacgatgtgactcgggcggagacatttgactcgcttgcagacatttggctgcgcgaggtggacatgtacaacactgttgatgaggttcagaagatggtggtggccaataagacagacctggcggagcagcgcgaggtttccacggatgtgggggtgcagtttgcgcgcgcgcacggctgcctgtttgtggagacgagcgccaagggcaacgtggcggtggagcaagcgtttgaggagctggtgctc

SEQ ID NO: 7457 - DNA, 66 bp, Chlorella sorokiniana
  unsure (1)..(66): unsure at all n locations; Clone ID: LIB3602-068-Q1-K1-C10
naaaaaaaaaaaaaaaaaaaaaaaaaaaaaaaaaaaaaaaaaaaaaaaaaaaaaaaaaaaaaaaaa

SEQ ID NO: 7458 - DNA, 538 bp, Chlorella sorokiniana
  Clone ID: LIB3602-068-Q1-K1-C11
gcaaccccggcccgggcggcaaccctgggccagaagggaagtgccgccggttgagggcttctcagccaaccccttccacacccagcagacccgcgccaagctgtaaaggggctctggggcagtggacagccaatgattgatctggagcctctggcgagagtgtgcgctccaacagcagagcgagcttcacctgtccagagcgcatcgagttgcagttgcagcagtttgctgttttctgccgcatgtttgcttggggaccacctaccgtctgtgctttttcttccttgctttgtatagccctgcctgcgccacaccggactgtgtattgcttcagcctttatgtttctccgagttgcatgtctcgtcgcttgtgaaaacctgttgagaaaaaaaaaaaaaaaaaaaaaaaaaaaaaaaaaaaaaaaaaaaaaaaaaaaaaaaaaaaaaaaaaaaaaaaacaaaaataaaaaaaaaaaaaaaaaaaaaaaaaaaaaaaaataaaataaaaaaaaaaaaaaaaaaggggggcgggcccttt

SEQ ID NO: 7459 - DNA, 597 bp, Chlorella sorokiniana
  Clone ID: LIB3602-068-Q1-K1-C4
gccgccatgatgcccacgcgaagaagggagccggcagcccaccatctaccgcatgaagctgtgggccaccgactccgtgcgcgccaagtccaagttctggtacttactgcgcaagctgcgcaaggtgtaagaaggccaacggccagatcctggccatcaacgagatctttgagcgcaaccccaccaccgtgcaagaactacggcatctgggtgcgctaccagtctcgtaccggctaccacaacgcctacaaggagtaccgcaacaccaccctgaacggcgctgtggagcatatgtaccacgagatgggcagccgacaccgcgtgcgctccccctgcatccagatcatcaagaccgccacgctcacggcgtcccagtgcaagcgcgcggccacgcagcagctgcactacagcaagatcagcttaccgctggcacgcaaggtgctgcacccctcgttcctgaagttccgcaccaccttcaaggcggtgcgccccatcgtggccatctactgagcgccttgccctaagcggctcgcggttcacactgtcggcagcagatgccgtggcggctacccagcttgtgctctggtacggtgcctc

SEQ ID NO: 7460 - DNA, 551 bp, Chlorella sorokiniana
  unsure (1)..(551): unsure at all n locations; Clone ID: LIB3602-068-Q1-K1-C5
cggccgcgtgggggggtctcaggagcaggatggtgaagttcctgaagcccgggaaggtggtcatccttctgtccggccgctatgccggcaagaaggcggtcatcgtgaagaactacgatgatggcaccagcagccgcccctacggccacgcgctcgtgtgcggcctgtctaaggagccccggaaggtgatcaagcggtcgtccctcaagacccaggcgcgccgctccagcctgaagaccttcatcaaggtggtcaactaccagcacatgatgcccacccgctacacgctggaggtggacctcaagggcgtggtgaccgccgagtgcgtggacaacagcaccaagaaggtggaggccaacaaggaggccaaggcgctgctggaggagaagttcaagagcggcaagaaccggtggttcttcaccaagctccgcttctgagggagtttcttggagagcctaggttgcagcagccgtgacgtgacgtgctccttgccccgagacgccatgtaacgtcacaccccgcanaanaaaaaaaaaaaaaaaaaaaaanag

SEQ ID NO: 7461 - DNA, 292 bp, Chlorella sorokiniana
  unsure (1)..(292): unsure at all n locations; Clone ID: LIB3602-068-Q1-K1-C7
cagnacaagaacgagatcaagnacatcctgctgacctacgaccgcacgctgctggtggccgaccctcgccgctgcgagcccaagaagttcggtggccacggtgcccgcgcgcggtttcagaaatcttacaggtgaaggctgccccgtgggacggttgggcgcctctggaggcttcttctgcgccgctggcgtggcggcagcggcgtctgcggcctaggcagctgccctggagcagcatgccctcagcgaaagcaccatgagtacaccttgcgtgtgtaacaaaacgccacac

SEQ ID NO: 7462 - DNA, 594 bp, Chlorella sorokiniana
  Clone ID: LIB3602-068-Q1-K1-C8
ggcggcgggcgcagccagctgagcctgcacctgctcaggaagctgcacttgctcagcccggtccggcagccggccagccagccgcaacgcgcaggctgtcggcagccgagcgccatccacccacccaaacccacccaccagcccgcacagtcacgcacccaacgcctcacccccgccccccatctagtggtcagtcccgccgagcgtttgaactgagcagagaagcaccccaaaccgcctcggcgcctttggatccacgcccgcccttgatcaacacaaacacacacactccacttttgtagccaagcaccacccttggccctgcccctgcccgcccgttgcacagcgcacttagcgccgcctgcggcaggccgcttttgttgtagcctgccccgatgcagcagccgttagcacctatcgcccggatatttcatgccccatacccgcttgtgtcgccccaaccccctgcactgccgtccgcacccatccctgcttaccccaccctgcctgtggcagcgctgagcgccgcccctcgtctgttttacggcctttctgagcaggccctgcgtagcgtttactgagagaccccctgcc

SEQ ID NO: 7463 - DNA, 463 bp, Chlorella sorokiniana
  unsure (1)..(463): unsure at all n locations; Clone ID: LIB3602-068-Q1-K1-D1
acanacccggtccagtgctcgtggacgccatcatcaacggcggcccgcgtgaggatgccacccgcattggcagcgccggtgtggtgcgccgccaggctgtggatgtgtcgccgctgcgccgcgtgaaccaggccatctggctgatcaccaccggcgcgcgcgagagcgcgttccgcaacatcaagaccattgcggagtgcctggcggacgagctgatcaacgcggccaagggcagctccaacagctacgccatcaagaagaaggacgagatcgagcgcgtggccaaggccaaccggtaaacggctgttgcgcacccaccaaaacagcagcccgccacagccggcacccctgggcaggatgccagaccgccagtgcagcagcacggtgtggttcagctgctgttatcgtggcaggctttccaattaggcgcgggtgttaggattgtgtaacacagcgcacccna

SEQ ID NO: 7464 - DNA, 377 bp, Chlorella sorokiniana; identical to SEQ ID NO: 2932
  Clone ID: LIB3602-068-Q1-K1-D10

SEQ ID NO: 7465 - DNA, 338 bp, Chlorella sorokiniana
  unsure (1)..(338): unsure at all n locations; Clone ID: LIB3602-068-Q1-K1-D11
ggnaccggtgattatctggtcgttcatcatcggcggcatcggcctggcgctgcccatcgtggtgccccccattcgggagcagatggggtacaacacccccgcccccaagacgccgccccccgtgcgccagctaatcgagcaggccaagcagtgaggcgttcaatgctggagggctggttcgggcagcagcagcaccaggctggcgggcagccaaatacaggcttgatgcctcgactggcgcccagcctgccgcatgctggccccatgccatgccgttgtgtacactgttagctgtccatgtgccgctgcaatctgcctagctgtaagcactgtcacgt

SEQ ID NO: 7466 - DNA, 587 bp, Chlorella sorokiniana
  unsure (1)..(587): unsure at all n locations; Clone ID: LIB3602-068-Q1-K1-D2
ccccgcgtccgctttttttagnaaaaaaaaaaaaaaaaaaaaaaaaaaaaaaaaaaaaaaaagaaaaaaagataataaaagaaaaaagaataaaaaaattaataaataaaaaagttataagaacttatatatgggaaaaattaaattcaatatattggagcgaagtttttcaaatttaattgggggggcggttttttgggagttccccttttgtattcccctggcggcccactctttttttttttttttggggggctctctttttaggccgggggcgggggttcttcccggttgtggcggggggaaacttgggggtttggccctttttttgttgtggggaattacccctttttggcggggggggttaacggagggggggccgtacccttgcccctttcctaagggtgggtcctccggattggtacggtgccttcctcttttttggggccttttttcccggggggggtggggtttctcccctcggttcccggtttctttttggggctttttgggcccccgtttttgggttttttgcttttttttttggcccatgttgggggttttcgccctgatactttgttgggggg

SEQ ID NO: 7467 - DNA, 539 bp, Chlorella sorokiniana
  unsure (1)..(539): unsure at all n locations; Clone ID: LIB3602-068-Q1-K1-D4
gtgctgcgcgtcatccccgcgggctctggcgccaagaaggcttcggctccttctaagcaggctggactaagggcctcttgccttgctggctgaagccctcgacagcagcagcagcagccccagcacggcatgcaagcgctgcagacgccctgctgccctgagtaagcgccgccatgtgccggcggtggcagcagcaccgcccgccttgcatacacctggcccctaggatgccggccacggggcgcccagtagtcgccagacggcggggcgcagcgcatgtaaccgtgtgcatgaaaaaaaaaaaaaaaaaaaaaaaaaaaaaaaaaaaaaaaaaaaaaaaaaaaaaaaaaaaaaaaaaaaaaaaaaaaaaaaaaaaaaaaaaaaaaaaaaaaaaaaaaaaaagaaaaaaaaaaaaaaaaaaaaaaaaaaaaaaaaaaaaaaaaaaaaaaaanaagggggggggngttttaaaggaaaaaaattttaaaaaggggggtgaaaaaaaaaaaaaattttttttttgggggaaccaaaattaa

SEQ ID NO: 7468 - DNA, 506 bp, Chlorella sorokiniana
  unsure (1)..(506): unsure at all n locations; Clone ID: LIB3602-068-Q1-K1-D5
caagtgcaggcggcggtggcggcggccgggcagtacgacgaagcggccaccaagcggcgattgacaagtacattgctgacaacccggtggtggtgttcagctggagcggctgccccttctgcaagcgcgccaaggcggtcctggatgccacgggcgccaagtacaccgcccttgagctggaccagatggccgacggcaaggcgctgcgggctgagctggccaagaagaccggtcggtccagcgtgcccaacatctggattgccggcaagaatgtgggcggctgcaacgacggccccggcgtggccacgctgcaggacaagggcgagctggtgccgatgctgaaggccgccggcgcgctctgatgcagcagcaggctgaaacgcaagctgttgcctggtgccctgccggctgctgtttgtcatgcacgagctatcagattgaacttgacgactgctggtccactggtcgttgtttgatgtgcactttgcaaccaagcggtcaacana

SEQ ID NO: 7469 - DNA, 594 bp, Chlorella sorokiniana
  Clone ID: LIB3602-068-Q1-K1-D7
gcgctcggtgcccatccgcaggccgacgaggtgtctgtcgtgcgcggcacctacaagggccgcgagggcaaggtggtccaggtgtaccgcaagaagtgggtgatccacatcgagcgcatcacccgcgagaaggtcaacggcgccaccgtgaacgtgggcgtggacccctccaagtggtggtcaccaagctgaagctggacaaggaccggcgccagctgctggagcgcaagcgcgcgggcaagggcctggccgacaagggcaagttcacggaggcggaggtggcggccatggagaacgtggactaagcgccacgcccaccccgcagcagccagcagcagcagcagtgttgaggccgcgggcgggccaccgacgccagtgcggctcgggtggcggcggcccgacggccccggtgggggcagcctctccgtgtggctgtgcgctccaccggcagcggcgcagcctcggcagcgcttggaagcatggaggctcgagaggcccttgctccggcgcggcccagcggcgcttgctttcatgcagcggttctgccgcagcgcgtcacacggcgggcgctggcgcgcagtttgcacccttctt

SEQ ID NO: 7470 - DNA, 593 bp, Chlorella sorokiniana
  Clone ID: LIB3602-068-Q1-K1-D8
tccggctggcaccgtcgcagcccaccagcccactgccttcagcggccttgggccggaggcggcggtggcagaggtgccagggccgctgttcccgcagccgcagatcagcaccagcagcagcgaggagcttgcggagcgctggctggctgaggtgctgtttgacggcgcacccgccgatgtgaagagtccatacgaagcactgctggtgtctgatgtgtggtgagcgacgcaccacagcactgatgtgtggtgagcgaagcaccacagcacagtccgcccaccacgccgtttgccgcccacataacgccgtttatcctttgcccatttacttgcgaagcagcgcctttggctgcccaccacgccgtttgcccattgacttgcgaagcagcgcgcttggcttgcgctgccacaagtttgcatttttgctttttgctccaatttgttgtctgtcgtccggcccacacccttttgtttgaacatgctccttcccttgcacccgtactagctacccaaacttgatccaaacccccttgtgtatgccgcatgccgtataacccccttgctttacgctctcacagtcccccttgccttaa

SEQ ID NO: 7471 - DNA, 246 bp, Chlorella sorokiniana
  Clone ID: LIB3602-068-Q1-K1-E1
caccccccgcccccgcccgcagcagctgcagcataacctcgcgcgatgaccgttccgctcctttctctgctccgccacctcttaccgctacccgctccggtttcagcgctcgcctcccaggcagccctgctggcggcgcctgcattgggcgccggcaacgggtgctgcctgggtggcatttcaccctcctagcagaccgtgtcttttggcaaattgcagagagagacgcctgtgaagcaaccccag

SEQ ID NO: 7472 - DNA, 607 bp, Chlorella sorokiniana
  unsure (1)..(607): unsure at all n locations; Clone ID: LIB3602-068-Q1-K1-E10
ctgcgatggcgcaaagnaggagacgtgctacgtgcaggtcaccggcatggtgaccgcggatgtgctggagaacgaccaggagtatgatgatgtgctggccgacatccacgaggagtgcaacaagtttggcacggtgctgcgcgtcctcgtgccgcgcccgccggtgcccgcacaggtacaatcagaattttcagcatatctttcggtgatgtgctgcagggttcaccggtgctgtggctgcgctgcgcaggggcgtgccttgccccttctcaaaatccaaaatgatcgggatttgcggcaactgtggtgtgcaacaatggcgccctcatgctttgcacgcatgcatgcgtttgtgagcaagggatttgctgccaaccaaccagtggcattgacacccatgcgtcccctgatgttgtgtggttgcaggcggcggagctgatggggaccgccagctatggcaaggcctttgtgcagttcctggatgccgacggcgccaagaaggcccgcgaggcgatccacggccgcatgtttgctgggagcacggtggaagcagttttcctgcagccccaggatttcctggacgcaattgctccgcctgaggcgcccg

SEQ ID NO: 7473 - DNA, 371 bp, Chlorella sorokiniana
  Clone ID: LIB3602-068-Q1-K1-E11
cggccgcgtgggcggccgcgtgggctggcacgcagcgtggcagcagcaggtgcaggaggcacagcagggtggcgcacggaagcccggagctcccagccacagcctgctgccgcgcaccccagacctcagccagtcttgagaggctgtgctgtgtacattgtagaccgccactttgttcgatcaaacagctgttgaccaggcttttcttgccaaggactgaccgaccgacttgaccgaccgacccatcctcagttgcattgcacccccaccatcctgcaccacacgacaaacacgtttacatgcatatgttgctgttcttattgctttgcttgcttttcaaaccatcaagcatgtcaacaggctgtcaaggc

SEQ ID NO: 7474 - DNA, 594 bp, Chlorella sorokiniana
  Clone ID: LIB3602-068-Q1-K1-E2
cggcctgctctgcggcccttcatacctttgtacctttctgtatcatcttgcagcaatggcagccggctgcatctttctaacatcgtcaccggcccactcgtttgtgccatgcccacctgcctccaacgtcacccttcatcaaccctcacccaacccatccacctgccacccatccactcaccttccctccgccacaacctctgccacccactcaccacccatcacccgctcaacgccctccatgcaccatcctccccatccaccaaatctgccaccccaaacgcacgtccgccgctgcaccacctgccgccccctcacccgcacccatcttccacccgccacctttcctgccgctcaccgccgcacatcctacctcccacacctcactccatgtccacccttcacccgcgcttcacacagcggctgctgccatgcaaagctgctgccaaacccatccatcatgctcgcacacccactcacccacacgtccaacgtatccagacccattttcaaggcccgactgtacagtgcctttttgcgtccttatgccgatctggtaccaggacttaatgtgtaacaaatggtatgtaaaaa

SEQ ID NO: 7475 - DNA, 580 bp, Chlorella sorokiniana
  unsure (1)..(580): unsure at all n locations; Clone ID: LIB3602-068-Q1-K1-E3
ccagncgtttagcagccggtgctggctggcacggcactaccccatcagcctggcccacgtcatcccgctgctggaggtggtggccgcggggaacaagcactttgcgcaggcggcgacctacctgcggcagtttgagaattctgaggagacgttcccggtgaaggtgcaggtgccgctcatgtggacggtgtaccttcagctggctttccgccactttgtgctgctggggccgggcgccgaggcgcgccagcccggcttcttcgagctgccgcccggctacacgctggaccgcatggaagagggggacattgtggccaagaaggcggagccgctgctggagcgattcgactcgggcagcagcagcctgccggtgccggagccatgaacgagtggcagccgcgcgctcatggcgcagcggaacccgctcggcctcattggaaagaaccttactgcacaatgactaacttgcaaatgcctgtgctgccaagttcagctcccaaatgcctgctcctgtgtctgccggcacggcttgttgcagggctctgcctgcccgcgctcgccccatgcctagcctcccgcc

SEQ ID NO: 7476 - DNA, 404 bp, Chlorella sorokiniana
  unsure (1)..(404): unsure at all n locations; Clone ID: LIB3602-068-Q1-K1-E4
cccgggtcgaccagcgttctttcggggggagncgcggcgccgggggggggggggggtgcgcccgcgccaacggccggagctggagcggctggcaactccgctcctgcggcgccgatggccgggggggccgctgggccggctgcgggctgctgctgcgctggctgcggtggtngctgactgtggccgcccttgcggggcggggggggtnctcctttgagccggtgctgcggggcgtcttgtcgggcgcccggtcagggggcgggggctgtcgcccccgcacctgcggctgcgggggggggctgccggcgaccgtggcccctgcttcttctgcggggccgctggcccctggcctgctgcttgccctgggcggcggctctgcttcctctgtgtgggggcggggcact

SEQ ID NO: 7477 - DNA, 85 bp, Chlorella sorokiniana
  Clone ID: LIB3602-068-Q1-K1-E5
ggcgcatgggcagccagccgggcgtcacgacgtgcctgcctcgcttccagctggtgcctgcaccccttgtaattgttgtgttgac

SEQ ID NO: 7478 - DNA, 322 bp, Chlorella sorokiniana
  Clone ID: LIB3602-068-Q1-K1-E6
caacttcaagcaggccaacaacttcctgtggcccttcaagctgtcctcccccaaggcggcatcgacaagaagcgcctgcactacatcgagggcggccaggccggcaaccgccaggagtacatcaacaacctggtgcgcgccatgaactgagcgctgagccggcgagcacagcgcagcgcgcgcagcacgcacagcgcggcgcgtgcagcagcctggacggagcggccccctgatgcctgctagccacggcactgttggccgggccagtcgtgaggccccgagcgcacccgaatgtccaagggagtgcacggggggccgggcg

SEQ ID NO: 7479 - DNA, 605 bp, Chlorella sorokiniana
  unsure (1)..(605): unsure at all n locations; Clone ID: LIB3602-068-Q1-K1-E7
gnaaggagacatcaagtccaagcccgagcagatccgcgagaagattgtgcagggccgcgtggacaagattgccaaggagatgagcctgctggaccagcagttcatcaaggacacctccaagaccgtggcggagcacatcaaggagcagattgcgggcatcggcgagaacatccaggtccgccgcttctcccgctacgtcctcggcgaaggcattgagaagaagcaggtcgacttcgcggctgaggtggcggcgcagacgggcggcaagctctgagcggccggccagccctcactgcccccctcctaagcagcaaagccgcccggccctccaggccgagcggcttaaacaacccagcaacgatgcgaggccaaccgcgcccctctctagtctatactcacgtcccctctcctgtccgattttaagccttctgccgacccgctcacagcaccgacaatgccctctcgcactgcgctgcgcggcccagcggcccgcgcctcctcactttttgtgcccagcccgcattggggtggtctgcctatttcattctgggctccctctcgtcccgcccgtccgccccctctgcttcttggccagggcaatgcct

SEQ ID NO: 7480 - DNA, 526 bp, Chlorella sorokiniana
  unsure (1)..(526): unsure at all n locations; Clone ID: LIB3602-068-Q1-K1-E8
ctggnagggactgggcnctgatggagagggcaaggtgctggtcaagggcatcctgggctgagcaggcacaatttatcatccagcgtccagccaaacagcgcgtgcccagctgccgcggcggctcactgcccacggcatcctgggctgagccgcccacacaaacagcagacgaggtgtggcgctgcaggctcttacgggcatcccgggctgactgcccctcaggcctgcaagctgctttgacaagcgctgcaactcgctgccaagcgcacccaactgctgctggcggctcccgggccaccagtgccgcaacaccctctgcaacccgtcccattcagtcttgattttttgaactctgcatatctgctgttgacttctcggctcctctgtaatgtgcacagcacgagctgtgctgggcaacaggacacatgtgatacagccatggaaaaaaaaaaaaaaaaaaaaaaaaaaaaaaaaaaaaaaaaaaaaaaaaaaaaaaaaaaaaaaaaanagggcggngcgttttaaa

SEQ ID NO: 7481 - DNA, 504 bp, Chlorella sorokiniana
  Clone ID: LIB3602-068-Q1-K1-E9
acctccttgtttcttgccctgcaccatatctccaagcaacgatgcaggctgcccagctccaggctcgcgccacccggcccgccgtggctcgccgcaccaccgtgcgcgtgcaggctcagcaggccgcgccccgcgctcaggcccccaagccccagcagtttgctgctggcctggctgccgccttcgctgccgtgaccctggtgctggcgcccgccgccaacgctgctgaggcccgcgcggaagtgaagagcgtggtgtgcgccagcaaccccacctccaagatctgcctcaaggacagcgccaagaactgaggcgtgccagctggactgagcgagcgctgagcccttgctggccgcacctgaggcaggcagccattgctgactgccggggggcaccgggccgccacccgctgcccggcagcatgggcgaggcggcgtgagaaagagaggacttgtgcactgccacacagttttttggacacctgtgctgtaacatatacttgag

SEQ ID NO: 7482 - DNA, 602 bp, Chlorella sorokiniana
  unsure (1)..(602): unsure at all n locations; Clone ID: LIB3602-068-Q1-K1-F1
gcggatgcaaacacgcgcctgcttgcacaaccctgagcgcgccgccgcttgctgcagctgagggctccgaccattttggtgccgtaccagaacgtgcgcatggtggaggacgacaccagcattgtgccctttagtgacgcctatgaaacgcactgtgcacggtatgggcgagaggcggatgcacccatcctggccttcaaagcgcgttgctgcacgccggacggcatgacatccgacgctaagacccggctggaggcataccaggaggtggtggagaagggcgtgacggagaacatctttagccagtttatgtataaaactatggtggagaacaaccttagcatgtggactgtaaaaaagcagtttgcgctaagcactgcgatgtcagcggtggcatgtcacacgctgctcctcaccgggcgctcgccaagcaagctgcttgtgtctcggtgtatgggaaccatcacgcacgccgacctcatctccacctacgattcgcgtttccagctggagcgcggccaagagacggtgccattccgcctcacccgcaacatgcagtccttcattggcccacagggcatggaaggcatggntggtttgcg

SEQ ID NO: 7483 - DNA, 241 bp, Chlorella sorokiniana
  Clone ID: LIB3602-068-Q1-K1-F10
tacttacggcggtgcttgcttacgtggtacccttttttttggggcccgcctcattttaatatccactggtctctttttttttgcaaccggtggttactgggaaatacccctggctttttcccaccttattgggcttggcaaacccttgccccttttccccttttggggttttggcgaaaaggccctttccgttcgccgttccaaacagttgggcgccctgattggtgactggtccccccct

SEQ ID NO: 7484 - DNA, 543 bp, Chlorella sorokiniana
  Clone ID: LIB3602-068-Q1-K1-F11
acttgcagcatggcagccggctgcatctttctaacatcgtcaccggcccactcgtttgtgccatgcccacctgcctccaacgtcacccttcatcaaccctcacccaacccatccacctgccacccatccactcaccttccctccgccacaacctctgccacccactcaccacccatcacccgctcaacgccctccatgcaccatcctccccatccaccaaatctgccaccccaaacgcacgtccgccgctgcaccacctgccgccccctcacccgcacccatcttccacccgccacctttcctgccgctcaccgccgcacatcctacctcccacacctcactccatgtccacccttcacccgcgcttcacacagcggctgctgccatgcaaagctgctgccaaacccatccatcatgctcgcacacccactcacccacacgtccaacgtatccagacccattttcaaggcccgactgtacagtgcctttttgcgtccttatgccgatctggtaccaggacttaatgtgtaacaaatggtatgt

SEQ ID NO: 7485 - DNA, 715 bp, Chlorella sorokiniana
  unsure (1)..(715): unsure at all n locations; Clone ID: LIB3602-068-Q1-K1-F12
aaaaaaaaaaaaaaaaaaaatggaagggagggggggggggaaagggggggggggggggggggggggggccnccnnccccccnncccccccccccccccccnccaaccccccccccccccnnnnnnnncngcncgggccgggnnncnccgccccccccccgccgcggggggggggggggggggggggcgggggcngcncccccgccnccncccccccccccccccccccccccccccccgccccccccgcccgccgccggcggggggggggcggcaccnnccccccccccngcgnggggggggaggagggggggggggggagnnnngncaaacncgcagcgcgcccggaggggcggggggggggnggggggaggggngggcaaagacaaaaaagcccggggagggggagggggggggggggggggnccnncggcaaaaaaccaancaaaaaaaaaaaaacagaaggggcggggggcgggncgctggcgggcgcaacaaaaaaaacgcccgagcagcgggggacgcgggggagggggggggggggggggaggggggggccgggcgcccccagctcccccccctgccgccgcgggcgggcgggaaggggaaagagggggggagaggaagaaaaaaaaaaaaaagaaaagaaaaagaaaaaaagaaaaaaagaaaaaagaaaaaaaggcggggggggagaggaacggcgggagaggaag

SEQ ID NO: 7486 - DNA, 593 bp, Chlorella sorokiniana
  unsure (1)..(593): unsure at all n locations; Clone ID: LIB3602-068-Q1-K1-F2
ctggnacggctgcacacactagggcttcgtttgctgcaaactccaggtctcctgactagcacaagctccggcgaagcctgagacagccggcaggcagcgcggagcggcagccagcaagcgaggcagcaggatgccccgagccaagacattcaaggaggagcacccgtttgagaagcggcaggcggaggcggcccgcatccgagacaagtaccctgaccgcatcccggtgattgtggagcgcgctgacaagagcaacatcccggacattgacaagaagaagtacctggtgcccgcggacctcacggtgggccagtttgtgtacgtgatccgcaagcgcatccgcgtgtcgcccgagcaggccatcttcatgtttgtgcgcaacgtgctgccgcccacggccgcgctgatggcggacgtgtatgcagaccacaaggacgaggacaacttcctctacatcacctacagcggtgagaacacgtttggctgaggctggcgcaccgctcgccagctggccggagtccccatgctgccatgacattgcgctgaatcgcctgcgccctgtatcacgggcatagccgccctcccccacaaaa

SEQ ID NO: 7487 - DNA, 349 bp, Chlorella sorokiniana
  unsure (1)..(349): unsure at all n locations; Clone ID: LIB3602-068-Q1-K1-F4
ggtcagggcagccgctgctgcctgaacccccctaactcctgagagcgagtgagagcgcgaagtgcctttttgaggtttctgcctggagttaccggagcactgcccaccctcccatgcctaaagatgtccattcagggcgcactccttgcaaaacacccgcccactgctngaaaaagaatgaccactgccgaaggccaagtcaaacccttgactgagcctgagcactgagtgcctccccccaacgcatgccccctttgctcctgtgctgctgcctcctggcgcagccagtcttgcccccattcattaagagctgagctgagccaatgagatatgtaaggcttacgtactg

SEQ ID NO: 7488 - DNA, 543 bp, Chlorella sorokiniana
  unsure (1)..(543): unsure at all n locations; Clone ID: LIB3602-068-Q1-K1-F7
cgcacatcaagaccattgcgngatgcctggcggacgagctgatcaacgcggccaaggcagctccaacagctacgccatcaagaagaaggacgagatcgagcgcgtggccaaggccaaccggtaaacggctgttgcgcacccaccaaaacagcagcccgccacagccggcacccctgggcaggatgccagaccgccagtgcagcagcacggtgtggttcagctgctgttatcgtggcaggctttccaattaggcgcgggtgttaggattgtgtaacacagcgcacccaaaaaaaaaaaaaaaaaaaaaaaaaaaaaaaaaaaaaaaaaaaaaaaaaaaaaaaaaaaaaaaaaaaaaaaaaaaaaaaaaaaaaaaaaaaaaaaaaaaaaaaaaaaaaaaaaaaaaaaaaaaaaaaaaaaaaaaaaaaaaaaaaaaaaaaaggggggnggcgtttttaaaaaaacaaaatttttttgccgggggctggaaaaataaaatttttttttaggggccccaaaaataaaattattggcccggtttttaaa

SEQ ID NO: 7489 - DNA, 270 bp, Chlorella sorokiniana
  Clone ID: LIB3602-068-Q1-K1-F8
gctgcgtgtggagcggatgacgcccgctggtgggcgtccgcgccaagcgcgccgccgaggctgctgctgccgagaaggacgcgtaagcgccctgcgcgcagccgcgactggcagccgcctgtgcggccgggggcgcggtggcggccggcgacgcggcggggggcaggcgatccccaggcccgcccgctgtggagcgcagcgcagcgcagcgcagcatgcatgtcagttggccagccgtgcgcgctgccgcgcccctgtaacacacccctg

SEQ ID NO: 7490 - DNA, 618 bp, Chlorella sorokiniana
  unsure (1)..(618): unsure at all n locations; Clone ID: LIB3602-068-Q1-K1-F9
ggggggggggggnccnccccccccccccccggccgggggggggggggccccccccccccccccgggggggggggggggggggggggggcaaaaaggggggggggggcaaaaaaaagggggggggataaggggggggggggganagggggggggggggcgcgggcccccccccccccccaaaaaaaaaaaaaaaaaaaggcgcccgccccccccccccacaaaaaaaaaccccccccccccggcncntttcccccttgggaagggggggggggggggggggggggggcgttgtttttttaaagaaaatagaaaacacaaaaaacaacccggcccccggggggggggggggggggggggcgccccgccccccccgcgccccccccccccccccctttttntnntgttcaanaagggaaagaagaaaggcaggggggagagggcgccggggccccacccccccaccccagccccgggggggggggggggggggggggcggggnggtagacccaaggggccgcccgcccaccccccctccgcgcccaccccgcccgccccaagaacaaaaaaaaaaaaaaaaatataaagcgttnttnggggggggggggggggggggggcg

SEQ ID NO: 7491 - DNA, 570 bp, Chlorella sorokiniana
  unsure (1)..(570): unsure at all n locations; Clone ID: LIB3602-068-Q1-K1-G1
ctggggctngacggagcctgcatccgcngagtcgacatcgtgggcagcttcaggtactgcaacacgtaccccctttgcatcagcctgctggcctcggggcgtgtcgatgtgaagccgctgatcacccacaggtttgggtttgatgccgccagcctgcagcagggctttgaggcagcgcaactgaccgaccaaagcggcgcaatcaaggtcatgtttgacatggctccaacagcagctgagactcagctttgaacagctttgactggaccgcatggtgtgcctgaatgggtgcacctgtgcaagctggcggtgctcttgtgctagctggcgggggtggcagttgcccggcgcagtgctgcagacagccaacctttcagctgagggctggtgccatgcatgtgcacgcttcgtggcaatgcgttcttacatttcaaagattgcttggggcagctggcgtttgggaggggattcaagcgtgtgtaacttgcacaagcnncananaanaaaaaaaaaaaaaaaanaannaaaaannnaaaaanaaaaaaaaaaaaaaaaaaaaaaagggcggcc

SEQ ID NO: 7492 - DNA, 387 bp, Chlorella sorokiniana
  Clone ID: LIB3602-068-Q1-K1-G10
gtggcagcgggggcggccggcccacccggcagcacgcagccaccggcggcagcaggcgcaacagcagcagcggcggcagcgtccggggaagcagcaatattgccgcaagctggtgagcggcctccgagctgagcctgcctgccccaccctcatcttatttcctcccccatcaagcctcggttttccccctggatttttagtactgtttcctttcgctctgactctcacagcgctcacccaaaggccacggcttgccgccggcctgctcccctcctccgctgattcttcacccttcaatgactgagccctgaagccctgaactttatataaacatgttacacgttgcgtgggcctgactgcagcagcacatgtaaacccagctgctcc

SEQ ID NO: 7493 - DNA, 203 bp, Chlorella sorokiniana
  Clone ID: LIB3602-068-Q1-K1-G11
taaaaaaaaaaaaaaaaaaaaaaaaaaaaaaaaaaaaaaaaaaaaaaaaaaaaaaaaaaaaaaaaaaaaaaaaaaaaaaaaaaaaaaaaaaaaaaaaaaaaggggcgggccagttttaggggatccaagtttccttaccccgtccttgcaaacgtcttagctttttttttggggccccctaaatttaatttcgggggggcggg

SEQ ID NO: 7494 - DNA, 578 bp, Chlorella sorokiniana
  unsure (1)..(578): unsure at all n locations; Clone ID: LIB3602-068-Q1-K1-G12
ctgncatagcaccgcagaactaggcgtgtgccctgccaagttagggtttccgaccgcgcttgcacgctcctgccggggcctccgcccctcccagcagcctctgatcagagcaaantgcgctcgagtcgcaccgccatggcctgcctgctgctgttgggcgccgcgcttgcaaacaccgccgccgccggtgcgccggctgtaaacgtcacgctgttcggcgaggcgctttgcccatacacggcaaagttcttcacagacattgtggcgcccttgctgacgtacgacaaggagattgcagacattgtggacttcaagtacgtggcctggggcaacgcgcacaacaccactgcacagggcgtgcagtgccagcacggccccaacgaatgcgcgctgaaccgcgtcgtcaactgcgccacgagccactacccagaccaggcccagtggctgcgctttgtcaactgcctggagtcggcgccgctgcgccagatgctggaggctgtggatgagtgcgcccacaagtcgggcatggatgcctctgcgctgcacgagtgtgccgaggggcgggagggcgatgagct

SEQ ID NO: 7495 - DNA, 68 bp, Chlorella sorokiniana
  Clone ID: LIB3602-068-Q1-K1-G2
cagacaacaaaaaaataaaaaacaaaaacatgaaatagaacaaaacaaaaaaaaaaaaaaaaatacag

SEQ ID NO: 7496 - DNA, 583 bp, Chlorella sorokiniana
  Clone ID: LIB3602-068-Q1-K1-G3
tgctgcacctgcgccgcgcagtttgctgaggccgccgcgccgcccgccgcctgccccatctgctctgatgaccggcagtacgttgcgcccagcgggcaggcctgggccaccaaagaagagctgcaggagctccaccgctgcacactggccgaggttgagcctggagtgctgggcattggagtggagcccaagctggccatcgggcagcaggcgtacctagtccaagcacccggcggcaacgtgctgtgggactgcgtgggcgtgtgccacccggacattgttgctgacgtggaagcggcgggcggcattgcagccattgccatcagtcacccacacttctataacacctgcgtcgactgggcagaggcattcgactgcaaggtgctcctgcacgccgccgaccggcaatgggtgacgcgccccagcccccgcctggagttttgggagggagacgagcggcagctgggcgccggcctgcggctgatgcgcctggggggccacttcccgggcagctgcgtgctgctgtgggaggcggctcgcgacggcaagggggtgatgttcactggtgacacgatttttcctg

SEQ ID NO: 7497 - DNA, 600 bp, Chlorella sorokiniana
  unsure (1)..(600): unsure at all n locations; Clone ID: LIB3602-068-Q1-K1-G4
ctatgtcaagctgctggtgaagctgtaccgcttcctggtgcgccgcaccgagagcgacttcaacaaggtggtgctcaagcggctgttcatgtccaagaccaaccgcccgcccctctcgctgtccaagctcgccaagttcatggccggcaaggacggcaagattgcggtgctggtcggcaccatcaccgacgacgtgcggctgtttgaggtgcccaagctgcgcgtgtgcgcgctgcgcgtcaccgagaccgctcgcgcccgcatcctcaaggctggcggcgagatcatgaccttcgatcagctggcgctggtggcgcccaccggcagcaactgcgtgctgctgcgcggccccaagaacagccgcgaggccgtcaagcacttcggccccgcacccggtgtgcccggctcccacgccaagccgtacgtgcgcagcaagggccgcaagtttgagcgcgcccgcggccgccggaagagcaagggctacaaggcgtaagcgcccccacgcctcagcggccggcgggcggcggcggccgtggatgcgctgccgcagcgccgccggcacagttgacggcggcggncgcagcagccgcgcgccggtgc

SEQ ID NO: 7498 - DNA, 576 bp, Chlorella sorokiniana
  unsure (1)..(576): unsure at all n locations; Clone ID: LIB3602-068-Q1-K1-G5
gcgatgctcgcgctgaagagcgtctttcattctaaanaccaacgaccccgccggcttcaccgtcgtggacgtcatggcctggggcgccctgggccacgctgccgccttctacatcctcgcaacctccagcctgggcctcgaccgcaaccccttctaaaccagtccacggccgcagcctgcgcccaggccacaaccccatcccgagaagagcatttgtccggcgctgtgcctttttctgttgggcatggcgactgcagccacgcatgtgatactgctatgtaaacgaccgcttgtaccaaaaaaaaaaaaaaaaaaaaaaaaaaaaaaaaaaaaaaaaaaaaaaaaaaaaaaaaaaaaaaaaaaaaaaaaaaaaaaaaaaaaaaaaaaaaaaaaaaaaaaaaaggggggggccgttttaaaaggacccaagtttacttacccgtgcttgcaacgaaaaagtttttttttggggcccccaaaattaaattaattggccggggtttaaaaacgtgggaactggaaaaaccctggggttcccaaattaaatcgctttgaaaaaaatccccttttccccag

SEQ ID NO: 7499 - DNA, 584 bp, Chlorella sorokiniana
  Clone ID: LIB3602-068-Q1-K1-G6
cgttctcagtctagttacccgtgctaggaaggcttggcagggcggcatgtcaagagggcgcattctattgcctcccacccaacctggtgcaacctggcactgctgcctctccctgagcacgctttccttccatgcaaccctcgcctgggcactcgatccgctccgctttgccccacctccctgcagccgcgccaagcacacagaagcagccctggtgcccctgccatgcttgttgcagtcagctcgtttcacccctcagctgagcacatgttccgccgcaccctgcccacccccttgtagccgcgccaagtgcacagaggaggacctgtgccgccgcccacatagcttaggcatggttccgtcggcaagtcctcaccctgtcgctgagcacttttttggcccacaccaacccccttgtagccgcgccaagtgcacggaggaggacctggtgcccctgccagacctgaagcgcaggatcgaggcatgggcggaggagcagcgaagcaagcggcgcatggcggtcgactgattcaaagcgtggtgcccgaggcagcctgatcttgtggctgccctgccacatccct

SEQ ID NO: 7500 - DNA, 398 bp, Chlorella sorokiniana
  Clone ID: LIB3602-068-Q1-K1-G7
caccaacaacaccacacatcatgcttgctcacccggccccgcgcaagcgggactgcgccgtccctcaaacttccccctgccaatactttacccttttccggatgccgagacgatcacaacgcaacaatgtgtgaacagagctgatcaaaaaaaaaaaaaaaaaaaaaaaaaaaaaaaaaaaaaaaaaaaaaaaaaaaaaaaaaaaaaaaaaaaaaaaaaaaaaaaaaaaaaaaaaaaaaaaaaaaaaaaaaaaaaaaaaaaaaaagaaaaaaaaaaaaaaaaataaaaagggaaaaataaatttaatagaaatgaataaaagtaataaaaagggggggattggttaaaaggttgggaattgggaaaaaaaatgggttttggaaaatttaatgtttttt

SEQ ID NO: 7501 - DNA, 586 bp, Chlorella sorokiniana
  unsure (1)..(586): unsure at all n locations; Clone ID: LIB3602-068-Q1-K1-G8
gncggcttcttcgcaccacgaccatggtcgactccgttgtgacggcgctggagtaccccacagcccaggaggcggcgcaggcgctggctgatggcgcgctgcggcgctgggcggtggagacacagggcgtgcgctgcgatgacatcacagtagtggtcgccttcctgcccgcctgaacacctgccacagtttgagcccaaatgtggcttgcacttgtctgcgtgcatggcgctggctgctgcggcagccgagcgcgcctcaaccttgcttggtccccacttgggccgcatgactggtcgttgttttggtgtgactggtcatagtttcgcatggccgttgatcaagctccctacatatttgttacacttttccctcgctcttccctcagcccagttttggtgcaattttggactggccgggcacacgcccgccctgatacgcgcactgcccaggaaggctcgataggttttccccttccattgtacaccgattttcccgaacttgaccccgaactgcctgcctgcttttgtatgaatccccttaattggtagaccgatgcctgcataaagaagtaatatgacctgta

SEQ ID NO: 7502 - DNA, 400 bp, Chlorella sorokiniana
  Clone ID: LIB3602-068-Q1-K1-H1
agctggcggtccgcagtacgggcgttggggcaagtcaacatggttgttgaagatacgcggacccctttagcatgaaagactggtgtgacattaaggcgcccagcttgttcaacacccgttacgtgggcaagaccctggtgacccgcacccagtgcaccaatattgtctccgatgggctgaagggccgagtgggggatgtgtctctggccgacctggataacaacgaggtcggtgcctaccgcgtcatcaagctgcgcgtggaggacgtgtagggccgtaactgcttgaccgagttctacggcatggtcctgaccactgacaagcttgtctacctggtgctcaagtggtaaacccttattgtggccatcttggacgtgaagaccaacgaccgttacttact

SEQ ID NO: 7503 - DNA, 566 bp, Chlorella sorokiniana
  unsure (1)..(566): unsure at all n locations; Clone ID: LIB3602-068-Q1-K1-H10
ctggctcatgctgtgggtggccacagtgctggcgctgtggagcctggccaactacatgagcggggtgtggcacttcttccgcttcccgggcgtgccaaagccgccgcgcccgccgcgccagtgaacggccgccagctgctttgggagaaccgctggcgcaaacatacatagcgagacatgcagcccacatctagcgcgacactagcttgagccatgtggcaccattcatacgcagtgcgtgaatctttcctcccattcatttgcacttcacacccgcctcgtgcctttccactgccgcccatcaacccctgccattgctgcctgcttgtttgcacagagcatcatcttggttacttcctccaacatctcaaattcatctgtgagcgaatgtagcananaaaaaaaaaaaaaaaaaaaaaaaaaaaaaaaaaaaaaaaaaaaaaaaaaaaaaaaaaaaaaaaaaaaaaaaaaaaaaaaaaaaaaaaaaaaaaaagggggcggcgcgttttagaggaacccaagtttacttacccgtgcttgccaacgtaataagtttttttataggg

SEQ ID NO: 7504 - DNA, 554 bp, Chlorella sorokiniana
  Clone ID: LIB3602-068-Q1-K1-H11
tgtcctcgggcccctcctacgtgtttgccaactttgagctggatgcatccggcctgctcaagtggcggacctggcctccaaggcgtctgccgcgagctggactaaataaatgctgagtcaacagatgcactgagcacctgggagctggggggcaagcatgcgccctgatgctgcaatgaagtgggcgtgggcggcgcaaagctgcctggccggtcagctgcaatgaacgctggctgcgctcgtccacgcctggaacagttggcagggtgcctgccgcattgcccaaccattttgcacacatgtcttgccaccgcatattcgcatgaaaacatacgcacacaaacgtgccatcctgcactgccccgattggtcccgatctgtccatccccttcccactacgtacccctcccctctgcattctgactcttgattctgaggagctagcccagctaggttctcatcgtcccccatccagggttgttgtggcaggatcggtggccttcggcgctgcgggctgcgatgcctgccggcgccagggtgccggcctgcgcaac

SEQ ID NO: 7505 - DNA, 550 bp, Chlorella sorokiniana
  unsure (1)..(550): unsure at all n locations; Clone ID: LIB3602-068-Q1-K1-H12
aaccccccccccccccccccccccccccccccccggggggccccccccgcccccccccccccnnccccccnncccccccccccccccncccccccccccggggaaacggggggggggcgccccccccccccccccgccggggggggggccgcgggcgccccggggggggccccccacccgccccccacacccccngnggnggggcccccccggggggnccccccccgcccgggacccccgccgcggggggngnnnnncgcgggggggnnnccccnccccccccccncccgnnnncgccncnngggccgggnggggcncccncccccggccgggggcgcccgcccccccccccccccgccgcccccccccgcgcgngggcgcgggggggccgcccccccgccccccccgcccccccgcgcgcgcgccccgcccccccccccccccccccccccccccccgcgcgccccccgcgccccgcccctcccccccgcgcccccgcggcccccccgccgcccccccccgcgccccccgccccccccccccccccccc

SEQ ID NO: 7506 - DNA, 318 bp, Chlorella sorokiniana
  unsure (1)..(318): unsure at all n locations; Clone ID: LIB3602-068-Q1-K1-H2
ggcgatcactgcggnaaagaagaaggaagcgcgtacggcaagctgcgtgtggagcggatgaacgcccgcatggtgggcgtccgcgccaagcgcgccgccgaggctgctgctgccgagaaggacgcgtaagcgccctgcgcgcagccgcgactggcagccgcctgtgcggccgggggcgcggtggcggccggcgacgcggcggggggcaggcgatccccaggcccgcccgctgtggagcgcagcgcagcgcagcgcagcatgcatgccagttggccagccgtgcgcgctgccgcgcccctgtaacacacccctgaagtt

SEQ ID NO: 7507 - DNA, 298 bp, Chlorella sorokiniana
  unsure (1)..(298): unsure at all n locations; Clone ID: LIB3602-068-Q1-K1-H4
gcgggnggcggctngaaaggcggagctcaagcggctggtgctgngaagccaacaagcgagacatacaggaacagcacgacgcgcagctggctgcgctgctgcagcagaagcagcgcggcggccggggagcccgcggctactatggccgaggcggcggcggtggcaggggtggcagcagcgtgctttagaccaagcgcccgcctcaagaccacgttctgctgtcttcaatgtatgcactggttgtctcccattcccatgttgccacctgttgagcgctgtgtcatgtgatctctgagag

SEQ ID NO: 7508 - DNA, 516 bp, Chlorella sorokiniana
  Clone ID: LIB3602-068-Q1-K1-H5
cccagcgtccggtgggccgagccggtgtctgcggggactgggtgtcggagggaggcagcatgcaggcagcagcactcagcggcaaagccatggcggagtggattgcagccagcaggggcaggctgcccagtgatgtttcagacctggcgattgggctgaccacgccgctgaagccggctgcaggcgaagagattgggcagttccctgccagccagaggggcggcgagagcgctgctgcagcaccgcagcacgagcgtaagcagcccagcaggcagcagcagcagcagcgggcggggttggagcagcagcaacagcggcagcagccagcggcagcaggagcaggggtggcagccaagcagcgcagcaaagaggcggcgggctcggatgctgctgcccccgagctgctgtcccgccctgtccgccgaagctgacaaagcccctgcgcaagctctctccgagtttgttctggatgaaatgactgtgttgcagctatattgtgatgccacttcacagggc

SEQ ID NO: 7509 - DNA, 523 bp, Chlorella sorokiniana
  Clone ID: LIB3602-068-Q1-K1-H7
gcgggtcccgcgtgcagccatccagcacatgagcatccgcaagaactatggctgcacccacttcatcattggccgtgacatggcgggctgcaagtccagcctcaccggcgaggacttctacggccactacgatgcccaggactttgccaaggcgcacgctcgggagctgggcatgtaagacggtgccctcgctcaacgtggtgtacaccgaggagaagggctacgtgaccgctgacattgctgaggccgaggggctgcacaccaagaagctcagcggtaccaagttccgccaaatgctgcgcagcggggaacagatcccggagtggttctccttcagctccgtgattgatgtgttgcgcgagcaccagcagcaccagcagcagtgagcagctgggccaccctgcagcctgccccatcgtctgcatttcatgccaataaagctgccattccagttgagcgctgtaagtttacactgctcaacgctagccatgcctgaccccatttgtgtaagcatccatacctt

SEQ ID NO: 7510 - DNA, 593 bp, Chlorella sorokiniana
  Clone ID: LIB3602-068-Q1-K1-H8
tggtgagaaggtgctgggttgcatgctggcatgtcgctgccaagtaagcgtaccgcagtgggagggcctttggtgctgcacctgactgcttttgcgctgactggcgggcatgtgcatgctgtcagcggagtggctgggaactgcctgctctcctttgtttgactttctaccgtccggccttgctgcaggcgcgccttgcgcaggcggcggttgctgtgcactgctgttggcggcagcgtaggcaacagcggacagcagcggcggcggcagagccggagcgaggcggagcacgaaatggcacaacttgctgcagctgaggcggcaaatctgctgttggcatgctggcagcagaaggtgagtcagcccgtgtgcgttggcattgcctactgccaatctgcagcagctgcggcgtgcgctgtgcttagcgccgcctatgctttcaatatcagtgtgtggctgcagcgtatggtactcacttttgcaggaatgacaatgctgctgcctgtgccatgctgtgcaggctggcagagtgccgctcgccagggtgtggcagaatggcatgtgtcgctgctgcgctagcggcagtggcagcg

SEQ ID NO: 7511 - DNA, 476 bp, Chlorella sorokiniana
  Clone ID: LIB3602-069-Q1-K1-A1
tcaaaaaaaaaaaaaaaatacaaaaaatgtaaataataaaataaacaaatataaaaaaaatgtgaggcggtctagatgacccatgtttaggttgctccttgcgatcacggatgtgataacatttctgtttcggtgctcaccggaaattgaatttagtgcgcgtgctgttggaccgcaacggacttgctgaaacgcatgccttggcgcacaatgactttgcttgcatgacagcccacttcagctacgagggctcgtatcaagatagcgcgctcctggcagccttcccatttacgggcattcctgacatgaaattcggaatctcccttaaggtgcagcttcaagcctgaggtctgagtgggttctcaccagcaaggccgcatccatttccagtgctgttgaccaagtgcctttctgttgctaggctttctttgcagcactggctctgtggctttacccatggaaggtcaaaatggagg

SEQ ID NO: 7512 - DNA, 66 bp, Chlorella sorokiniana
  Clone ID: LIB3602-069-Q1-K1-A10
cccgggttcgtacccacgcgttcctttaaaaaaaaaaaaaaaaaaaaaaaaaaaaaagtgtataaa

SEQ ID NO: 7513 - DNA, 609 bp, Chlorella sorokiniana
  unsure (1)..(609): unsure at all n locations; Clone ID: LIB3602-069-Q1-K1-A12
cccggttgacccagcgttctttcgcagnagcccgnatggctgtggattggctgctcagactcgcgagtgcctgccaatgagctgctgggcctgggcccgggcgaggtgtttgtgcagcgcaatgtgggcaacctggccacacacaaagacatgaacgtcatgagctgcatggagtacgcggtaacggtgctgaaagtgaagcacatcatcgtgtgcgggcactatggctgcggcgcggtgaagggcgccctcacgctgccctgcaagacgcctggcctggtcaacctgtggatccaagacattcgtgacacacgggacaagaacattgagattctccgcaagctgcgagggccggagcagattgacaagctggtggaactgaacgtcatgcggcaggtgttcaatgtgtgcacgagccccatcgtgcagcaggcctgggacaatggccagacactggcggtgcatggccttgtgtatgcgctgagcgatggcatcctgcagcaactcacgccgcccatcacgtcacttggcgatttcgaggtgttctcccacgagaacgagctggatgggctgcgccacctcagcctgtctgtcctggagcacatgtcg

SEQ ID NO: 7514 - DNA, 593 bp, Chlorella sorokiniana
  Clone ID: LIB3602-069-Q1-K1-A3
cccgggttctacccacgccgttcttaaaaaaaaaaaaaaaaaaaaaaaaaaaaaaaaaaaaaaaaaaaaaaaaaaaaaaaaaaaaaaaaaaaaaaaaaaaaaaaaaaaaaaaaaaaaaaaaaacaaaaaaaaaaaaaaaaaggggcggcctttttggggagtccaagtttcctgccccctccttgcatggcattgcttttttttttggggctctgaagtgcattctattggcccagttttaaaaacttggcgacttgggaaaaacctgggctttccccattttattcccttggcggccattccccttttccccggttgggttattataaaaaaggcccgctcggttcccctttccaaacgtttccccacccttattggcaatggggcccccccctttcgctgccttttaaccccggggggtgtggggtttccccccagggggcccgttccttttgcaaaccccttaggccccgtcctttgcgttttttccctttccttttggccccgtttcgcctgttttccccgaaatcttttaaatgggggcccccctttagggtcccatttaagggttttagggcccctcgcccccaaaa

SEQ ID NO: 7515 - DNA, 593 bp, Chlorella sorokiniana
  Clone ID: LIB3602-069-Q1-K1-A4
cgtgggccaggcccccgccctgctgctcagcagcgacaacggctgcacctacgccgagtgcggcaaggcctctgctctggagcagcccgccgacggcgccagcggcagcctgcccaccaacgccgccgccatggccgcccccgccatcgtgctgaccctgattgtggtcgcctttgtggaggtgctgatgcacttctgctgagcgcctcatctgaagtgctgaggtgatcctgtcaggcccccatgcagcacagcccaaacagcatctgcctggcgcggcacagcaccgctgctcggccggcacgctgttcttgggctgctgtgcattgcagcatgctgctccggcggcgcggcagggcacctccccttcctctgccgcacacaagtatgcccgcccttccacgcctgcttcccaagcaagttaccctaccctgtccctcgtacccccatgccgtggtgccgatctgtgctgccgctgttgcccgcccagcgcagccggcccgcccggccacctcagctgtcgcttttcgcatgttgcagcctcgcccgtttcttctcctgcctttgcctttgtgacgtctcagctgcggtgc

SEQ ID NO: 7516 - DNA, 576 bp, Chlorella sorokiniana
  Clone ID: LIB3602-069-Q1-K1-A6
tgttcaaaaccaacacgcccagcgtggtcaacatcgccaacatcgcgctggctcgccactactactccacagacgtgctcaagatcccacagggccagggcagcggcttcatctgggacacttcaggccacatcgccaccaacttccacgtcattcggggcgcgagcgaggtgcaggtctcgctcatcgaccagtccacataccccgccaagattgtgggcggcgaccccgccaaggacgtggccgtgctgcagctgcaggctcctcccgaggtgctggccaacctgaagcccgtcagtctgggggccagctccagcctggtggtgggccaaaaggtatttgccattggcaacccctttgggctcgatcactccctcagtagcggcatcatctctggcctgaaccgcgagctcaacacaggctacggcggcagcagcctgcgcaacgtgattcagtgtgatgcggccatcaaccctggcaactcgggcggcccgctgctggacagccgcggccggctgatcggcataaatactgctattgcagaccccacaggcaagggcgcaagcagcggcatcg

SEQ ID NO: 7517 - DNA, 268 bp, Chlorella sorokiniana
  unsure (1)..(268): unsure at all n locations; Clone ID: LIB3602-069-Q1-K1-A7
ttccccttgcctctgccctcccgcctccctccacccttgccaccgccctccaanactgccaccactgggcactatgccccaccccaggaccggcgcagcacccacctgcccatgatctgccttctatagcaccgccgccggctnngcagcaatcgccagccggcggcgccccgtttgcgaggggaacggagtgcccacatgccttttttgcaaaaanaccaggntttggggggcccccctttttttttcccccccctttttggggggg

SEQ ID NO: 7518 - DNA, 464 bp, Chlorella sorokiniana
  Clone ID: LIB3602-069-Q1-K1-A9
tatgccatgcaacgaagcaccccccagcaggcggtgctgccgccctgcgcgctagttttctgcaacaccccgagtgcctagtccccccgcccgcctggtggcgcacctgcattttcccgacgcccgttttcaactgtggccacgttttcgccagcccattcgcgcccctctctagccccggtttgctttctcccttgctacagatgcttcgatgctgacctcccagttctgtgtttgctcctgcggccctcaccgctgtccttgactagaaacccaaagtacgccttgggcgtgcctgtgtattgctcaatcctatgccgcggtgcatgcctgttgtactccccccctagtgtccctgctcgtcctgccttccacctagcgacccagctcgccacacacctcatcctatcgtgcgttcaccccctcatttactaaatagtgtcaggtttaacaaagtgacagtc

SEQ ID NO: 7519 - DNA, 599 bp, Chlorella sorokiniana
  unsure (1)..(599): unsure at all n locations; Clone ID: LIB3602-069-Q1-K1-B1
cccgnacgaggcgccgtctgtggtgggcaacgcgtcctgctgggcgctgcacatggggctgagctccaacttccgctaccaggcgctcaacggcctggacatggtgctgcagccggtggtgccgtcgggcgtgttccgcatcctgacttcggtcatccgcggcgcaaacaacatgattggcggcatttcctttgtcatgattgccaaggcgctgggcgtgcagaaggccggtggtgcagaggaggcagcagcccctgcacccgccagcaccaaggacagcaagaagaagaagaagtaggcgcctctttttcccctataactctagaaggaggggaacaaaagtagactgcccaaacgtgcactgccttgcttgctctccgcccctgcttgccgcttgcggcgggagtgccgcccccacccactttgtacttgccaccccgctttacccaacctgttcccattctttccgagtgtctgattcccgcgttctgtcggctcccgtggcactgccaatcatccagctgctgatacttttgtgaaagccgagtgacaaanaanaaaaaaaaaaananaaaaaananaaaaaaaagggcggccgc

SEQ ID NO: 7520 - DNA, 555 bp, Chlorella sorokiniana
  Clone ID: LIB3602-069-Q1-K1-B10
ttagcgcgcagtgcaaaaaaaaaaaaagagagagagaaaaaaaaaaaaaaaaaaaaaaaagaaaagaaagatataaaaaataaaaaaataaaaaacaaaaaaagtgcgacgtatataaataatactggggggtccgtttctatggattccaactttccttccttttccatcgggcggcctggtttttttttggggtgggcgaatttaaatcgcctggccgggattaaccttggggtggctggggtaatcccggtggggcccaaacttatttcccttgcgaacatttcccctttctaagtggggattgttacccattctgccccggcgcattacctttctgcaaaattgggccgctctctttggcgattcgtatccctcgtgaggggcctatttacccctccttggggtggtttttcttccttggtcgccacttccctttgctttccctttatagctttatttttggggttctttccctggttttccccccaagctttacggtttctccctccctattaatattgcgtgggctccttttagggttcctgttccctg

SEQ ID NO: 7521 - DNA, 401 bp, Chlorella sorokiniana
  Clone ID: LIB3602-069-Q1-K1-B11
ggggggggggggggcaaaaaaaggggggggggccccccgcaaaaaagggggcccccccccctttataaaaagggggcccccccccggggaaaccgccccaatccttttaaaaaaccccccaaagggggcccccccggggcgggccccccgcccctaattttaaaaaaaaaaacccttttggggcccccctccagcgggggggggttttcccccccgttggaaaagggcccctttccggggggcgggccccccccaagggggccccctttccggcccaagggggggggtttaacccaccggggggggggccctttatggggcccaaattttatccccgggggggggaaggggccctgggtttccccccccgttgtggggggccctttaaagggcccaaatta

SEQ ID NO: 7522 - DNA, 589 bp, Chlorella sorokiniana
  Clone ID: LIB3602-069-Q1-K1-B12
gcgttcggcgccgtgaagaagagcaggtggctgccggcgtgaccgccgccgccgccgcggtgctggccaaccccctggctgcccaggctgctgccacccccagcctgaacaacctgatcggctccgtggtggcgggcggtctggtgctggccgccattgctggcgccatcaccgcggtctccaacttcgactccatccgccgctaagctatgcggactggtgtaccgcaccccgagaagagaatcaaccccttgcttgctaggccctgcttagagtttttgctgctcagcgctggggcgccggcgggacgccctatgtcggacaacacctgtgtgcactaaagaggaattttatcctgtaacttcccggcccaaaaaaaaaaaaaaaaaaaaaaaaaaaaaaaaaaaaaaaaaaaaaaaaaaaaaaaaaaaaaaaaaaaaaaaaaaaaaaaaaaaaaaaaaaaaaaaaaaaaaaaaaaaaagggggggggccgttttagaggaacccaagtttacttccccgtgcttgcaaacgtaatagtttttttttggggccccctaatttaaattaccgggcccggggtttaaaa

SEQ ID NO: 7523 - DNA, 251 bp, Chlorella sorokiniana
  unsure (1)..(251): unsure at all n locations; Clone ID: LIB3602-069-Q1-K1-B2
cgccgtggcagcctgncggccgccctccgcgcacccggnagctgcatgcttcatgcccccaacgctgctgtgtttgctcatactcactccccactgcaacggccacgggagggggcacgggcgctgctgacgctgcgccgccgctgccccctgcccaccccggctgtgaactgcgcccgctagacctttttccctcgctaagtgtttctgttgctttgctgttccttggggtgtaacgcccttcactgccc

SEQ ID NO: 7524 - DNA, 398 bp, Chlorella sorokiniana
  Clone ID: LIB3602-069-Q1-K1-B3
taccatgctggcacaaggaagaagacctcccaccccacctgccccatctccggccagcggctcaatgggctgcccgcggtgcgccccaacagcctgcaccgcgtgaacaagagcaagaagacggtgcaccgcgcgtacggcggccacctggcggcgggcgtggtcaaggagcgcatcgtgcgcgccttcctggtggaggagcagaagatcgtgaagaaggtgctgaagctgcaagctgccaatgaggctgcgcaggccaaggccgcggcggcaggcagcaagggcaagaagaagtccaagaagtgagcggcgcacgcgagcggacagttgcgccccatgctcccgctgtaatgcaccctcgatgaataaaaacaaaaaataacccaaaatttaaactg

SEQ ID NO: 7525 - DNA, 583 bp, Chlorella sorokiniana
  Clone ID: LIB3602-069-Q1-K1-B4
gtcgtaagggcacagtcgagtcaccatgactcgcgtgtcggttcttgctgatgccctgaaaactatgtacaatgccgagaagcgcggcaagaagcaggtgctgctgcgcccctcctccaagtgctgatcaagttcctctcgctcatgatgaagcacggctacatcggcgagtttgagtttgtggacaaccaccgctcgggcaagattgtggtggagctgaacggccgcctgaacaagtgcggcgcgatctcgccccgctacgacattgcggccaaggacattgaggcgtgggtgggccgcctgctgccctcccgccagttcggccacatcatcctgaccacctcccagggcatcatggaccacgaggaggccaggcggaagaaggtgggaggcaaggtcctcggcttcttctactgagcggccttgttggatgcgccgcagcagccacggtggaccacagccgtggcggatgcagcacggccggcgcgcccggccgcggtgtttgctgcagcaccggcggcagccctgggtgctgcccccctcttagattgctgcaccgcacggttgtaacagaggttacatg

SEQ ID NO: 7526 - DNA, 158 bp, Chlorella sorokiniana
  unsure (1)..(158): unsure at all n locations; Clone ID: LIB3602-069-Q1-K1-B5
naaaaaaaaaaaaaaaaaaaaaaaaaaaaaaaaaaaaaaaaaaaaagggaggaacgatataaaggaaacaaaaacttaaatacgcagaaacatgcaaacaaaaaaaataataatatagagaaacataaagttcaatccattgagccgaattataggcg

SEQ ID NO: 7527 - DNA, 577 bp, Chlorella sorokiniana
  Clone ID: LIB3602-069-Q1-K1-B6
cgcggcacgctgcagcgcgacttcaagcacctggctgtggacatgttcctgactgaggaggagggcaagaaggtgctcaaggtggactgccactttggcaagcgcaagagcctggcgtccatccgcacctgcacctcgcacgtgcagaacatgatcaccggcgtgaccaagggctacgagtacaagatgcgcctggtgtacgcccatttccccatcaacatcaacatcgagaacaagggcggcaaggtggagatccgcaacttcctgggcgagaagattgtgcgcgtggtggacatgctgccgggcgtgacctgcgagcgcagcgccgccgtcaaggacgagctgatcctgaccggcaacgacatcgagctggtgtcccgcagcagcgcgctgatccaccagaagtgcctggtgaagaagaaggacatccgcaagttcctggacggcatctacctcagcgagcgcggcaccctggtgaagcccgagtaagcggagcccgcacgttgcagtagaggtggcggcacgagcgcagcagtgcgcagcgctcacgcccgcgccggcggagcatcggcggcgg

SEQ ID NO: 7528 - DNA, 605 bp, Chlorella sorokiniana
  Clone ID: LIB3602-069-Q1-K1-B7
gcacgccgtttgtgaagagctgcaggacaagaacatcatcccaggcatcaaggtggacaagggcgtggtggcgctgcccggcaccgacggcgagaccgagacccagggtattgatgacctgggcaagcgctgcgccaagtattacgagcagggcgcccgcttcgccaagtggcgcgcggtgctgaagatcggcaacggctgccccagcgagctgtccatccaccagaacgcctacaccctggcccgctacgccgtcatctgccaggagaacggcctggtgcccattgtggagcccgagatcctgtccgacggcagccacggcatcgaggtgtgcgccgccgtcaccgagcgcgtgctggccgcctgctacaaggccctgaacgaccaccacgcgctgctggagggcaccctgctcaagcccaacatggtgctggcgggcgcccaggccccccaggagaaggtgatgaccgcgggctggctcacggcgcgcacgctgagccgcaccgtgccccccgccgtgcccggcatcatgttcctgtctggcggccagtcggaggaggaggcgaccgcgcacctggcggccatgaacatggtgcaggacgtga

SEQ ID NO: 7529 - DNA, 271 bp, Chlorella sorokiniana
  unsure (1)..(271): unsure at all n locations; Clone ID: LIB3602-069-Q1-K1-B8
cggncgcgtgggttttgcgcactggcacagttttgccctgatgctctcaattcgcgagcgcttcgatccgtctgtcctttgttccgtgtgagtgttccttttttccccgctcctcctaccatgtgtattcttgggtcatatgttgtaacatagagttttcaaaaaaaaaaaaaaaaaaaaaaaaaaaaaaaaaaaaaaaaaaaaaaaaaaaaaaaaaaaaaaaaaaaaaaaaaaaaaaaaaaaaaaaaaaaaaggggcggccggttttaaa

SEQ ID NO: 7530 - DNA, 576 bp, Chlorella sorokiniana
  Clone ID: LIB3602-069-Q1-K1-B9
gcgacagtggcggcggcaccagtcctccacccaccaccggtaccacggccaccaacaccggctcgtgcttccctgaaggcttctacaccaatcaaaatcgtggctgggcttggatggcgttgagtgtgagagcgagcaactggatgctgacaaggcgctggccggctctcaaaatggctggacagccttggagtcggcagcgtgtgccagtggaaagttgacgactgggctgctgcatgcgactgtgtgaaaacagagaaggcggcagtcgacgccggcggtactgtgtgccaggagtgcaccaaaacgctgtacgaaagcacgctgacacaggagtgccgcaaggcattgaccgaggttcagtgcaccaacttcacgccagagcagattgcaactctgcagtcccagctgggagcagacaaggcggcagaagtggccgcgcgcgccaaatttggagtgggcatcaaggcgttcttcgaccagtgccaaatcagctattagatgcacttcggcggtttgccctgctgctttcaagcactggcaaacctcaggggtgtatggaactcaactgggatc

SEQ ID NO: 7531 - DNA, 350 bp, Chlorella sorokiniana
  unsure (1)..(350): unsure at all n locations; Clone ID: LIB3602-069-Q1-K1-C1
ananaaacagctacaaacgctgccctggcaccaggcgtcaatcgcgccagcgcagctgggaaccggccatctgtgtcagcgatagctgcagattcaactatcagaagccgttgccagcgtcgcgcgcggaagctttgggtcgaggaggagaaacagcagcagtagcagacagcaacaggggcagcagcagcagcagcagccaagatgggcaagggacagcagcccctcaagatcaacacgcgacgggggcgtggcaacttggagtgcatggacgagatgacgtccttcttcgcctgcatggccaagtcgatggatgtggaggacaagtgcgcagcggagcggcgggcgct

SEQ ID NO: 7532 - DNA, 354 bp, Chlorella sorokiniana
  unsure (1)..(354): unsure at all n locations; Clone ID: LIB3602-069-Q1-K1-C10
cacagcagcaagctatgcagccctcaccgccctggtgcgactgggcaacccactcaccctgccacctggcgnnttgcactgcatggnaccagaagggcagtgcagcgcggtgctggcccttgctgagctgctgttgggctttgtggccccaaccctggtgctggctgcatcggaggccgagctgtatcagcgctggaggcgggcctggctcaagtggcagcggcagcagctgggcactttgcctgccgacggtggcgggagcacagccggtggtagcggcggcggtgccagcggcagaaggccagcagcagcatctgtggcgcagagacttgagccgccagagcaactgcacac

SEQ ID NO: 7533 - DNA, 518 bp, Chlorella sorokiniana
  Clone ID: LIB3602-069-Q1-K1-C11
gccataccgcggtttacagcacgtatgcttgtgatgtgcgacagcgctggcttggtttggcccgccaggaggggcgcctggggcaacagaaactgggcagtaagtcttaggcgcacaagaaaagggctttgcacgcccgaggttgcacggcaaaaagcagaacgaatcagcgtgacaggtgcgcctgctgcgcaaatggtacagtgccgcggaggcggcataaaattgcagggacggaacaatgacatggcaatggcatcaccggacaagcactgcattcgttgcggggtgggcacgctcgatggaaaagtgcaacttggaaccaaacgagggcagacagctaagctctcgcgtgtgtggagcttgcaacacattgtgtcgggaacattggcccctgaatcaactacaggctgctgccgtggcgcaaccggcgctagcaacaggctgctgctctgaaacgcggcaagcggcaccaggcgcggccgaatgggatgcctgcgcctcactcctgttgcaac

SEQ ID NO: 7534 - DNA, 405 bp, Chlorella sorokiniana
  unsure (1)..(405): unsure at all n locations; Clone ID: LIB3602-069-Q1-K1-C12
ggctgcttgggtgngacacagcggctggcaccatgtcgaacgtctaagaagtcgggatcgtcggcaagtacggcacccgctatggcgcttcgctgaggaagcagatcaagaagatcgaagttagccagcactccaagtacttctgcagcttctgcggcaagttcgccatgaagcgccaggtggttggcatctggaagtgcaaggcctgcaagaagacccaggctggcggcgcgtacgtgctcaacactgcggcgtccgtgactgtgcggtccaccatccgccgcctgcgggagcagaccgagaagtaagcgagcggccattgaggagtgaagcgggcggcggcggcggcgctgcagcagcgcgctgcagcgtgccgggtggccgctgcttcatgatgtaacgcag

SEQ ID NO: 7535 - DNA, 395 bp, Chlorella sorokiniana
  Clone ID: LIB3602-069-Q1-K1-C2
gatgctactgtgtaacaaagtctgtttgtggcgtggtgcaacagggcaagcggattggcatcggtatggctgagggccaggggagcaatcaaacaagcaataggggggtaggggcgaggatttgttttaggtcagggaacaaccccacgtcagttgggtcatggcaagaggaacaggggaagaggtctccagagcgccaaaaggctgcggcggctcagctgccagctggcatctgtcagtgcagcgctcatgccttctggctctccgcttgctgcccgctcacgtccatctgtggccgcagcacgtccagcaggcgcggcagcgtctgcgggatgccgcctgtgatctcaaagttgagcagcttgccctgctgctcatagtactgctccaccggc

SEQ ID NO: 7536 - DNA, 309 bp, Chlorella sorokiniana
  unsure (1)..(309): unsure at all n locations; Clone ID: LIB3602-069-Q1-K1-C3
tccgnaaaaaaaaaaaaaaaaaaaaaaaaaaaaaaggaaaaaaaaaaaaaaaaaaaaaaaaaaataaaaaacaaaaaacatgcaaaaaaaataaaaaaatatcttacgctctcctagggggacccaactgtaccgtcgccgtgcttcccaaagtacactggctttggcgcgggggtccccccggttttattcgcgtgggcggggggccccccccccccccagctgtgttaaatcgcggccttggcccctttttgctggcccccccccgtcgttccccccttcctcgaggggcgaccggtctcgcccccc

SEQ ID NO: 7537 - DNA, 589 bp, Chlorella sorokiniana
  Clone ID: LIB3602-069-Q1-K1-C4
gccagcgccctccatccgcggtacgatggcggacccatttggtgcgctgagcgggcctccctgaatgaggacttgttccctcaggcagccttctccaagaaagccctacgtcctttgtcgctcatacatactccccgcgcacgcagcggcctcagccttgcatcccgccactgctgcccctgtaccaacaccacaataacctcaccaacagcgcccacgcgccctctgcatgacccccaggcttgaacccaactctactgcctctgtctctgataacctgccgtcccgccccacccccgtgccggcccttgcccagtactgcccgtctgcccttgcttgccagtccattcatgttgtccaaccgtcatgtgtgcgcatgcctgcacagcccgacatacaaatgcgttacctctgtctgtgacctccttgcttgcaacaacatgtttgtccacctaacccctttgtgcattgcttagcccacctttgtttgcagcccctgcttgcttagcccacctccctcttgccttttgccctgtgccgcctgcctgcgccttgcatgccgcacagttgccatgccaaagtgtatttg

SEQ ID NO: 7538 - DNA, 591 bp, Chlorella sorokiniana
  Clone ID: LIB3602-069-Q1-K1-C5
aaagacagcggctctgcaaccatggcggagtccgtccagactttcggccgcaagaagatgcggtggctgtggcctatgtgaagcgcggcaagggcgagatccgcctcaacggcgccccgctggagctggtgcagcccgagacgctgcgctggaaggcgtttgagccggtgctgctgctgggcaagcagcgcttctccaacgtggacatccgcatccgcgtcaagggcggcggccaggtgtcccagatctacgccatccgccaggccatctccaagggcattgtggccttctaccagaagtacgtggatgagcagagcaagaacgagatcaaggacatcctgctgacctacgaccgcacgctgctggtggccgaccctcgccgctgcgagcccaagaagttcggtggccacggtgcccgcgcgcggtttcagaaatcttacaggtgaaggctgccccgtgggacggttgggcgcctctggaggcttcttctgcgccgctggcgtggcggcagcggcgtctgcggcctaagcagctgccctggagcagcatgccctcagcgaaagcaccatgagtacaccttgcgtgtgtaac

SEQ ID NO: 7539 - DNA, 588 bp, Chlorella sorokiniana
  unsure (1)..(588): unsure at all n locations; Clone ID: LIB3602-069-Q1-K1-C6
tgctgattcatgcgcagcggcagcacagcgtaccgtgccactactcagctggccaggccgttctgccctctgttctgttctgccccggatatgaactctaccgtcgtgcactcttgattcaccatcctatcaacttcgtgcgtcacgtagtgcccccctgtccactcgcgctcctctgtccatttgcgctcctctgtccatttgtgcttaccgcttgctcttgccgcactcgccaccccttggcgacattcatctcctcacccacacagcatgcgccttttgctccacgtcgtgccgcgctgcgttcagaacgttgaaaacagcatgacatatggaacaaacatgcaacgcagctgtatgaaaaaaatttttttaaaaaaaaaaaaaaaaaaaaaaaaaaaaaaaaaaaaaaaaaaaaaaaaaaaaaaaaaaaaaaaaaaaaaaaaaaaaaaaaaaaaaaaaaaaaaaaaaaaaaaaaaaaaaatggggggngccgttttgggggttccaaattttacttcccctgcctggcgaaggaaaaaccttttttttggggcccccaaattaaaataaaggggcccggggttt

SEQ ID NO: 7540 - DNA, 189 bp, Chlorella sorokiniana
  unsure (1)..(189): unsure at all n locations; Clone ID: LIB3602-069-Q1-K1-C7
gcggnanaagcatgaccganaaagngagcagcggcgcccgctcaccctgggcggcctgctccccgcccggcgcctcgctttggccgcctctggccactcgtacgcctccttgtccatgcccttgtgcttcctgagctgcccaacctggcatgcaagcagcctggccgtctgtaatgccattggcgtgtg

SEQ ID NO: 7541 - DNA, 590 bp, Chlorella sorokiniana
  Clone ID: LIB3602-069-Q1-K1-C8
ggcggcgggcgcagccagctgagcctgcacctgctcaggaagctgcacttgctcagcccggtccggcagccggccagccagccgcaacgcgcaggctgtcggcagccgagcgccatccacccacccaaacccacccaccagcccgcacagtcacgcacccaacgcctcacccccgccccccatctagtggtcagtcccgccgagcgtttgaactgagcagagaagcaccccaaaccgcctcggcgcctttggatccacgcccgcccttgatcaacacaaacacacacactccacttttgtagccaagcaccacccttggccctgcccctgcccgcccgttgcacagcgcacttagcgccgcctgcggcaggccgcttttgttgtagcctgccccgatgcagcagccgttagcacctatcgcccggatatttcatgccccatacccgcttgtgtcgccccaaccccctgcactgccgtccgcacccatccctgcttaccccaccctgcctgtggcagcgctgagcgccgcccctcgtctgttttacggcctttctgagcaggccctgcgtagcgtttactgagagaccccc

SEQ ID NO: 7542 - DNA, 603 bp, Chlorella sorokiniana
  Clone ID: LIB3602-069-Q1-K1-D1
ctagttctagatcgcgaacggccgccctttttttttttttttttttttttttttttttttttttttttttttttttttttttgttggccgggcttttacagcaggcgcccgcaacgcaactggcaaaacagcgtgtgtcacccaaaagcgccgctgcggcgccgggagaacggcacacgccccaaacgtaggtggggcatgaaaatagcaggccggtagctaggccgcaagttagggagggtaccatcgtagtccaacgcagggcaggcaagggcccccggggtgcctgtgcggcacaatagccagggtggcgagaaacagcaaggattaaactcaacacaggagtcatgggataggggggccggcaggggactgaacccctgcagcaaaatagccctgaaaaaggcagggatccaaggtgcggaagaaggaggtgttggggggctatgcgctctcgtagggcggccgcacatgagcggcacacactctcacacagggaagcgggaatcatggggcaaaatgttcgggggagaaaagtaatcaggagggagggacggcgcgcaagtgcatgcattcgtttgaaagggtggggcgggtttggcg

SEQ ID NO: 7543 - DNA, 510 bp, Chlorella sorokiniana
  Clone ID: LIB3602-069-Q1-K1-D10
caaaaaaaaaaaaaaaaaaaaaaaaaaaaaaaaaaaaaaaaaaaaaaaaaaaaaaaaaaaaaaaaaaaaaaaaagggcgtacagaggtaagggatcactaattgaaggccgccttgcttgcaacgacttgacctcttttttgcgggcgactttaaatggagttaactgggcctgtaccttgccttcgtctgtgatttgggggaaacctgggcttttccccgctttattccgccttgaacgatttccccccttgttcccacttggccttaataggcgaaaaggcccgcgacggatctggcgttcaacagcggtttgcgccatggttgattggccctttggcgacggcgctggtgtcgcggctttttacgaggggcgtgggtttccggggtatacgcgccactatcaccgctccatttgctatctctctagccccggctgcttccgttttctttctttcctttctaggcacgtttgccgggtttccccgataggctgcgattcggggcctcc

SEQ ID NO: 7544 - DNA, 145 bp, Chlorella sorokiniana
  unsure (1)..(145): unsure at all n locations; Clone ID: LIB3602-069-Q1-K1-D11
cccgggtncgnacccacgccgtccgnaaaaaaaaaaaaaaaaaaaaaaaaaaaaaaaaaaaaaaaaaaaaaaaaaaaaagaaaggacgaatctaaaggaaaccaaaactaaaaaacacaatgcatgcagacgaaaaaactaatta

SEQ ID NO: 7545 - DNA, 576 bp, Chlorella sorokiniana
  Clone ID: LIB3602-069-Q1-K1-D2
cgattgccctgctcggcccttgcaatgctcgccctgccctcctgctcaccctgcccctcccccaaccttcctccctccctccttgcccaccctctcgtcaggtccgcgtggtgtccatgccctgctgggagctgtttgaggagcagccgcagagctacaaggacagcgtgctgctgcccgaggtgaaggcccgcgtgtctgtggaggccggcagcacatacggctggcagaagtgggtgggcgacaagggcaagtccatcggcattgacgagttcggcgcctccgcccccggccccctgctgtacgagaagtacggcatcaccgtggacgccgtggtggacgccgccaagcagtcgatgtccgcgtaagcagccatccggcagccgcagcagcgccgcctccccggcggcccaccgttgagtcgtgccaaccgcccgccagcccccccgcgcggtgcggacgcccctcgtcgaattattttttgccgcattgctcccttccgccgcccctggatggctttcctgctcccctctgtctcgtcggttcctcaggcctcggggcgcattttgtccgatg

SEQ ID NO: 7546 - DNA, 296 bp, Chlorella sorokiniana
  Clone ID: LIB3602-069-Q1-K1-D4
cggcgaaatcatgaccttcgatcagctggcgctggtggcgcccaccggcagcaactgcgtgctgctgcgcggccccaagaacagccgcgaggccgtcaagcacttcggccccgcacccggtgtgcccggctcccacgccaagccgtacgtgcgcagcaagggccgcaagtttgagcgcgcccgcggccgccggaagagcaagggctacaaggcgtaagcgcccccacgcctcagcggccggcgggcggcggcggccgtggatgcgctgccgcagcgccgccggcacagttgacggc

SEQ ID NO: 7547 - DNA, 575 bp, Chlorella sorokiniana
  Clone ID: LIB3602-069-Q1-K1-D5
ccgcaccgctcccaagagcgagaacccctatgtcaagctgctggtgaagctgtaccgcttcctggtgcgccgcaccgagagcgacttcaacaaggtggtgctcaagcggctgttcatgtccaagaccaaccgcccgcccctctcgctgtccaagctcgccaagttcatggccggcaaggacggcaagattgcggtgctggtcggcaccatcaccgacgacgtgcggctgtttgaggtgcccaagctgcgcgtgtgcgcgctgcgcgtcaccgagaccgctcgcgcccgcatcctcaaggctggcggcgagatcatgaccttcgatcagctggcgctggtggcgcccaccggtagcaactgcgtgctgctgcgcggccccaagaacagccgcgaggccgtcaagcacttcggccccgcacccggtgtgcccggctcccacgccaagccgtacgtgcgcagcaagggccgcaagtttgagcgcgcccgcggccgccggaagagcaagggctacaaggcgtaagcgcccccacgcctcagcggccggcgggcggcggcggccgtggatgcgctgccgc

SEQ ID NO: 7548 - DNA, 409 bp, Chlorella sorokiniana
  Clone ID: LIB3602-069-Q1-K1-D7
cccgctcgctgccgcactgcggcgcaccatgctccttccccacaccgaccctgcaccttggccctcgtattgctgccgtccgtcgcctgccgtgccccgccagcccgcctcatggggcgctccatgcagctcacatccccctggcaggctggctgagcacttaggctagacagcagctgcccgttggcctccctgcacccggttttgctcccttcttgcttccacaacccgcttgcagcaacgttgctcgtgcactgctcccagcagccggtggtgctcaacgatggggtcacccggacacccgacctccgctgttgttgtttcattccagcattgcatgcccacgttgtgttgtttccagagccagtcagcctgtggaccaggcccagcctctgtaacccaagcaagc

SEQ ID NO: 7549 - DNA, 437 bp, Chlorella sorokiniana
  Clone ID: LIB3602-069-Q1-K1-D8
acataccatttgttacacattaagtcctggtaccagatcggcataaggacgcaaaaaggcactgtacagtcgggccttgaaaatgggtctggatacgttggacgtgtgggtgagtgggtgtgcgagcatgatggatgggtttggcagcagctttgcatggcagcagccgctgtgtgaagcgcgggtgaagggtggacatggagtgaggtgtgggaggtaggatgtgcggcggtgagcggcaggaaaggtggcgggtggaagatgggtgcgggtgagggggcggcaggtggtgcagcggcggacgtgcgtttggggtggcagatttggtggatggggaggatggtgcatggagggcgttgagcgggtgatgggtggtgagtgggtggcagaggttgtggcggagggaaggtgagtggatgggtggcaggtggatggtt

SEQ ID NO: 7550 - DNA, 592 bp, Chlorella sorokiniana
  unsure (1)..(592): unsure at all n locations; Clone ID: LIB3602-069-Q1-K1-E1
gcgtgctggnanaggacggccagtttgacaagctggaggagctgatctacatggagagccacctcagcaacacgagcgccaagttctacggcgaggacacgcagcagatgctgaagaacgcgtccttccccggctccaacaacggcaccggcctcttccagaccatcgtgggcctcaaggtgcgcgaggtgtacgagcgcatcaccgagaaggaggtggtccccgtctaagctgctgctgctgccccagcctgcctggctcccagctcatgccatgtcccacccggctggctgagcgggacctggccggctgctgccccggtcgtcggcgcgccaagctgagcatgctcccctctgagggcgggtggaccacccgcccgcgcctcgtgcatagcggggggccagcaaggcgcgccgctggcggcttggtgcacggtnggcggtcgggcctgctctgcacgtgtggcccggccgcctgccccagcgtgcgtgtctgtatccattcgattctgttgggcggcctgcccccgggcctgccccctcgcctcgcttgcgtctgtattgtttcctctctcccttgctccaccctgtgt

SEQ ID NO: 7551 - DNA, 124 bp, Chlorella sorokiniana
  unsure (1)..(124): unsure at all n locations; Clone ID: LIB3602-069-Q1-K1-E12
gggggcccccccgagggggccccgggcgcggggggcgggggggggggggggnnaatttagggggnnaaaanccaaaaaannaaaaaagttgggtggtggaggggggggcccccccccccccccc

SEQ ID NO: 7552 - DNA, 595 bp, Chlorella sorokiniana
  unsure (1)..(595): unsure at all n locations; Clone ID: LIB3602-069-Q1-K1-E2
ccaagcacttgccggnacgcaacgcctgggtggcagcggcggccccgggcaagggcgaggacgcggcgcagctgcatgctgcatggcaccagcagcaggcggcgctcatggcggcggcggcggcggaactggaagcggagcagcggcagcgggctggggaggcagccagtgatggcggcgaggcagaggaggaggaggatgctgatgccgagccagagggtggagaagatgccagccaggagcagcaggagcttgaagaggaggaagcggcagcggcggcggcggacggtggaggccagtctgacggcgagggtgaggctgaggatgagcgggagcaggctgcctggagccaggagctggagcagtggatggaggaggagggccaggaggcggcggatggggaggagggccaggaggaggacagtgagctgccgcatgagcaagctgctggaggagcagcagaggaggagcaggaggaggcgggtgaggcgcggcagcagccgctgccccgggtgcgccgcctctgaagcgcacccgctgccagttttggttttggcgcacgtgggggccgccgtggcccccagcttcggagcat

SEQ ID NO: 7553 - DNA, 232 bp, Chlorella sorokiniana
  unsure (1)..(232): unsure at all n locations; Clone ID: LIB3602-069-Q1-K1-E3
ggggaaaccccccaaccggaaaaaggggggcgtgggggggcccggggggggccccccgcccccaaaaacacccaggaaacaaaaaccccgcacaaaaaaagaaagagcaacaaaacaaaaanncgcaaccaaaacccgngggggggttttaggttgtttggnttttttgtnggggngggggggggggggggggggggggcggggggggggcccgccccgcccccccccgccc

SEQ ID NO: 7554 - DNA, 490 bp, Chlorella sorokiniana
  Clone ID: LIB3602-069-Q1-K1-E4
catgctgcagccagtggcagcgcagcacatgcgggatgcgctctccgctgctgtactgtcctgcttatgccagtgtttgcctgccacagtgtgagcccaaaataccgtttcagcagttttcctcagctacacttccccttgacttgtgaactccaggccctgtaacacatcacgccctaaaaaaaaaaaaaaaaaaaaaaaaaaaaaaaaaaaaaaaaaaaaaaaaaaaaaaaaaaaaaaataaaaaaaaaaaaaaaaaaaaaacaacaagcatgcaaaaaaaaaaaaaaattttttatattgactcaaaataaattaaactgagccggcccttttacaaaaaccttgactgagtaaaaaaatccctgttactcaactaaataactctttctagaaatacccctttttccagatggctggataaatgaaagacccgcccacgatcgccctcccttccaattgctcacactcactgtatagagggagacac

SEQ ID NO: 7555 - DNA, 602 bp, Chlorella sorokiniana
  Clone ID: LIB3602-069-Q1-K1-E5
taaaaaaaaaaaaaaaaaaaaaaaaaaaaaaaaaaaaaaaaaaaaaaaaaaaaaaaaaaaaaaaaaaaaaaaaaaaaaaaaaaataaaaaaaaaaaaaaaaattatattttaaaaaattaaaattaattgtggggggcccttttttttgtatttttttttttggggttcctccttttttctttttcttttttttttgggggcccctttctttttttgcctggcggcgtttttttcctttcggctgggggggaaacccccttttcccccccttctttttcctgttttggcacatttccccttttcctgtttggggtttttttacccagcctgcttccggatttttcctttccccctgtcgtgttcctttcacctttgggttgtggggccccttttttttgggggctttcctttcctttgtggggtgtttttgtcccccctttttcttggccccttttttttttgggggtccttcttttaggggcccccttgtttttgtttttctccccgtttttttggctccacccggtttttgttttttccccggttggcgttttttttttggggggcggcctttctttgaggcctctgttttttttttttt

SEQ ID NO: 7556 - DNA, 593 bp, Chlorella sorokiniana
  unsure (1)..(593): unsure at all n locations; Clone ID: LIB3602-069-Q1-K1-E7
gcctgaagncgaatccaagtggatggcaagccctacagcgcgcgctacatcggctccctggtcggcgacttccaccgcaccctgctgtacggcggcatctacggctaccccggcgacgccaagaaccccaacggcaagctgcgcctgctgtacgagtgcgcccccatgtccatgatctgcgagcaggcgggcggcgccggctccaccggcttccagcgcgtgctggacatcgtgcccaccaaggtccacgagcgccagccgctgtttgtgggcagcaagtgggaggtcgagtacctggagagcgtgctgcagaacaagcccgcgccccagtaagcgcagcagccagccacttgccgcggcccccagctggcgaccgcctggccccagctgcgatcgccgcagcccccaacgtccctttcttgtgccccctattctttcccgcccctgttgtttgctcatcctaacgtctcccctcacctgagaagatccctgctccgcatcgccacccgatccatcgctccgcgctgctgtttgttcccccaacgtattttatacggcgcggcactcccgatccgtccccgcccagttccgtt

SEQ ID NO: 7557 - DNA, 93 bp, Chlorella sorokiniana
  unsure (1)..(93): unsure at all n locations; Clone ID: LIB3602-069-Q1-K1-E8
naaaaaaaaaaaaaaaaaaaaaaaaaaaaaaaaaaaaaaaaaaaaaaaaaagggcggacaaaaaaaaaaaaaaaaaaaataaaatggcgccgc

SEQ ID NO: 7558 - DNA, 601 bp, Chlorella sorokiniana
  unsure (1)..(601): unsure at all n locations; Clone ID: LIB3602-069-Q1-K1-F1
acccctgctggtcctgctgggtgcagcggccagcgcctggctgctcttcctcgcagccctgacctggcagcagcagcggcagtgggctcccggcagcggccggcccggcgcggcgctgggctttggcctcgggctgtggggcagcctggtgcgcgcctcctggctgccgctgccgctgcgcggcctgggcagcaggctgcctttcaagggctcggggcccaacctgattgagctatcaatcgacagcgggccaccctccagcgaccgcagcagcctcagcatgagcagcagcctggccaccaaccgaacactggccgaccttgtgccaggcggcagccccttcccaaccgcccgcactttgggcggaggctgggcccccagccacgggccgagtgacgccgcagcaggcgccgcagcaaccgcagcagggctgccacccagcggcagcactgctgcaggcgagcggccgcgcggcctctcttgggcggcacccgtcggttctgtggtgcaggagggcgcagccggcggtgccggngtggggcagcatgcagcatatgccaccagtaggctggtgcgcagccaccccagccgccgctccctg

SEQ ID NO: 7559 - DNA, 601 bp, Chlorella sorokiniana
  Clone ID: LIB3602-069-Q1-K1-F10
gtgaccgacatcgtgatccaaacctcacggcaagccctgcaacaccaagttcctgacggtcaagcgcgcgctcgcccccacccccttctaaactgattggcgagcgctgcagccgttgagacgcagccctccccgaggccgtgcgaccgaccagaggcggccccggcatcagcaatgctttctacccaggacccctcggcaaaactgaatcaataacggccggcggggcactccacgcaggcgccgctgcctcgaggcacgcggcgcagcagcggcggctggggcaccgcgcgggcagcatgcgcccgcgctcagttgagcccatgcacggccgccaggaatacccgcctcgccggccggatcctcttttgcatgccttcctgcaccggggcgcgcgcccctctgcggcgccgcccccgctttccttttgttttttccaccgctaccccggtcgttgcatctcaatgcatctcaccccctctaccacctcccgtaccgcggcgctaccaaccccgcctgaattgccttcgtcccgcatacacccgcatacaccgtcgtcgtgcctccctctctcttccacctgctgtgcctccctgctgca

SEQ ID NO: 7560 - DNA, 545 bp, Chlorella sorokiniana
  Clone ID: LIB3602-069-Q1-K1-F11
atcttgcagcaatggcagccggctgcatctttctaacatcgtcaccggcccactcgtttgtgccatgcccacctgcctccaacgtcacccttcatcaaccctcacccaacccatccacctgccacccatccactcaccttccctccgccacaacctctgccacccactcaccacccatcacccgctcaacgccctccatgcaccatcctccccatccaccaaatctgccaccccaaacgcacgtccgccgctgcaccacctgccgccccctcacccgcacccatcttccacccgccacctttcctgccgctcaccgccgcacatcctacctcccacacctcactccatgtccacccttcacccgcgcttcacacagcggctgctgccatgcaaagctgctgccaaacccatccatcatgctcgcacacccactcacccacacgtccaacgtatccagacccattttcaaggcccgactgtacagtgcctttttgcgtccttatgccgatctggtaccaggacttaatgtgtaacaaatggtatgt

SEQ ID NO: 7561 - DNA, 155 bp, Chlorella sorokiniana
  unsure (1)..(155): unsure at all n locations; Clone ID: LIB3602-069-Q1-K1-F12
ccccnnccccccccccccccccccccccccncccccccccccccccccccccccgncccccccccccnccccncccccccccccccccccccccccccccccccccccccgcccgccccccccccgcnnccccccccccccccccggccccccgg

SEQ ID NO: 7562 - DNA, 576 bp, Chlorella sorokiniana
  unsure (1)..(576): unsure at all n locations; Clone ID: LIB3602-069-Q1-K1-F2
ctggnacggctgcacacactagggcttcgtttgctgcaaactccaggtctcctgactagcacaagctccggcgaagcctgagacagccggcaggcagcgcggagcggcagccagcaagcgaggcagcaggatgccccgagccaagacattcaaggaggagcacccgtttgagaagcggcaggcggaggcggcccgcatccgagacaagtaccctgaccgcatcccggtgattgtggagcgcgctgacaagagcaacatcccggacattgacaagaagaagtacctggtgcccgcggacctcacggtgggccagtttgtgtacgtgatccgcaagcgcatccgcgtgtcgcccgagcaggccatcttcatgtttgtgcgcaacgtgctgccgcccacggccgcgctgatggcggacgtgtatgcagaccacaaggacgaggacaacttcctctacatcacctacagcggtgagaacacgtttggctgaggctggcgcaccgctcgccagctggccggagtccccatgctgccatgacattgcgctgaatcgcctgcgccctgtatcacgggcatagc

SEQ ID NO: 7563 - DNA, 381 bp, Chlorella sorokiniana
  Clone ID: LIB3602-069-Q1-K1-F4
cgtgaggcgggctggcggcggtgtggaccttcattgtgtcggacgccaccttccggctggcgcccacgcagaacagccctcggcgggacgagcaggaggtgaaggtggaccagtgcaagatcgtggtggtggaccagcggctggcgcccaatgccgacaaggagtgatgctgctacacctccggcagtaacatcattcccccatagtggcaccgacgtctgtccagcagccagctcacccggcctcagaactcagttcaaacctcggcacaccttccgctcccgtgtccgctatgctctgctccactccctctgctgcccagctctgctcccggcttcccgtgcgcactgctctctgttgcgttaaagctggaacaatgca

SEQ ID NO: 7564 - DNA, 572 bp, Chlorella sorokiniana
  unsure (1)..(572): unsure at all n locations; Clone ID: LIB3602-069-Q1-K1-F5
anaagacggcggcaagttccctgtgcaccccaagcagnagaaggccgccgctgaggcgtccaagaagcccgccaagttctaccccgcagaggatgcgccccagcctctggcgcgccgcgtgatccgccgcgccgccaagctgcggccgtccatcacccccggcaccgtgctgatcctgctggcgggccgcttcaagggcaagcgcgtggtgttcctgggccagctgccctctggcctgctgctggtgaccggccccttcaagctcaacggcgtgcccgtgcgccgcgtgaaccaggcgtacgtcatcgccacctccaccaaggtggacgtgagcggcgtggacatctccaagtttgacgacgcctacttcaagagcgccgagaagaagcagaagaagcagagcgaggagggcttctttgccgagaagaccgagaaggcgccgctgcccgctgagtatgtggccaaccagaaggcggtggacgcggcgctgctgggcaagctgagcgacgagctcaagggctacctgtccagccgcttcacgctgcgctctggcgaccggccgcacctcatga

SEQ ID NO: 7565 - DNA, 78 bp, Chlorella sorokiniana
  unsure (1)..(78): unsure at all n locations; Clone ID: LIB3602-069-Q1-K1-F7
naaaaaaaaaaaaaaaaaaaaaaaaaaaaaaaaaaaaaaaaaaaaaaaaaaaaaaaaaaaaaaaaaaaggggcgggcc

SEQ ID NO: 7566 - DNA, 111 bp, Chlorella sorokiniana
  unsure (1)..(111): unsure at all n locations; Clone ID: LIB3602-069-Q1-K1-F8
ctttcctgcctgcaaccttgnttgtgtaacagccttggttgccaaaaaaaaaaaaaaaaaaaaaaaaaaaaaaaaaaaaaaaaaaaaaaaaaaaaaaaaaggaaaaacggg

SEQ ID NO: 7567 - DNA, 416 bp, Chlorella sorokiniana
  unsure (1)..(416): unsure at all n locations; Clone ID: LIB3602-069-Q1-K1-G1
gggnaaagcagcatgnagcacccattctaaagccctctggaaccagcctgattgctggctgccacggccgcgcctctcacctgttagcctcagtttctgagctgtgccccgctgcattggagcggctgctgctgtgacggtgcacgtgcatgtgctgctgtgtaaaaacgcccaacgaaaaaaaaaaaaaaaaaaaaaaaaaaaaaaaaaaaaaaaaaaaaaaaaaaaaaacgaaaaaaaaaaaaacaaacaaaatataccctaccatagaaagaacataaaatagactatacgtggtaccgataaattaaattcactggacctgggatttccatcacagttacctggattaaaccatgccgtaaccttaacctaatttaatcgccttgcatcacaccttatttgcctaaactgat

SEQ ID NO: 7568 - DNA, 356 bp, Chlorella sorokiniana
  Clone ID: LIB3602-069-Q1-K1-G10
cgcagcgcgaggcactccgcacgagggctttgcgggcggcgccagcaacctgatcaagattggcgcggtgctgctgctgctcgacctggcctggtttggtttcgagctgctgaccaactccagcctgattgaggacaccttcggcaagtgaagcatgtgaaacggatcagcagtcagcaatagcggcctccaaaacgtcaaccccttgaactcccttgtggggacagtgcggcagtcccaggcgccgcggcagccccgctgtgcgctggtgcattgccggcgggcggcgggcaccatttcgtttacctacctctgcagtcttttgttcccctttcctcggtaatgatgtgtgtctg

SEQ ID NO: 7569 - DNA, 395 bp, Chlorella sorokiniana
  unsure (1)..(395): unsure at all n locations; Clone ID: LIB3602-069-Q1-K1-G11
gctctccactgtgttcaatctgtcgcaagttctgccgtcccgcctcacccctgccgaccgtcctgttgtggcctaacgctgtaccaagtctctgctgaccgccgtcccctccggccgtgccccagcgcccctgctcacctcccctcttgagactgctcctccgtgcttgcggcgaatgggctcctgtagattagacagcccccatgcgtacccaccactgtgccctcttttcctgtactctcgccggccgcggcgcgcacacacatgctcgctcgaaaacccaacgaagacgnccgcccgccatacacacgcactgctgtgttactgatgcacccaccgtgggagcccttttttccatgcctgtgctcaccccctgttacccagatagagctcct

SEQ ID NO: 7570 - DNA, 63 bp, Chlorella sorokiniana
  Clone ID: LIB3602-069-Q1-K1-G2
aaaaaaaaaaaactgaaaaaccataaaatggacttgaacaaaacaaaaaaaaataatatacaa

SEQ ID NO: 7571 - DNA, 602 bp, Chlorella sorokiniana
  unsure (1)..(602): unsure at all n locations; Clone ID: LIB3602-069-Q1-K1-G4
gccggnaaaagnaacggnaccagggcagcggcggcggcgcacccgcaaacaacggcagcagcaggagcggctggaaactccgctcctgcagcgcaggcggccggcggcgcagcagggcggccagcgggctgctgctgcgatagctgcggcggcagctgactgtggccgccagggcggccctggcaagctgtggcaggagcaaggtgcagcggggcgtgctgtggagcagccggtcagcgagcagcggcagcagcagcagcagcagcggcagcaaggggaggctccccgcgaccgcaacgcctgcttcttctgcggggccacaggccactggtctgcggcttgccctgagcggcggcgctgcttccactgcaaggagattgggcactggagcaaagactgtccgaagctgcaacgcgggtcgtgctaccgctgcggccagcccggccactgggccatgaattgccccaatcgctgagctgcggcgacggccacgcacagcggtccggcttccgtcttgcctgcctgctagcatgggtgattattacatgccctgctctgcaagcggaatcgatgcgtgctgcgcgaaaagtgcttgtgactgt

SEQ ID NO: 7572 - DNA, 558 bp, Chlorella sorokiniana
  unsure (1)..(558): unsure at all n locations; Clone ID: LIB3602-069-Q1-K1-G5
gtcaggaccccgcgtacaanaaagcagtggatgaggagaacgggcgcggttcaaggcgcgcaaggagcaggaggcccgtgagaatccggagcccaagtttggcatcatcattccactagcaccttttggcatggctgactacgatggcggcgagcggttcgacctgcggctgccatacgtggaccagggcgacccccgacaggagctggccaatgaccccctgggcctgaagcagctgggccgcgctttcggcatttgcaagaaaaaaggcggggatggggacccttcagcgcaaggcaagcgcaagggcaagtgaactacctgatcaaacaaacgggttgggattaccttgcaagctttaaacaaaacaaagttgccataatttctgtcgcattcaactggtatcgaggcagcagctttcctttaacatttgccctgccaccaacggcaaacttgctggtgggtgtcccgagctgggaccccccttttcccttacttctgcatttgtgcactgcgggtttatttttttgtctgagtgaaaagaatgatgcattgctc

SEQ ID NO: 7573 - DNA, 604 bp, Chlorella sorokiniana
  unsure (1)..(604): unsure at all n locations; Clone ID: LIB3602-069-Q1-K1-G7
cccagnaagacaagcgcttcagcggctccgtgaagctgccctactgcccccgccccaacatgaagctgtgcgtgctgggtgaccacaagcattgcgaggaggccaaggccctgggcctggacgccatgaccgtggacgacctgaagaagctgaacaagaacaagaagctggtgaagaagctggccaagaagtacgccgccttcatggcctccgactcggtgatcaagcagatcccccgtctgttgggcccgggcctcaacaaggccggcaagttccccaccctcatcacccacaacgactcgctggagaacaaggcgaacgagatccgctcgtccgtcaagtaccagctgaagaaggtgctgtgcctgggtgtggctgtgggcaacgtgtccatgaccgaccgcgagctgtacgtcaacatccagatgtccatcaacttcctggtgtcgctgctgaagaagaactggcagaacgtgaagagcctgtacatcaagagctccatgggcaagccctaccgcctgtactgagcgcgcaggccgccctggctgcctccacagtgcagcaggccgcacggccgcagcggcgcggtgcgcccgccggcgcg

SEQ ID NO: 7574 - DNA, 341 bp, Chlorella sorokiniana
  Clone ID: LIB3602-069-Q1-K1-G8
caggaccactgccaccttcggcgctgctacagtgctgccacttccagcacctgccgctggactggtgtcggttttggccacgcttccatcccttgcgcaaaaacgcgtggcggactgggagaacgaaccctcggaaccccagtgcccggtgaagggggccggccggtgcccctttgattcgctgtgttaacaagacaaaaaaaggccccagggaagaaaccaaaactgggtggggcccttcaatgggaaggaacaaccccataatcttattggggggaaggaaaggcccaaccccacagccaaatggactggtgtgacattttcccccctttttgtccccc

SEQ ID NO: 7575 - DNA, 394 bp, Chlorella sorokiniana
  unsure (1)..(394): unsure at all n locations; Clone ID: LIB3602-069-Q1-K1-H10
ctggctcatgctgtgggtggccacagtgctggcgctgtggagcctggccaactacatgagcggggtgtggcacttcttccgcttcccgggcgtgccaaagccgccgcgcccgccgcgccagtgaacggccgccagctgctttgggagaaccgctggcgcaaacatacatagcgagacatgcagcccacatctagcgcgacactagcttgagccatgtggcaccattcatacgcagtgcgtgaatctttcctcccattcatttgcacttcacacccgcctcgtgcctttccactgccgcccatcaacccctgccattgctgcctgcttgtttgcacagagcatcatcttggttacttcctccaacatctcaaattcatctgtgagcgaatgtngc

SEQ ID NO: 7576 - DNA, 584 bp, Chlorella sorokiniana
  Clone ID: LIB3602-069-Q1-K1-H11
tccgggagatgactcgacttctgaagcagctgtcctcgggcccctcctacgtgtttgccaactttgagctggatgcatccggcctgctcaagtggcggacctggcctccaaggcgtctgccgcgagctggactaaataaatgctgagtcaacagatgcactgagcacctgggagctgcagcacaagcatgcgccctgatgctgcaatgaagtgggcgtgggcggcgcaaagctgcctggccggtcagctgcaatgaacgctggctgcgctcgtccacgcctggaacagttggcagggtgcctgccgcattgcccaaccattttgcacacatgtcttgccaccgcatattcgcatgaaaacatacgcacacaaacgtgccatcctgcactgccccgattggtcccgatctgtccatccccttcccactacgtacccctcccctctgcattctgactcttgattctgaggagctagcccagctaggttctcatcgtcccccatccagggttgttgtggcaggatcggtggccttcggcgctgcgggctgcgatgcctgccggcgccagggtgccggcctgcgcaac

SEQ ID NO: 7577 - DNA, 666 bp, Chlorella sorokiniana
  unsure (1)..(666): unsure at all n locations; Clone ID: LIB3602-069-Q1-K1-H12
cccccccccccgcccgggcccccccgcgggggggggnnnttggggggtttccccccccccccccccccccnccgggggggggggcgggggggccgccccccccgggnnaacccccccccccccccccccccccccggaaaaggggggggggggccccccccccccccccccggggggggggggggggggggggggggccccccccgcccccccccccggggggggggcccccggggggcccccccaaagggagcccccccccccccccccccccggggggggggggttttttgacccccccctctcttccccccccgggggggggggggccccccccggggggggggataacgccccccccccccgtgggggggggggggggggccttgggggcccccccccccccgggggccccaaaaaagggggggggggcggtttaataaaaaaacacaccccccgggggcggccggggggggcccccccccccccccccggggcccccccgcccccccccccgaaagaaaaaaaannnnnntttntgtgttttgggggggggggcgccccccccccccccccggggcctcccccccccccccccgacggggggggggggggcggtggttgggcgcgccccgcgggggggggggccccccccccccccgcccc

SEQ ID NO: 7578 - DNA, 320 bp, Chlorella sorokiniana
  unsure (1)..(320): unsure at all n locations; Clone ID: LIB3602-069-Q1-K1-H2
ggcgatcactgcggnanatgaataaggatagcgcgtacggcaagctgcgtgtggagcggatgaacgcccgcatggtgggcgtccgcgccaagcgcgccgccgaggctgctgctgccgagaaggacgcgtaagcgccctgcgcgcagccgcgactggcagccgcctgtgcggccgggggcgcggtggcggccggcgacgcggcggggggcaggcgatccccaggcccgcccgctgtggagcgcagcgcagcgcagcgcagcatgcatgccagttggccagccgtgcgcgctgccgcgcccctgtaacacacccctgaagtt

SEQ ID NO: 7579 - DNA, 308 bp, Chlorella sorokiniana
  unsure (1)..(308): unsure at all n locations; Clone ID: LIB3602-069-Q1-K1-H5
ccggngtcgacccacgccgtccggaaaaaaaaaaaaaaaaaaaaaaaaaaaataaaaaaaaaaggtggttttttttatgtgtttcagcgaacgaacgggggggcggcacggcagggcccaatcatccgggcacctgcttgcaatgtactggccttcgttttacatcgcctgaaactgggcaaagccgtggtcgggtgccaaactgggggggcgggaagaaaactgccgttcgccagttgacccgtttgccatgaggcccgccttgttcgcgcctgcccaaattcgctgagcctgaatgggcacggggt

SEQ ID NO: 7580 - DNA, 707 bp, Chlorella sorokiniana
  unsure (1)..(707): unsure at all n locations; Clone ID: LIB3602-069-Q1-K1-H6
ccccccaaacccccccccccccccccccgaaaagggggggggggagaccaaaaaaaaaccccccccccggggggggccaaaaccagggggcccccccccccccccccccccacccccccggnggggggggggggtaaaaaaaaaaaaaaaagggggggggcgcccccccccacggggggccccggggaaaaaaaaaaaaacaaacaacaccccccccccctgggggggccccccaagggcccccccccccgggggggggggggggggggaaaaaaaaacaccccccccacaaaaaaaaagggggggggggggcccccccccccccccccccgggggggccccccccaaaaaaaaaaaaaaaagggggaagggggccccccccccccccctaaaaaagccccgggggaccccccaaaaaaagaaaaagagggggggaaaaaaaaaaaaaagcccgcccccgcgccacacaaagggggaaaccccccccccccaaacctggggggggggggggggggggaagtcccccaaaccccccccccgaaaaagaaaaaaacccccccaccccccgggggggccccacaaaaaaaaggggccccccccccccccccccttaaaccccagggggagggggggcccccaaaaaaaaaaaacccccccccggggggggggggggacccctcccccccccggcgggcccccccgggggg

SEQ ID NO: 7581 - DNA, 520 bp, Chlorella sorokiniana
  Clone ID: LIB3602-069-Q1-K1-H7
caagtttttgtgcccggcggccgattttgaggggcgggtgactgggccagcccagccgctctccccacccaccctgccccattgacacactcccagcctggcgatgcgtgactccggttttggttcccttcaacaaaaacagacgattccctcctgcctgactgtaccccgcactccgccgcagttttggtcgcgccctgtagccaagcccgctattttgcctagcgccgcagcgaagcttgcttgaccctcgagaccagcagcccaaccctctccctcagcagttgtttttattggcacgcccgccggcccggccggcgcagccggggccctctggcagagcccagtttttccgctgcgccgccggccgcaggcaccgccccgggaaactgccctccgatctgagactgtccgccctgttgtatctgccctctcagcctgcctgcctctgaaaagttgggtgccacgtcgtgccacgctcgccatgcctgaccccatttgtgtaagcatccatccatta

SEQ ID NO: 7582 - DNA, 591 bp, Chlorella sorokiniana
  unsure (1)..(591): unsure at all n locations; Clone ID: LIB3602-069-Q1-K1-H8
gcatgaccctgggtctgcccgtggccgcggtgatgaactgcgccgacaacagcggcgccaagaacctgtacatcatctcggtgcacggctggggcgcgcgcctgaaccgcctgcccgccgccgcccccggcgacatggtcatggcgaccgtgaagaagggcaagcccgacctgcgcaagaaggtcatgcccgcgattgtggtgcggcagcgcaaggcgttccggcggaaggacggcacctacatctactttgaggacaacgcgggcgtgattgtcaacaccaagggcgagatgaagggctccgcgatcaccggccccgtggccaaggagtgcgccgacctctggccccgtgtggcggcagcagccaacaccattgtgtagagcggcggccgtccggctgggcgtcgcggcagcgcggaccacactgcagtacccaccgcctgccgcgctcccggcgcagcatgctgtaatgcacatccagcgaanaaaaaaaaaataaaaaaaaaaaaaaaaaaaaaaaaaaaaaaaaaaaaaaaaacattaatttaaaaaaaattaaaaaaaatttaaaaaaaaaaaggggcggcccttt

SEQ ID NO: 7583 - DNA, 578 bp, Chlorella sorokiniana
  unsure (1)..(578): unsure at all n locations; Clone ID: LIB3602-070-Q1-K1-A1
tctggcggcaggnacattaagtcaccaacgacaacagnanagaatatgtcaacctggtggncgcggcactcgcatggaccaccgccatccgcggccagatcgaggccttcttgaagggcttctgggagattgtgccacgcaagctcatctccatcttcaacgaccacgagctggagctgctcatctcgggactgcccgaaatcgatgtggacgacctgcgcgcgcacacagactaccagggctacaccgctgcttcacctgttgtgcgctacttctgggaggtggtgcgcgagatggacaagcaggagctggcgcagctggtgcagtttgtgacgggcacgtccaaggtgccgctgggcggctttgccacgctgcagggcgtgcacggtccccagcgcttctccatacacaaggccttcggcccccccgtccgcctgcccacggnccacacctgcttcaaccagctggacctggttgagtacgagagcaaggagcagctgaaggagcggctgcttactgcgatttcggagggcgcggtcggcttcgggtttgcgtgagcggcagggaagtccacatct

SEQ ID NO: 7584 - DNA, 447 bp, Chlorella sorokiniana
  Clone ID: LIB3602-070-Q1-K1-A11
tcgtaataaaaaaaaaaaaaaaaaaaaaatgacggaaagaggaaaaaaaaaaaaaaaaaaaaaaaaagaacggaaaacaaggtcacaacttaaggaatgaaatggtaactcaaattaaacatgcaactgaaaggtactatgccgatgcaattctcagacgtggcgtttttctatggtcagcactggaagacggcgggggtgggggggggtgattactcgcctgtgggctgccccttgtgattgtgcgcttttttcatgacggtcccattctgaccaatctcctctccattcacaatctgctgctgggcacctggtctgtggcttttcaagttacattgtgcgcgggggacgcgctgcttacccgctgcttttcccatccacttgccacccccttatcgcccgctctttcctttctcttccctctctttcttgtttattttcccaggg

SEQ ID NO: 7585 - DNA, 522 bp, Chlorella sorokiniana
  unsure (1)..(522): unsure at all n locations; Clone ID: LIB3602-070-Q1-K1-A2
ttgggttggctggtcaggctggcgggtgctttgtactggcagctgcatcggaggtggcatgcatgttagcagcacagctgaggctgcagcctgccgctgtgccagggcgcacgtggggacccagagcctgcacttgcactgccctcacgcgctagccatgcatgctgcagctggggcggacccctgtgcgaccacattgcattgcaagaatgccgcatgcctcccgtgctgctgctgctgcagggatacaaggacgccattgcctggtgcgacgaaaacggatacaacgtgtaggctgcttctcaggcgccatcatcagtcgcctttgcacacatcagcttgtccctgtctgcttcatttacagttggctttgcccatttggcttctgtctttgcgctccatcgcacgcaacgtgaccgtcgcaacaatgcacaataggcaataaacaagcatgacgctgctnctgatcgtgcgccgtattctgcaccttatctatncatggacctgtaacactgctcactg

SEQ ID NO: 7586 - DNA, 567 bp, Chlorella sorokiniana
  Clone ID: LIB3602-070-Q1-K1-A3
tggagacgtgcaccccacccgcagcggcgagggcgacaccgaggcgccggtggagggtgacggccaggtggatgggcagcccgggcccggcgacgagcacgccacgttccgccaagtcctgctgcgccacttccacaagcagagcagcgcggccaacctgacgcggctggcggggccgggcgagctgcggcggctgcaggaggagacgaggcagctgcgcgaggagagcaaagccctggagggcgagcttgaggagagccgcatccgagcaaaggaggcagaggagcgggcggcggcagccgaggcggcagcactggagcagcgtgatgcggcgcgccgcgcggcagacgccattgtgcggctcaagcggcagctggggggcgccgagccgcccgcagcagcggcagatgtgaagcaagagggcggaggcgagcggccgcaggaaggcgccgcgccgccggcagcggcagatggcgctgcggcggttgatggcatggctgcagcagagaacggtgcggaagcagcggcctcgggcggcgacccggatttggagggtctggccacctc

SEQ ID NO: 7587 - DNA, 574 bp, Chlorella sorokiniana
  unsure (1)..(574): unsure at all n locations; Clone ID: LIB3602-070-Q1-K1-A4
ggcacgtacattcgcacatatgcgtgcacctgggccttctcctgggggtggggggccacatgcaggagctgcggcgtgtgcgcagcggcatcatggggngaaaaggacaacatgaccaccatgcatgatgtgcttgatgcacagtgggcgctggacaacctgagtgacgaggcgtaccttcgtcgtgtcatcatgccacttgagacgctgctcaccaactacaagcgggttgtggtgaaggacagcgcggtgaatgcgctatgctacggtgccaagctgatgattccaggactgctacgctacgaaaatggcatcgagctggacgaggaagtggtgctgatgaccaccaagggagaggcgattgccgtgggtattgcgcagatgacaaccagcattatggctacttgcgatcatggttgtgttgcaaaggtcaagcgagtcatcatggagcgtgacacttacccgcgcaggtggggccttggccccatggctcagaagaaaaaacagctggtggctgctgggaaactggacaagtatggccgccccaccgaggccactcccaagnaatatttgc

SEQ ID NO: 7588 - DNA, 596 bp, Chlorella sorokiniana
  Clone ID: LIB3602-070-Q1-K1-A5
gcaacgtcaagtgcttaaccctccgcgcccgggcaagaagcttgctgtgctggacatcgactataccattttcgatctcaactcatcggcggagcggccggaggagctggcgcggccgttcctgcacgagttcttctcggcagtctacgccgactatgacatagtgatctggagcgccaccagcatgaaatgggtcgaggtgaagatgcgggagctgggcgtgagcacgcaccccgactacaagatcaccttcatgctggatcaccttgcgatgatcacggtgcagcaccccaagtacggcctgttcgactgcaagccgctgcaattcatttggagcaagttccccgagcactatgggccgcacaacacgatcatgcttgacgacttgcgccgcaactacgtgctcaacaagcagaacgggctggtcatccggccattcaaaaaggcacacctcacgcgcaccaccgatcgagagctgctctacctgtcggcctatttcgccaagattgcggcgctggacagcctggaggggctgaatcacaagcactgggagagctatgccaaggcggagattcggcagctgcgtaagcagctgg

SEQ ID NO: 7589 - DNA, 594 bp, Chlorella sorokiniana
  Clone ID: LIB3602-070-Q1-K1-A6
ccggtcgacccacgcttcttgtttgagtgctgaaaaaccggcggcggcacactacggctgcgagtatcaagacctgtctgcccccgtggtcatgggcgcgggcgccaccggcggcatcctctactggctggccatcttccctgtggacgtggtgaagagcgcgatgatgaccgacagcatcgaccccgcacatcgcaagtacccctccatacctgtggccgtgcgcaagctgtgggccgagggcggcgtgtctcggttctaccgcggcttcagcccctgcctcatgcgcgcagcacccgcaaacgcggtcatgctcttcacagtggacaaggtcacgcacctgctgaacgagtgagcagcagcatgagagtggtgtggcggcccggccgtcggtgcagctgcaggcgatctgcagcccgcttgccgcaagccgcacgaagcggcggccatgaaaggagcggccctgcagcctcccgccatgcaaccttaccgtcccacctgccctttttgcctggcaccccatctcattccatcgttgatctgctgaaaccccgcccaattttcacactgcactgcatgttggtgcacccagcc

SEQ ID NO: 7590 - DNA, 479 bp, Chlorella sorokiniana
  Clone ID: LIB3602-070-Q1-K1-A8
taccaatatgaaccgcacgattgtggtgcgccgcgactacctgcactacatcaagaagtaccagcggtacgagaagcgccacaccaacatctcggcgcacatctcgccctgcttccgctgccacgagggcgacaccgtggtcatcggccagtgccggcccctgtccaagacggtgcgcttcaacgtgctgcgcgtcatccccgcgggctctggcgccaagaagggcttcggctccttctaagcaggctggactaagggcctcttgccttgctggctgaagccctcgacagcagcagcagcagccccagcacggcatgcaagcgctgcagacgccctgctgccctgagtaagcgccgccatgtgccggcggtggcagcagcaccgcccgccttgcatacacctggcccctaggatgccggccacggggcgcccagtagtcgccagacggcggggcgcagcgcatgtaaccgtgtgcctga

SEQ ID NO: 7591 - DNA, 582 bp, Chlorella sorokiniana
  Clone ID: LIB3602-070-Q1-K1-A9
ctcgtctttgcgctggcctcctgtacattgcgatgctgatgaccggctggggctcgcaggcgggagaggccaagtacctgatcaacgtgggctggacgagcgtgtgggtcaaagtcgcctcgcagtgggtcaccgtcgcgctctactgctggacgctggtcgcacccgtcctcttccctgaccgcgacttcagctagggcgtggccagctgatcgctcctgcgtaccgtgcctccgtactgcgcgcgagctgtaatatcagcctgacgacttgtaccaaccgacctgcacgctgcctcctctgtgtttcattgcgggctgtgccctctgcctactaccctactatgcgccccgcggctcttgccgatctgctgtaagccaagccagcataaaaaaaaaaaaaaaaaaaaaaaaaaaaaaaaaaaaaaaaaaaaaaaaaaaaaaaaaaaaaaaaaaaaaaaaaaaaaaaaaaaaaaaaaaaaaaaaaaaaaaaaaaaaaaaaaaaaaaaaaaaaaaaggggggggcctttttaagggtccaaattttacttccccttgcttggaaaaaaaaaagttttttttt

SEQ ID NO: 7592 - DNA, 580 bp, Chlorella sorokiniana
  unsure (1)..(580): unsure at all n locations; Clone ID: LIB3602-070-Q1-K1-B1
anaagctcggccctcaccttacgggacagcaaagcggacgagcaacatggggcggcggccggcgcggtgctaccgccagatcaagggcaagccctaccccagtcgcgcttctgccgcggcgtgcccgaccccaagatccgcatttatgatgtgggcgccaagaaggcgggcgtggacttcttccctcactgcgtccacctggtcagctgggagaaggagaacatctcgtccgaggcgctggaggcggcccgcatcgcggccaacaagtacatggtgaagaacgcgggcaaggacgccttccacctgcgcgtccgtgtgcaccccttccacgtgctgcgcatcaacaagatgctttcgtgcgccggcgcagacaggctgcagacaggcatgcgcggtgcgttcggcaagccatttggtgtgtgcgcgcgcgtgggcatcggtcagatcctgctgtccatccgctgcaaggacacgcacgctgcggtggcggaggaggccctccgtcgtgccaagttcaagttccccgggcgccagaagatcgtggctagcaggaactggggcttcactccctacctgcgcg

SEQ ID NO: 7593 - DNA, 481 bp, Chlorella sorokiniana
  Clone ID: LIB3602-070-Q1-K1-B10
cccggcggcgccttcgaccccctgggcctggctgacgaccccgacaccctggctgagctgaaggtcaaggagatcaagaacggccgcctggccatgctctccatgctgggcttcttcgtgcaggccatcgtgaccggcaagggccccctggacaaccttctgcagcatttggaggagcccggggagttcaacttctacgccctgtacgccaactccctggcgtaagcagcttgtttggagcacctgcggcggccgaggcggcggcgctgagctggcgcaaagcgcggttggcgaccgccgccgcctcacgctgttgcccttgaccctcttccctttacgcgcttgcatgcgttcccgactccgctgcatgttgcctgtgtgtgcaattgtgcatcaggcaaaagaaacgagaagaaaactccacccaaacaccattttgcctgttgtaccatcctgtacgaaaaggaggctgtagtggtgt

SEQ ID NO: 7594 - DNA, 66 bp, Chlorella sorokiniana
  Clone ID: LIB3602-070-Q1-K1-B12
taaaaaaaaaaaaaaaaaaaaaaaaaaaaaaaaaaaaaaaaaaaaaaaaaaaaaaaaaaaagaaag

SEQ ID NO: 7595 - DNA, 584 bp, Chlorella sorokiniana
  Clone ID: LIB3602-070-Q1-K1-B2
aaaatggcggtcggcaagaacaagcgtctgtccaaggcaagaaggtggcaagaagaagatgtggaccccttcagcaagaaggactggtatgacatcaaggcgcccagcatgttcaacacccgcaacgtgggcaagaccctggtgacccgcacccagggcaccaagattgcctccgatggcctgaagggccgcgtggtggaggtgtctctggccgacctgcagaacaacgaggccgatgcctaccgcaacatcaagctgcgcgtggaggacgtgcagggccgcaactgcctgacccagttctacggcatggacctgaccaccgacaagctgcgctccctggtgcgcaagtggcagaccctgattgaggccaacgtggacgtgaagaccaccgacggctacttcctgcgcgtgttctgcatctccttcaccaagaagcgccccggccaggtcaagaagaccgcctacgcgcagagcagccagatccgcaccatccgcaagaagatggtggagatcatgacccgcgaggcgaccagctgcgacctcaaggagctggtgggcaagttcatccccgaggccattggcaa

SEQ ID NO: 7596 - DNA, 580 bp, Chlorella sorokiniana
  unsure (1)..(580): unsure at all n locations; Clone ID: LIB3602-070-Q1-K1-B3
ctctacggcatggtgggtgtgccgggnagaggggaggaggacgtggacgccacaatcgccatgatgcagcagctgaagaagcggcgcctaagctcaggctgacgctggggtgcagcacgtttgtgcccaaagcccacacacccttccagtggtatggagtgagcggcgagggcgagaagcggctgaagaagctggagaaggcgctgggcagggagggcatcgagttccgcccagagtcgtacaagtggagctgcgtgcaggccctgctgtcgcgaggcgaccgccgcctgtcgcgcctgctgcttctagtgcgtggctacggagactcgctgggcagcttccgccgcgcgttcaaggagctgcagggcgaggtgccgccgatggagcactatgtgagcacccactacgacccagacacaacagtgctgccctggagccacctgcacgggcccctgccggcagccacgctggtcaagcacctgcgggaggcgcaggcacacatgtgacacgcacatgagtgccagtaagctatgactcatgttgaccatgtgtatgtgcggccggatggcagcagcagctg

SEQ ID NO: 7597 - DNA, 583 bp, Chlorella sorokiniana
  Clone ID: LIB3602-070-Q1-K1-B4
ggacgccccttgcgcctgtgccgccaagcagctggggtatgcggtgctgctgtctgaggggcccgacaagccaaatgcggcgggccagaccgtggcttggggatcctaccacatcaccatcacaggatatctgccatgccagggaggctactcctcgtgcgacaagcctggcaagccgcacagctgcccttctgtgacccaaatggtcaagctggcgggccaggcttggaagattgccaacgggggcaaggagacgtataatctgcatggcacctggctgtccagcaagccgtggggcaaaggcaagggcaaggcatacgttgcggagctgcccccaagcaagacactggacaccctggccgacgagctgtgcaagcgtggattcagctccgtcaaagggccgcactacaccggcacacggcacacaccctggcacatctcactgggcaccgcagtcaagttgttcgccaaggcacgcttcgacaagcatgctaaggagggctccgccccaccactgcacctgtggatcgtgccctgctacactgatgccgtgtgcgcgatgagcaagaagggctgcccctgc

SEQ ID NO: 7598 - DNA, 316 bp, Chlorella sorokiniana
  unsure (1)..(316): unsure at all n locations; Clone ID: LIB3602-070-Q1-K1-B5
cagctccatcacatgcatgcccggnagcatgaaggcatgggcggcccgcggcctgcccaccatggcagaagagagcggcaagctgtgagcctaccacctgttcgttcatggcgtatcggctgctgatggatccgctccggagcgaagcaaaggctgatgtacatgcacacggccaagccaagaggccctccggcgtgttcatgctgtgtgctaaatgtgtgtgtgtgcgcgcctgtgaattctgcatggccccatgttcgagagaacattgctgccctccccctgtccatagcgagtgtatctggccagacttcac

SEQ ID NO: 7599 - DNA, 581 bp, Chlorella sorokiniana
  Clone ID: LIB3602-070-Q1-K1-B6
cgcgacttcaagcacctggctgtggccatgttcctgactgaggaggagggcaagaaggtgctcaaggtggactgccactttggcaagcgcaagagcctggcgtccatccgcacctgcacctcgcacgtgcagaacatgatcaccggcgtgaccaagggctacgagtacaagatgcgcctggtgtacgcccatttccccatcaacatcaacatcgagaacaagggcggcaaggtggagatccgcaacttcctgggcgagaagattgtgcgcgtggtggacatgctgccgggcgtgacctgcgagcgcagcgccgccgtcaaggacgagctgatcctgaccggcaacgacatcgagctggtgtcccgcagcagcgcgctgatccaccagaagtgcctggtgaagaagaaggacatccgcaagttcctggacggcatctacctcagcgagcgcggcaccctggtgaagcccgagtaagcggagcccgcacgttgcagtagaggtggcggcacgagcgcagcagtgcgcagcgctcacgcccgcgccggcggagcatcggcggcggcagccggccccagctgcgg

SEQ ID NO: 7600 - DNA, 583 bp, Chlorella sorokiniana
  unsure (1)..(583): unsure at all n locations; Clone ID: LIB3602-070-Q1-K1-B7
cggncgcgtgggcggncgcgtgggcggacgcgtgggacgagctgctgaagccggacaacttccacgtggccaccaccgagatctttgggcccttccaagtggtgacgcagtacggcgaccatgacgtgcctcacgtgctggaggcctgcgagcgcatggaggcccacctcactgccgcagtggtgtccaacgacgtgcgctttgtgcagcacatcctgggcagcacggtcaacggcaccacatacgcaggcatccgcgcccgcaccacaggtgccccgcaaaaccactggtttgggccggcaggcgacccgcgtgccgcaggcatcggcactccagaggccatccgcctggtgtggtccacccacagggaggtcatcctagactacggcccagtgccgcacggcctgcagctgacgcagagctgagcagcaggcagccgctgacgcagagctgacgcgacagccgctgacgcagagctgacgcgacagcagcagttgcggcagagctggcctctagagctggtacacaacaccccacgatgacacatgcatacaggacagaacggctgccgcagccacacagc

SEQ ID NO: 7601 - DNA, 606 bp, Chlorella sorokiniana
  Clone ID: LIB3602-070-Q1-K1-B8
ccgggtcgaccagctccggacctgccgcctgacaagccacgccgaaccaattcaagctgcgctcgacaacgtcagcaacaaggtcggcggcgtggcgggagcgcagggcggcgcagaggccacccgcctcgatcccttcagccgccgcgccacccggcccatcatttactggagcactggccgcaagcaggctgaggaggctgaagcagcagcagcgcagcagggggcggcggccaacggcgacgccaacggcgcagcggcaggcgcagcggatggcgatgaggatctctctccagaggagcagaagcggcgggcgcggcggggcggcctggatctggatgcgattgtggacctgagccagctggacctgtccatactgcagcggcccgcgcgcatgccgccgctggcgaggaagctgctgggtcccacgtggcggccagcgcagccgcccccaggcgcccgcatcgtttcgctggaagagttcaagcactcgcacggctgggcgtgatcaagcggggaccaggccttgaagtaggccttgatcagccgtcaaaattaagcttgccgagttgcgccgtcgtgccagtgcatttcatgcctgcatgc

SEQ ID NO: 7602 - DNA, 517 bp, Chlorella sorokiniana
  Clone ID: LIB3602-070-Q1-K1-B9
tccggtcgcggaaggacggccttcttaagcgcttgccaacctattatggcgtgctgtaataggagctggtctgacacatctctaacgtgcaatgggagggcggccggcggaggcaccggcgccgttggcacctgcccccaccccggcagtggcaaccgcagcgctgtcgagctctctcctgctctgttgagcagcctcctgcagtacttacgccagcacttcggacgcagggcgcagcagctacatgatcatcatctaccggagtcatgtatagaaattggcaaatgcgcccacatgctcatgtcacagcatgaaccttgagcacccatgtacagattttggagtccactacactcactacctggaacagtgcttgcggaatggtgatgccatgcccaacagtgcatgtaaagcatgcaaagtgcttgaaaaaggttgatcacggggcaagaggaacttgttcttgttcaagtggaaaataacgcatgggcaccttgcccaaaagacccaaggttac

SEQ ID NO: 7603 - DNA, 590 bp, Chlorella sorokiniana
  Clone ID: LIB3602-070-Q1-K1-C1
ggagccgctggcatcgacgcaacagaccttcaagagggctctctggtgggcagcgacaacttcacgcacattctgcgtgtgctgaacaccaacgtcgatggcaagcagaagatcatgtatgcgctgaccgccatcaagggtatcggccgccgcttctccaacatctgctgcaagaaggctgaggtggacctgagcaagcgcgccggcgagctgtctgccgaggagctggagagcatcatgaccatcgtggccaacccccgcgcctacaagatccccgactggttcctgaacaggcagaaggacgtcaaggacggccgctactcgcaggtgacctcctccgcgctggacaccaagctgcgcgatgacctggagcgcctgaagaagatccggaaccaccgcggtctgcgccactactggggcctcaccgtgcgcggccagcacaccaagaccactggccgccgcggcaagaccgtgggcgtggctggcaagaagaagtaagcagcttcttgcgggcgcggcctgcggcacgggcggatgctggcggctgggtgacggcggctggcgccgcccgcgcagcaaccccactggca

SEQ ID NO: 7604 - DNA, 552 bp, Chlorella sorokiniana
  Clone ID: LIB3602-070-Q1-K1-C10
gtggcatgctgctgctgcggccctgcaaagcagtcatgcggcacatgctggcagtactggaggcccagcccaagctgcgattctcgcatggagcggcagagcaggactttttccactggtatttcaagtacacgggcatgcggctgccacttgagtacaacacgatggcatcagacagcctggcgggcaaccgcacgctgggcgggcgggaccctgttgtggtgcacttcacgcgcaacaagcccttccacggcccgcagcctggccggccagggcaccaattcctgtgcagactcgaagaaatggactgagggtgttgcgccagcagcggcagctgtggtggtggcgcctccagagaaccccaatttttgccctcagtaattgtactgataccacaaatgttgcccgggctcaatgacttgcaccctgtaccttagcactgcttctttcctcctctggctctgtattctgggctccctactcattacttttgtgtttcagcatggcagcatctgtggccgctgcaaatctgtgtaacattcaagaagtttc

SEQ ID NO: 7605 - DNA, 412 bp, Chlorella sorokiniana
  unsure (1)..(412): unsure at all n locations; Clone ID: LIB3602-070-Q1-K1-C11
agcagnaccagtgaggcagccccggcgtgcgctctcactgctgccgctggccaccggaaccgcgtctcagccagcagctgcgcccagccgcgtgcagcatggcgccctgcctcaccagccagcgctcctgctgtccctgcccgcaccatagcatgcagcacacatttcgtcttgccccccccccctccctccagcctctctttgattattatcctgcattcattcttcctctggcaccagttttgcccacgagcttgcactacacatcatcgtattcgcattctgcccagcccagccggcgcatcccgcactgtgttttgccacctgagaggcgcgtcagccaactccttcacagctgctaacatatatacgttggaacgacaatccaatccgtgcaacacacatcaattgc

SEQ ID NO: 7606 - DNA, 368 bp, Chlorella sorokiniana
  unsure (1)..(368): unsure at all n locations; Clone ID: LIB3602-070-Q1-K1-C12
tagcgcaccgttgtgccgggcgtggcgccctcttgtgtggccggcgccagcgtgctgtaccttgcacacctttngaacgagttgaaaaatcgatctgatctgcgcacctgtaacttattgctagcaaaaaaaaaaaaaaaaaaaaaaaaaaaaaaaaaaaaaaaaaaaaaaaaaaaaaaaaaagaagggggcgaagcaaaataaaaaaatccaacctaccgcttctcattgcatccaaattgcctatcctcttgtatgcccttagcttaaatttatttgaccggcgcgacacattaaaacgcactgggctaaacaattccatggcgctaacctaatatactcctgttgcatcccaatttattttcctg

SEQ ID NO: 7607 - DNA, 536 bp, Chlorella sorokiniana
  Clone ID: LIB3602-070-Q1-K1-C2
gccctgcctcctccctaggtccattgatatcagttgatcgccgccgccactgctgccgctggcccgtgcaccgcactgctggctgagccggcaccgctgccagccgctggtaccgtccgcgcgccaaagagcgcaatgcctcgcaccagaacacactgtgaccctctcgaatccagcatccgcatttgcccagaccctgccgctcggcggcctctcccttgttccccctgtttcttgcgcccccaacgtgccgtcccccatgcaaagcgcgcatgtcatgttgccgcctttgccgctatatctctgcccgccctcgctgcttccctgcttgcatcagcgctgccgcacacattccgaaacttgtcagccagggggccgcatgataccgcagcggcccgcccccacccatgtgccaccctaccgcggttctctagcaacgctagcattctttccgtccagtttgcctcgccactcgccggtttcatgtactcttctaacttccttctcgcctgttgtgtgttacaccagagcacgtg

SEQ ID NO: 7608 - DNA, 591 bp, Chlorella sorokiniana
  Clone ID: LIB3602-070-Q1-K1-C3
gcgaggcccagacaccatggtgtcgctcaagctgcagaagagctggcggcctctgtgctgggctgcggcctgcgcaaggtctggctggaccccaatgaggtcaacgatatctccatggcgaactcccgccagaacgtgcgcaagctggtgaaggacggcttcatcatccgcaagcccgagaagatccactcgcgccaccgcgcccgcaccgcagcagaggccaaggccaagggccggcacaccggctacggtaagcgccgcggtacgcgcgaggcgcgcctgcccaccaagatcctgtggatccgccgcatgcgcgtgctgcgccgcctgctcaagaagtaccgggacagcaagaagattgaccgccacctgtaccacgagctctacctcaaggtgaagggtaacgtgtacaagaacaagcgcgtgctcatggaggccatccacaagcagaaggcggagaagatccgcgagaagaacattgcggaccagctggaggcgcggcgcgccaagaacaaggcggcgcgcgagcgcaaggcggcccgccgcgaggagcgcttcgcgcagggcgtgaccgccgccaccgagagccag

SEQ ID NO: 7609 - DNA, 223 bp, Chlorella sorokiniana
  unsure (1)..(223): unsure at all n locations; Clone ID: LIB3602-070-Q1-K1-C4
tgtcctggcggctgcacgnnatttgtaggaccgcttcaatgttgtaacaacagcgagnaaaaaaaaaaaaaaaaaaaaaaaaaaaaaaaaaaaaaaaaaaaaaaaaaaaaaaaaaaaaaaataaaaaatataataaaaagtaatatgctattttataagagataatttaattgttacctaatttccgttagttttaccgctgggtttactgcgtcaaaccctg

SEQ ID NO: 7610 - DNA, 601 bp, Chlorella sorokiniana
  Clone ID: LIB3602-070-Q1-K1-C5
ggggagaagtggagctgcgcaacgtgacgtttgcgtacccgcagcgcccagaggtgaaggtgttccgccacttcagcctgcgcgtggagtgcgggcgcacggtggcgctggtgggtgagagcggcagcggcaagtccacggtcatcggcctgattgagcggttctacgacccgctggccggccaggtgctgctggacgggcgcgacatccgctccctcaacctgcgctggctgcgcgagcagattgggctggtgggccaggagcccgtgctgttcaacatgaccgtgcgcgagaacatcaagtacgggcggccggacgccagtgacgagcaggtggaggcggctgcccgggccgccaacgcgcatgccttcatcgaggcgctgcccgagcagtacgacaccaagctgggcgagggcggcatcacgctgagcggcgggcagaagcagcgcgtggccattgcgcgcgccatcgtgaaagaccccaaggtgctgctgctggacgaggccacgtcggcgctggatgcggagagcgagcgcatcgtgcaggacgcgctggaccggctgatggtggggcgcaccacggtggtggtggcgcacaggct

SEQ ID NO: 7611 - DNA, 249 bp, Chlorella sorokiniana
  Clone ID: LIB3602-070-Q1-K1-C6
cgagggtgacatcctgaccctgctggagtctgagcgcgaggcccgccgcctgcgctaagcggcagtgccgcccagccgcgtcgcacgggagagcggcgtgcgccagcatggcagccgcggcagcgagttagccacgtgttgcagctggtggcccgccctgtgggcgtctgcagcagcagcccgggtggcaggtgtcccgtctggggcgaccagcccccgacccattgggatgtaacacatctgaccgca

SEQ ID NO: 7612 - DNA, 482 bp, Chlorella sorokiniana
  unsure (1)..(482): unsure at all n locations; Clone ID: LIB3602-070-Q1-K1-C7
cttcacgcagnaccaagctgcggcttacagcagcggcaagctggacgaataccaggacgaggtagagaacatcaacgagatgtttgtagcagcgcgagacgagattgagtatgcacaggaggacgcagagactgtgtatttcaacgaaagctgcgaggaggctcggcaggcggtttcagaggtgctagacgcatacaacgccctgctgggcaagctcagcgcagaggagcgcggcaagctgcagcggtcaatggggctgaagatggaacagctcaaggcggaagtagagacgctggacacgctgcacgctgactgagccagaccacagcatgcacagcacggcgacactgttagcagaacttctgccagaaggctgccggccggcgctgtttggcacccagattcaacgaccgtgttgacaatccgtgcggacgcaatgtgtgttgcaacaatcaggtggatttatgtaatgtggcactgaa

SEQ ID NO: 7613 - DNA, 591 bp, Chlorella sorokiniana
  Clone ID: LIB3602-070-Q1-K1-C8
cgctgatacactgacggagaactacagcgccaccatggccgccaagctgggcctggccgagtacgaccaaggcattgctgccggcctgatgcgcctgatgtacgaggactccgccgactacaccaacaccttccgctgcctgagctccattggcgccgagcctggaagcgaagaggcagatggcagcctgccgtctgccctggcagaggtgctgggcccgctggatgaggaccgtaccgccgcgtggcgccagtggctggagcggtaccgcgcacggctggctgcagagggactgcctcctgcggagcgtgccgccatgcaggactcggccaaccccgccatcatcccgcgcaaccacgtgatggtggacatcattggcgaggcggagaccggcaactacgagccgctgcacaggtacatgcgcgcactgctgaccccatacagcagcgagggcctggacccggcctggctggagcccgcgcccaagcagtgccgcctgggagttgagctgctgtcctgcagcagctgagctgcaccagctcagttacccagcagccaaattgcggccagggagccgcgtgccagagtaca

SEQ ID NO: 7614 - DNA, 595 bp, Chlorella sorokiniana
  Clone ID: LIB3602-070-Q1-K1-C9
tgtttttccgctgccccgcaggcgacgaggtgtgcggcgagattctgtcgcgtggcggccccgcccccaccgactggtcccgcctgctggagccgctgcccttcttcgagctgttcaagcacttcctgcaggtggaggtgctggcgggcagcaaggaggactttgaggtgtgggagggctgggtgcactcccgcatgcgcctccttatcaagagcgcgggcatgatggtggatgtgcggccctggcccaaagccttccgcccgccgccgccccccgagcagcagcagccgccgccgtagcaggccgatggcggcgacccagcgcagcaggcacagcaggcgcagcagcctcgctgcttctacttcatggggctgagcaagaagaaggcgcaggcgtacaacgccttcagcagcgcgctggtcatccctcagtcaaaagtggacctgaccgccccggtgaacgagtttgcgcacaaggtgaggcatggtattgttcattttatggttgattgttggagtgaacctgaccgctcccgtgaacgagtttgcacacaaaggcgagtcggggtgtaggatggctggctggtttcaaacac

SEQ ID NO: 7615 - DNA, 532 bp, Chlorella sorokiniana
  Clone ID: LIB3602-070-Q1-K1-D1
gtcgacccagcgttcggtggccgttgaagttgacggcaggggcggtgtggagctcaagtgacggatggcgtcgactacgcccctgtcaccgtgcagctgccaggcggcgagcgtgtgcccttcctcttcagcgtggaggagctggacgccaagggcaatgctgatggctttggtggggagtttgtggtggggtggtggggggtgccaccttgctggaccccaaggtcgtggcgctgcgactggctatgacactgctgtggccctgcccgccgctggcgacgatgaggagtacctgaaggagaacatgaagacggccggcgcaatgaagggccaggcagtgttctccattgccaaggtggatgctgacaccggcgagattgctggcgtgtttgagtgtgtgcagttctttcgacactgacctgggagccaagggcctcaaggacgctcaggacactggcctgtgctatgctcaagctttggtaagcgctgccagcgcccgttcgtttggagaagagaattacagttttgtcgc

SEQ ID NO: 7616 - DNA, 585 bp, Chlorella sorokiniana
  Clone ID: LIB3602-070-Q1-K1-D10
gcggctctgcaaccatggcggagtccgtccagactttcggccgcaagaagaagcggtggctgtggcctatgtgaagcgcggcaagggcgagatccgcctcaacggcgccccgctggagctggtgcagcccgagacgctgcgctggaaggcgtttgagccggtgctgctgctgggcaagcagcgcttctccaacgtggacatccgcatccgcgtcaagggcggcggccaggtgtcccagatctacgccatccgccaggccatctccaagggcattgtggccttctaccagaagtacgtggatgagcagagcaagaacgagatcaaggacatcctgctgacctacgaccgcacgctgctggtggccgaccctcgccgctgcgagcccaagaagttcggtggccacggtgcccgcgcgcggtttcagaaatcttacaggtgaaggctgccccgtgggacggttgggcgcctctggaggcttcttctgcgccgctggcgtggcggcagcggcgtctgcggcctaagcagctgccctggagcagcatgccctcagcgaaagcaccatgagtacaccttgcgtgtgtaaca

SEQ ID NO: 7617 - DNA, 361 bp, Chlorella sorokiniana
  Clone ID: LIB3602-070-Q1-K1-D11
gcccgccccccaaggctcctgcccatttcgtttgcatgcaagcaatcacccgtgcctccctttgtaccatcccccgctgcgctttgttgtgcccccccttgaggcgttccatccagcccgcagcccatgctgttttcgtcccacctttctgcgtgccccgctttcccctgctgcctgcaatgcgacaccgcaattccccttttacaggtcctcgtgtaactgagcgctagtaaaaaaaaaaaaaaaaaaaaaaaaaaaaaaaaaaaaaaaaaaaaaaaaaaaaaaaaaaaaaaaaaaaaaaaaaaaaaaaaaaaaaaaaaaaaaaaaaaaaatggactgccacttaaaatatacaacactt

SEQ ID NO: 7618 - DNA, 475 bp, Chlorella sorokiniana
  Clone ID: LIB3602-070-Q1-K1-D12
tccgcttccccgccaagctgtggtggtcttcccgctgatctatcactacatgggcggcgtgcgccacatgtactgggaccatgccaagtacggcaaccaggctgacaagtactcgccgctggaggtgccggccgtggaggccagcagcaagctgctgattggcgccagcgtggcggccaccgctgcggcagccctctactctatctgaggttgcctaggcgtgagcactccatgcatgttcactggtgtcgggcatgccatcacttcactaagacacccccagaaacgaaccctcagccacccgtgtgcgagggcactttgatgccagactgcagggcggacggcaacaggcagctgagctgccgccgttgctggcccctgttggcaccttcgttgctgcgccctcctgttctccagctgaagttttccgcctgccgcttgtaattcacgccgcatggatgcggcaggcggccaa

SEQ ID NO: 7619 - DNA, 587 bp, Chlorella sorokiniana
  Clone ID: LIB3602-070-Q1-K1-D2
gtgcagggccccctttgcgacggtgtggccaagtctcgaagccctaccaggcgcccctccaaacatggcgaacaaggcattgatcgcggctgcggcgctgctgacgctgcttgcctgcgcgatgccggcctccggtcgcagcctgcatgccgaggaggagatgatggccgcccctgctcccgcaccagccggcggcatgggagagctgatccaggtcgagtggggcttcccctcggccctcggcctcactgccttccctaccacgaccctcaaagtgggcgatgccgttgagttcacctggagcggcaaccacgacgtgtggcgcgtgcctgaggccgcctgcccctcggcatttgaggctggcgcaggcctggaggaggttgccccgccaagcgttggtggcagcaccactgtcatgtttgacacgcccggcacctaccactttgcttgctccgtgggcggcggcgggcactgcaacaatggcatgctcatcaccttcgaggtggagccctgagcggcagcttgcttggcgcaacattggcactaaatgtgagtagcctgaggctgcccttcatgcggtcgggcat

SEQ ID NO: 7620 - DNA, 589 bp, Chlorella sorokiniana
  Clone ID: LIB3602-070-Q1-K1-D3
ctcttgcccagcccgtccagcagcagttagcagccatgcaggccaccttcgccggctctaagctgcagcttggcgcgcgcgtcagccgcaagagcgtgaacaccaccgtggtggcctccagcggcaagaagatcgacatcagcaagcagggcctgaactccatccagaatgagaccgtgaagctcaacctgatgggcaagtccaagaccatggagagcaaggactgggtggacccccagggccgcaagggcaagggctacggcgtgtaccgcttcgccaacaagtacggcgccaacgtggacggctacagcccgatctacacccccgacacctggtccgagtctggcgactcttacaagctgggcaccaagggccttattgcttgggccggcctgattgtggtgctgctgggcgtgggcatcaacctggtgatctccacctctgccctgggccagtaaatggcgacgccccccgcgtcggcagcagcagcagcagccagcagcattcccttgcagctaccccccgagaagacaaaccctcaccctaccctagctggcggcgtcaccatgcgccgctcccttgctttccg

SEQ ID NO: 7621 - DNA, 97 bp, Chlorella sorokiniana
  unsure (1)..(97): unsure at all n locations; Clone ID: LIB3602-070-Q1-K1-D5
naaaaaaaaaaaaaaaaaaaaaaaaaaaaaaaaaaaaaaaaaaaaaaaaaaaaaaaaaaaaaaaaaaaaaaaaaaaaaaaaaaaaaaaaaaaaaaaa

SEQ ID NO: 7622 - DNA, 371 bp, Chlorella sorokiniana
  Clone ID: LIB3602-070-Q1-K1-D6
atgatactagtgttacacgagacggatgggtctggacgaagggtcgcacagagtttggtccgacgggtgatgatggcacagggcgcgtggcccgggacaggggataagatggaaacaggtgggctgcaagcatgggcaagcggcaacagagtggcagagggctgtggccgcgagccatcaaggcgcggcagcttgtactgaaaatggcagaaggggtggctggaaagatgaaagaggaggaaatgaaagagccagaggtcttgaagggattcaagcagagggcggccctggccaatgcgcacgccagcacgccgtcagcgcgccgccgccgccgccggccgagcactgctcctgcgctgcgtgtgcgccgc

SEQ ID NO: 7623 - DNA, 564 bp, Chlorella sorokiniana
  unsure (1)..(564): unsure at all n locations; Clone ID: LIB3602-070-Q1-K1-D7
cggncgcgtgggattttttttttttttttttttttttttttttttttttttttcaaggcccacggataaatgctctgggccccgccgtctggcgaaaactgggcgccccgggggcggcatcctaggggccagatatatcaaagggggctggtgctgttgccaccgccagcacatggtggtgcttacttagggaatcagggcgtttgcagtatttgcattccttgctggggctgctgctgttacattctagggcttcatccagcaaggtaagaggcctttattccaccctgcttaaaaggagcctaagccctttttgccgccagagcccctggggatgacacacactatatttaaacacaacatcttggacaggggccgttatttgccgtataccacagagtctccttcgtggcacattgaataagggagaaatgtgcatcccaaatgttgatagaggcgctttttcgtaccgctggtactttttgatgtagtgcaggtagtcgcggcgcaccacaatcgtgcggttaatcttggggctcttcaccttgcccgacaggatgcggc

SEQ ID NO: 7624 - DNA, 590 bp, Chlorella sorokiniana
  Clone ID: LIB3602-070-Q1-K1-D8
gcctcccgcaccgtcgccagcctggcgcagcgcactgcagcggcccgccccggcctgaccgccgccgtccctgccaccgcccggccgtttgcgggcagcatggccgccaacttccgtagcggcagtgtggctgccgcggctgagtatggcaacactgatgtgaagggggccagcgagctgatccagagcggcgcatccatctatgccgacgtcaggacgcccgaagagtttgctgctggccacccgccgggggccgtcaacgtgcccgtgttcctcaagcagaacggccagatggtgcccaacccgcagttccagcagcagtttgagaaggctttccctgacaaggatgcacagctgtgcgtgggctgcctgtctgggaagcgcagcgtggccgcatgcaacatcatgggggcggctggctactccaacctgaccaacgtggaaggcggctaccaagcatggacgggagccggcctgcctgtggaggcatgaaagcatcgatggcagattataaggcggctggcgggcgcctacagcctgcatggatggcgcccaagaagcccgcatgcttctgctcctgcatgtgcgtt

SEQ ID NO: 7625 - DNA, 594 bp, Chlorella sorokiniana
  Clone ID: LIB3602-070-Q1-K1-D9
gataggtgcatgtgacagcgataggaacatctttaacaggtcccatgcttatgtgatagcataccgggcgcaagtagctggaccgctgctgcagaagcgtgcaggccaagccaagagcggcttttttgtccagctcggtagggccagcttgtggtagtgagccgtgttcggggcagtgaacgagatcgaccccaagaccaatagacgctgtacgtgctgatcctgcgtccagtatcaacatgtgcgttttccttataggtgaacatagtgaccatgaacatgctggagtgggtggagccctacgtggcgtacgggtaccgcaacctgaataccgtgaaggagctgatctacaagcgcggctttggcaaggtcaacaagcagcgcatcccgctcaccgacaactcggtgatcgagcaggtgctgggcgacaaggacatcatctgcgtggaggacctggtgcacgagatcttcaccgtgggccccaacttcaagcaggccaacaacttcctgtggcccttcaagctgtactcccccaagggcggcatcgacaagaagcgcctgcactacatcgagggcggccaggccggcaaccgc

SEQ ID NO: 7626 - DNA, 463 bp, Chlorella sorokiniana
  Clone ID: LIB3602-070-Q1-K1-E10
cacccttcatcaaccctcacccaacccatccacctgccacccatccactcaccttccctccgccacaacctctgccacccactcaccacccatcacccgctcaacgccctccatgcaccatcctccccatccaccaaatctgccaccccaaacgcacgtccgccgctgcaccacctgccgccccctcacccgcacccatcttccacccgccacctttcctgccgctcaccgccgcacatcctacctcccacacctcactccatgtccacccttcacccgcgcttcacacagcggctgctgccatgcaaagctgctgccaaacccatccatcatgctcgcacacccactcacccacacgtccaacgtatccagacccattttcaaggcccgactgtacagtgcctttttgcgtccttatgccgatctggtaccaggacttaatgtgtaacaaatggtatgttgc

SEQ ID NO: 7627 - DNA, 494 bp, Chlorella sorokiniana
  unsure (1)..(494): unsure at all n locations; Clone ID: LIB3602-070-Q1-K1-E11
cgtttgtcgtggccaagttggcggctgtgctgcagcgcgcactacgcatagacgagccgactgccaccttgtaggcatggggctgcggcggggagcctgtgcagctgaattgcgcatgctgcaaggtgtggccacgagtggcaagggcactcgctcagtgtgatatccaacctaagccctctgtgcagctatatctcccaagctggctgcgacgtgcgtgccgcaatcgagaagtttgaggaggaccggcggtgggagcgcgtgatgaagcaccgcaggggccgcctgcgcctgagctgagcacgcacccgggctgcaacaatttgcacacaccagctaccccctgtagttcaattctctcacttcaatgtatatgcccatgcttgtagaccgtccatgctnaaaaaaaaaaaaaaaaaaaaaaaaaaaaaaaaaaaaaaaaaaaaaaaaaaaaaaaaaaaaaaaaaaaaaaaaaaaaaaaaagggcgggccgt

SEQ ID NO: 7628 - DNA, 106 bp, Chlorella sorokiniana
  unsure (1)..(106): unsure at all n locations; Clone ID: LIB3602-070-Q1-K1-E12
naaaaaaaaaaaaaaaaaaaaaaaaaaaaaaaaaaaaaaaaaaaaaaaaaaaaaaaaaaaaaaaaaaaaaaaaaaaaaaaaaaaaaaaaaaaaaaaaaaaaagggt

SEQ ID NO: 7629 - DNA, 109 bp, Chlorella sorokiniana
  Clone ID: LIB3602-070-Q1-K1-E2
taaaaaaaaaaaaaaaaaaaaaaaaaaaaaaaaaaaaaaaaaaaaaaaaaaaaaaaaaaaaaaaaaaaaaaaaaaaaaaaaaaaaaaaaaaaaaaaaaaaaaaggggcg

SEQ ID NO: 7630 - DNA, 574 bp, Chlorella sorokiniana
  Clone ID: LIB3602-070-Q1-K1-E3
cagtcgcgccccacacgctcacgatgtcggacaataacctcctggcggccgtgctgaacctggcggggctgcttgcgcttgcgtttgcggtgcacgaggtggcctgctctacgtcgcccttcatcccaccggccctggacctggcggcgtcggccaagaagctggcggcctccgccgaggccaccaccgagctggcgaccgacctggcccgcgacggatggccgctgtggcggtggtggccctgggagcgcaagaagggaacaaggtgaaggggcccaagaccgctaaatgccgtctgcacacgtgaaagcagcggccggcccgcgacggctcggtgcacgccgcggccaagctagtgggtgctggacactagaccagcgggtggacctgacagactgcactgacctttacattttccccctacagtatttaccccaactccccccttccccaactttgcctgtctgccctacctgtccgatttatatttgatcgataactgtccttatgttacccaaggactgaccaaagccaaaggggtcccaagcacctgccacagcagcagcagcagcag

SEQ ID NO: 7631 - DNA, 450 bp, Chlorella sorokiniana
  Clone ID: LIB3602-070-Q1-K1-E4
accggcccagccggcctttgtgaccgccccctgacggcgcccccgccgcagcaggccatgatgtgaagcagagcggccagcgggagtttgaagtagcggcggctggcagctgatggacagccagccagccagcacggagcagctggtagcggtggcttggcccagctgtcgcaaacagcttggcagcagcctactgaccagcaagaggagaggaccgactcgagcccggtcccgggaaacatacagaaacccaacactgcgccttgactatatgtagggcggcgtgcctgacctgcttttccttccatccattctgaccgactctgtctactttattcggcactttgaatgttaatcgactgctgaccaaaaaaaaaaaaataaaaaaaaaacacaaatagaaaatgatgaaagaaaaaaagcaaaaaacaaaagtagaaaataaaatgg

SEQ ID NO: 7632 - DNA, 300 bp, Chlorella sorokiniana
  Clone ID: LIB3602-070-Q1-K1-E5
ccccgcgtccgccccgcgtccgccgtcgtcgaggtagccagcacgatggccaaaatcaaggcccatgagctgcgcggcaagggcaaggaggagctgctgcagcagctcaaggagctgaagcaggagctgagcggcctgcgcgtggccaaggtcaccggcggcgcccccaacaagctgtccaagatcaaggtggtgcgcaagggcattgcccgcgtgctgaccgtggtcaaccagaagacccgggacgctctgaaggaggcgtacaagggcaagaagtacgtgcccctggacctgcgcgtc

SEQ ID NO: 7633 - DNA, 394 bp, Chlorella sorokiniana
  Clone ID: LIB3602-070-Q1-K1-E6
tgcagtgcctgcagcccgtccctgtacccagtccagccccacctagcaccactatgcaggctctgtcgatgaaggccgcccgcccggtggcagcccgccgctccgtggtggtgcgcgccgaggaggccgctgcgccagctgccgcccccaagaagccggacgtcggccccaagcgcggcactcaggtgcgcattctgcggcctgagtcctactggttccgcgagaccggcaaggtggtgtctgtggaccagagcggcatccgctaccccgtggtggtgcgcttcgagaaggtcaactacgccggcgtgagcaccaacaactacgcgctggacgaggttgaggaggtgaaggcgtgagcagcccctggaggcagccgcagcagctggggggaggg

SEQ ID NO: 7634 - DNA, 378 bp, Chlorella sorokiniana
  unsure (1)..(378): unsure at all n locations; Clone ID: LIB3602-070-Q1-K1-E7
caagnacaagcgcgtgctcatggaggccatccacaagctagaaggcggagagatccgcgagaagaacattgcggaccagctggaggcgcggcgcgctcaanaacaaggcggcgcgcgagcgcaaggcggcccgccgcgaggagcgcttcgcgcagggcgtgaccgccgccaccgagagccagaagtaagcggctccgtctcggcggcagcagccgcggcggcgggcgacgcagtgtgctccccccgccgccgcgcgttgttcttgcagcttgcaggctgggcggccggccgcggggcagccccgcccaggactctgtgtatcgttagcgccagcggggcagccggcgccggcgcccggtgtgtaagaccacacgtgct

SEQ ID NO: 7635 - DNA, 556 bp, Chlorella sorokiniana
  Clone ID: LIB3602-070-Q1-K1-E9
acctccgcaccccttccactgctgcgctcacaatagctttcgtgcgccggcgcagacaggctgcagacaggcatgcgcggtgcgttcggcaagccatttggtgtgtgcgcgcgcgtgggcatcggtcagatcctgctgtccatccgctgcaaggacacgcacgctgcggtggcggaggaggccctccgtcgtgccaagttcaagttccccgggcgccagaagatcgtggctagcaggaactggggcttcactccctacctgcgcgacgattacttggagtggaagcgtgagggccgccttgtgaacgacggtgtgaatgccaagctgcttggcaaccacggcccgctggacgcacgggagcccggccagattttcgagggtcctgcccgtctgtggcgtgtgccggtgcatgcctaacatgttgcttgggttctaaagatgtaacgaacatctgagcaagacaaagaaaacaacaagagctggattggattgttttctgcatcatcagtttgaggcttttctttccttatacttctctttgtaaaaagcctgccgc

SEQ ID NO: 7636 - DNA, 573 bp, Chlorella sorokiniana
  unsure (1)..(573): unsure at all n locations; Clone ID: LIB3602-070-Q1-K1-F1
gccactgttcagccgcggcttcaggcgagagggcttcatcccgctgtccacctacctgaccaactacaagctgggtgactatgtggacatcaaggtcaacgccgcggtgcacaagggcatgccccacaagttctaccacggcaagactggctgcgtgtggaatgtgaccaagcgcgccgtgggcgtggagctgctcaagcaggtcaacgggcggtacatcaagaagcgcatccacgtgcgcatcgagcacgtgacccccagccgctgccacgaggagttcctgcgccgctgcaaggagaacgacgcggcgcggcacgcggccaaggtggagggcaagccgctgccggtgctcaagcgccagcccaagggcccccgcaccgaggccatcatgctggagaacgtgaagatggagaccatcacggccatcccctacgatatcctcaaggagggcgtgctctgagcgtgatcggcggcgacgttccgttgattgcggctgcagcttagtgagatgtaaccccgcagaaaaaaaaaaaaaaaaaaaaananaaanaaaaaaaaaaaaaaagggggcgg

SEQ ID NO: 7637 - DNA, 599 bp, Chlorella sorokiniana
  Clone ID: LIB3602-070-Q1-K1-F10
gcgccactctatctggctggccccatcatcactttccaggacttcgcctggcagctgcggcagcgcagccctccacgcgcccgtgtgatattgcagtatgcggcccgtctggctgcggactgggcctgcctggagctcctcactcgcttcctctacttcaacagcattgccaagcaccgcatcgggttgcgctaccagcagtacggcttgcagtatggcactactgagatggcactgactgctttctgggttctgtgcttcatgtggctcaagtttgccaccatctggcggttcatgaggctggctgccctgctggatggcattgagcctccggaaaacatgaagcgctgctttgcaaacaactatgatatcgagggcttctggcgtggctggcatgcaagctacaaccgttggctggtccggtatatgtacgtgccactcggcggtgcacggcgccgcgccctcgttgtctggcccatattcttctttgtggcgctgtggcacgacttggagtggcgcttactgagctgggcttggctcatatgccttgcatttctgccggagatggctgccaagcagtttgcacggtcagcgcgctt

SEQ ID NO: 7638 - DNA, 590 bp, Chlorella sorokiniana
  Clone ID: LIB3602-070-Q1-K1-F11
tgcaaacgcaaaatgtggcgtgagcgaggctggcggccgctccactgcccacaaccctggccagtgcaaggccagccgccagccggccgctggaactggaccagcagggtgtggaacaggttgtggctgtgagatggcagctccgcaacaacccctagctgaggttggacaaggtgctcaccagccagttaatcaggaggacttcgaggagctcttggcattcgccaccgctcccccgtggaaccggtgcgctgccaatgcaggccgtaacgcgcaagtggatcatggtaggtgctgctaaatacttgtctatctaaatatggccatgcgctgcacaacgcacaagccgggaacggccgcgcactaggcaggtgactggcatcagcagggcggcagctttacatcccgcctgggctttgtgatgcggcgccgtggactcagaccaagtggaatgcggagcaggtacggcggccttggctacatgtggacagaagctggaagtgttaggattgtccaccacctctcacatagtgcttatgcttggctgatgccgcaccccattttttggcgccagccgccgggagcggctc

SEQ ID NO: 7639 - DNA, 490 bp, Chlorella sorokiniana
  unsure (1)..(490): unsure at all n locations; Clone ID: LIB3602-070-Q1-K1-F3
agccccctngaccccacttatgaccgaattttcttgtgccgtgcttcattccttcaaaccctctctccgtcacctcagcccgcctgctttagcgcccacccaagccgtgtacagcagggttttgccgctcagtttcccttgcccaagcataatcaccccctggcgcaaatgcagttgtgtctcttcgccgtcactgccgccgccgttcacgcggggcagcagcaattttgacgtgctgtgctgtcatgccggcacaattttggaacatccatcagtctttagccgcgtctttgtgcggcgattttgcagctcctgcacttcatccaaatgtatccagcccgcccccttgcccctcaccgcatgtgtgccgtacgctctgctccttgcagcaccacaccccccgagtggccccggtccctttccaggggccagccagagcctgtaacgatgttgctgntnaaaaaaaaaaaaaaaaaaaaaaggggcgggc

SEQ ID NO: 7640 - DNA, 557 bp, Chlorella sorokiniana
  unsure (1)..(557): unsure at all n locations; Clone ID: LIB3602-070-Q1-K1-F5
anaagtgctcaagtggactgccactttggcaagcgcaagagcctggcgtccatccgcacctgcacctcgcacgtgcagaacatgatcaccggcgtgaccaagggctacgagtacaagatgcgcctggtgtacgcccatttccccatcaacatcaacatcgagaacaagggcggcaaggtggagatccgcaacttcctgggcgagaagattgtgcgcgtggtggacatgctgccgggcgtgacctgcgagcgcagcgctgccgtcaaggacgagctgatcctgaccggcaacgacatcgagctggtgtcccgcagcagcgcgctgatccaccagaagtgcctggtgaagaagaaggacatccgcaagttcctggacggcatctacctcagcgagcgcggcaccctggtgaagcccgagtaagcggagcccgcacgttgcagtagaggtggcggcacgagcgcagcagtgcgcagcgctcacgcccgcgccggcggagcatcggcggcggcagccggccccagctgcggcgctgcacgccatgtaacgcacacgttagc

SEQ ID NO: 7641 - DNA, 548 bp, Chlorella sorokiniana
  unsure (1)..(548): unsure at all n locations; Clone ID: LIB3602-070-Q1-K1-F6
gcttgaccaaccctggtggtgtgacgcggcccgcggctggcatcccgcgcccgcagccgcccgctcgctgctgcttcttgcaagcagcccctagatagcgagcaggcggcacggaagccgggcagccagccgccgcagcttacctgtccatgtgtgcgcctcggcgtgctgttgcagttaccacccgtattttttccctcggttggcgcgcctcccgtgcgtgtactctcccctcccacccttgacggcgacgcgcgcccggctgcccacgcgccccgcgcaattttatgtgccctccgcctttcatcgcagccgcgcattgataagcgacctgagcagaacctgccccctgccgcccccggcaggcgggtgcccctcatttcattcctttccgccgcacaggccgcaacccagtgaccgccgccaatctgctcccctccctcctgcctttgtcccccgatgccttgcaaatctgaccgcncanaanaaaaaaaaaaaaaaaaaaaaaaaaaaagaaaaaaaagaaaaaaanngaaaaatgaatagag

SEQ ID NO: 7642 - DNA, 595 bp, Chlorella sorokiniana
  Clone ID: LIB3602-070-Q1-K1-F7
gcgagctgccgctgcgcctggccgactttggcgttctgcaccgcaacgagttcagcggcgcgctgcagggcctgacgcgcgtgcggcgcttccagcaggacgacgcccacatcttctgccggcgggaccaggtcaaggctgagatcatggcttacctcaagatgatgggcgaggtgtacgacacctttgggctggactacaagatggcgctgtccacgcggccggagggatacctgggagagctggaggtgtggaacgaggcggaggcggcgctggaggaggcgctgaatgctaccggccgcgagtgggagatgaaccccggcgatggcgccttctatggccccaagatcgacatcacggtgtatgacgccctgcgccgcaagttccagtgcgccaccgtgcagctggacttccagctgcccatccgcttcaacctggagtaccaggcagacgacggcggcttccaccggcccgtcattgtgcaccgcgccatcctggggtccgcggagcgcatgtttgccatcctgactgagcactggggcggcaagtggccgctgtggatctcgccgcggcagtgcatggtggtgcccatctc

SEQ ID NO: 7643 - DNA, 417 bp, Chlorella sorokiniana
  unsure (1)..(417): unsure at all n locations; Clone ID: LIB3602-070-Q1-K1-F8
ctacgaaaccgcaaanaagtgctcgcnctgacggatgcccgaccccctagccctagcgcacggcactcctgcagcatgtcagtcagctgccgcgagcaactggcagcacccacagatctgatcgaatcaatgccagcgccccgcctgcctgcgcctgcgctgttgtgggtcctttgtgcgaccctctccgcccacccgccatgcacccctctcagcccatatgcccgtcaaaccccacatggcctcagtcctttcagcgtttttccctcttcggcacgaatgaactgatcggctccgtcagtgacaacccaacccctgtttggcattgcactaaccccttttttccgatgcttggcatgccgcccgtgttcacagctttgcagtaacgcatgagcctcatgtgagaaaggccagtcc

SEQ ID NO: 7644 - DNA, 383 bp, Chlorella sorokiniana
  unsure (1)..(383): unsure at all n locations; Clone ID: LIB3602-070-Q1-K1-F9
gttctagnacgcgagcggccgctcgcgatctagaacccccgcgtccgcaagccgctaggtgatgaggagggcgcacccgtgctcaaggtcatggtccggtcgccgtccagcgcggccctggctgcagctgccgaggcgcagggcgcggctgagcgggcagcggcggcggcggtggggcaggcggacagtgtggaaacggactgatgagtgctgggggattgaaggcaaatgctgccattgtgagggacccattttgtatttcatttgctctgtacaacatttcattggaaaaaaaaaaaaaaaaaaaaaaaaaaaaaaaaaaaaaaaaaaaaaaaaaaaaaaaaaaaaaaaaaaaaaaaaaaaaaggggggggccggttttaa

SEQ ID NO: 7645 - DNA, 224 bp, Chlorella sorokiniana
  Clone ID: LIB3602-070-Q1-K1-G1
gcgttctatttgacccacacgcccaaggcagtctttgttttctctttgcacccgaccaaccaaccagaaaaagcacccaccccaaacgtactaacacagcaagtgcacgtttgcctttgcagcttgttgttatgtaccatgcttggcgccgcccattggcagctttgtacagaacgccgagctttcccttgacctgtacatgcttctgtagtttgttgtcactg

SEQ ID NO: 7646 - DNA, 445 bp, Chlorella sorokiniana
  Clone ID: LIB3602-070-Q1-K1-G10
gccggcagctgtgcctcctgcggccccacggcgggccccagcggcggtggtgcggcgcaagcggctggcgcaccagcaggcaaaggcgcaggtgctggcggtgccagtggcagcgtggatgtggcatctctggcgcgcgctctggcgggagcaatgggcggcagcggcggcgccgccgccagcgcggccggggctcggccggagggggcggctgcaggcgccggcaggcggcgtagagtgctggtgaccccgcagaagctggccagggtgctggagcgctgcctggcagaggcgggcattggacaggtggcacagcaggcgcagcaggcacatcagccacagccgggcggcgaagggggcggccaaggcggcggccagtcatagtggaccgctgctttttggttgctagtacactggcacacctcttgtgaagcacatcagctca

SEQ ID NO: 7647 - DNA, 593 bp, Chlorella sorokiniana
  unsure (1)..(593): unsure at all n locations; Clone ID: LIB3602-070-Q1-K1-G11
gtgcaggccgcactgcnctgacccattctacggcatggacctgaccaccgacaagctgcgctccctggtgcgcaagtggcagaccctgattgaggccaacgtggacgtgaagaccaccgacggctacttcctgcgcgtgttctgcatctccttcaccaagaagcgccccggccaggtcaagaagaccgcctacgcgcagagcagccagatccgcaccatccgcaagaagatggtggagatcatgacccgcgaggcgaccagctgcgacctcaaggagctggtgggcaagttcatccccgaggccattggcaaggagattgagaaggcgtgccagggcatctacccgctgcagaacaccttcattcgcaaggtgaagctgctgcgcgcccccaagtttgacatcaacaagctgatggaggtgcacggcgactacaccgccgaggccgccgccgccgccgccgccgcgagcgagaagctggagcggcccgcggaggagattgtgggcatggcgcccgaggaggccaccgcctgagcttgagccgcagccgccggttggctgggagggcggcgcacggcgcgggcggccgggcccc

SEQ ID NO: 7648 - DNA, 594 bp, Chlorella sorokiniana
  Clone ID: LIB3602-070-Q1-K1-G12
cgcccacgggccgtgcagcagcgccggggcagcttgcagatacagaatgccatctcgcggcaacgcaaggaggagactgtggagcagctggagggcctgctgcagtccagcgccgtggtggtgggcctgcggtaccagggcctcaccgtgaagcagctgcaggagttccgccgctcgctgccccaggagtccaagatgctggtctgcaagaacacgctgatgcgcgtggcggtggacaaggtggagggctgggagaacctgaagcccgccactaagggcgacaacgcgtggctgtttgtgaacgaggaggtgattgcggacagcatcaaggcgtacgtggcgtttgagaagaagctggtggatgcgctgcccaaggaggagcgcgcgacggcgcggcccattgacatcagcggcggcgtgatggacggcaagctgatggactacctggaggtgaagaagctggagaagctgcccaccaagctggagctgattgccaccattgcgcgcctcatcaaccaggtgcccaccaaggtggcccgcggcatcaaccaggtgcccaccaagctggcctacggcgtcaaggcgctggccgac

SEQ ID NO: 7649 - DNA, 475 bp, Chlorella sorokiniana
  unsure (1)..(475): unsure at all n locations; Clone ID: LIB3602-070-Q1-K1-G2
gcgtgacggcagcgcgctttgcccgcctgcagggaagaagcacccgctggcactttggcatccaaagccaagggcggttagggcgccatggtagaaggcgctgcgagaccgccaggcaggcgtgcgctgggtgtatgccaagcgggccagcctggccaacgggaacatcgcctatgatgcgctgaagtggcagccgttcgagccgcgtggctgtagcccccacattgtctagtgtttgtctggccttcattctacaacccctgtgatagctggacccggccccttgtgttagctgctcgccacaccccttgtgatagatagctggacccgtcctcctcccctcttcctgccggctgcaatgccgcgtacttactgacccctgctcagccgacttactgaccctgctcaacgaccaactctagcgtttgtacatttgtaatgacagggcttgntgctttaaaaaagggggctccct

SEQ ID NO: 7650 - DNA, 592 bp, Chlorella sorokiniana
  Clone ID: LIB3602-070-Q1-K1-G3
cgatgtctcccgccctcgtccagcggcggcagcgcccgctgtggcggtcgcaggggcccgccccagcgtggggggccgccccgcctctgctggcgcgcccctgcggcctgcggcgcggtctgcggcccgccagcagcggcgccgcggcggatcggtgcaggcggtggcctccccggtcaagcccgcgacgggcgccaaggccggcggcaaggcgtcgatttcggcggaggacgcgcacaagctgtactatgacatggtgctgggccgcgagttcgaggagatgtgcgcccagatgtactaccgcggcaagatgtttggcttcgtgcacctctactccggccaggaggcggtgtccactggcgtgatcaaggcgtgcctgcgcaaggacgacttcatctgctctacctaccgcgaccacgtgcatgccctgtccaagggcgtgtcggcccgcaaggtcatgtcggagctgtttggcaagaagactggctgcagccgcggccagggcggctccatgcacctgttcgaccgcgagcacggcctgctgggcggctacgcgttcattggcgagggcatccccgtgggcctgggcgcc

SEQ ID NO: 7651 - DNA, 581 bp, Chlorella sorokiniana
  Clone ID: LIB3602-070-Q1-K1-G4
tgaggactgctgcactccaccggcctgggcggcaaggctgctgacgtgtactggttcgacgccggcaacaacaccttctgggcgcccaaggaaccctgattgccatctccttcctgctgttcaactgggctgagctgaaccgcatgcaggactacatcaagcccggcagcaacgtgaccgaccccttcggcaacaagatcaagtacgtggagctcggctaccccggctttgaccccctgtcgttctccaagaacaactttgatgagtggaagctgaaggagatcaagaacgctcgcctggccatgcttgccttcctgggcattgtggcgcagcacaacgcgcagccgggcagccccctggagcagctgggtgctcacctggccaacccctggaagaaccacttcatcaacaacggcgtgtccctgcccttcatcaacgacaccgtgcacaatattttgggcggcagcgcatgatgccttgtaatgcagcttccagcgccgatgagctgtgcgtgagcgcagcttgagagaaccgagcaggcgggcacactgggggccctcccccctgcaagcctgcctgcc

SEQ ID NO: 7652 - DNA, 595 bp, Chlorella sorokiniana
  unsure (1)..(595): unsure at all n locations; Clone ID: LIB3602-070-Q1-K1-G5
caccgctgctgccgcgatcgcgcagaagccgccaanaagccccaaaccatgaccgtcaaggctggcgatgctgttcccgatgtgcagctggacgagctggtgggtggcgagatcaagcagcgcagcctgaaggagctgttcgccggcaagaagggcatcctgtttggtgtgcccggcgccttcacccccggctgcagcaagacgcacctgcccggatatgtggcggatgctgagaagctgaaggctgcgggtgccgaggtcgtggtgtgcgtggcggtgaacgacgcgtttgcgatggacgcctggggccaggccaacaacacggagggcaaggtggtcatgctggccgatgcgcgcgctgagctgaccaaggcgctgggcatcgagcttgatgcccccgctgtgctgggcaacacccgctgccgccgcttctctgccgtgattgaggacggcaagttcaagacggtgaacctggagcagggcggcgagctgacctgctccctgtccaacgtcatcgtggaccagctgaagcagtgagtgagttatggtggcacgagcggcacgagcagcagcaagcggcagagcctggcgtgtt

SEQ ID NO: 7653 - DNA, 330 bp, Chlorella sorokiniana
  unsure (1)..(330): unsure at all n locations; Clone ID: LIB3602-070-Q1-K1-G7
tgnacgtcttcaagctgcccagccggcgctgctgtacattgtgccgggcgtgctcggcgcgacttttgctcatgccttggtgcgtggtgaggcgagcgccctgttccactggcatgagaaggagcaccacgagcagaaggagggggccaaagcgcaggcacaggacgcagccgcaagcggagcggaaagcaagaaggacacgtgaggaaaggccgcagcacagcagtcacgtgcctgcccgtgggtacagcctgcccccttgcactgccccaatgttcctttttgtgtccactgtgtggtctgcaatttttacatgtgagccgcgagcgc

SEQ ID NO: 7654 - DNA, 488 bp, Chlorella sorokiniana
  Clone ID: LIB3602-070-Q1-K1-G8
cccaactggtgcacgctcagtccatcgtggccatcctgctgacccagttgtgctcatgggcctgattgagggctaccgcgtcaacggcggcccggccggcgaggtggtggaccccatctaccccggtgaggcctttgaccccctgggcctggctgacgaccccgacaccctggctgagctcaaggtgaaggagatcaagaacggccgcctcgccatggtgtccatgtttggcttcttcatccaggccattgtgaccggcaagggccccgtgcagaacctgtccgaccacctggcctccccctccaccgacaacttctactccctgtacgccaagaccctggcgtaagcggcctgcacttgctcctgcttgagcctcgactggcggcgggcgtgaccctgtggcagtgcgctcccgcttgcgcccgctgcctgacttgacttcagctccactgttgcaccgaggggatggtgtaacatgtatgctgggg

SEQ ID NO: 7655 - DNA, 614 bp, Chlorella sorokiniana
  Clone ID: LIB3602-070-Q1-K1-H1
ttttaaaaaaaaaaaaaaaaaaaaaaaagggggggggggaaaaaaaaaaaaaaaaaaaaaaaaaaaaaaaaaaaaaaaaaaaaaaaaaaaaaaaaaaaaaaaaaaaaaaaaaaaaaaaaaaaaaaaaaaaaaagggggggcccgttttgggggaaccaagagttaacgacccggtgccagccgaagtcaaagggtggggggggggggggccctaaaataaaataaaggggcgcggggtttaaaaagggggggggggggaaaaaccggggggtcccccaactaaagggctggggagaaaatccccttttgcccggggggggtaatggcgaaggggcccgccccgagcgccttccccaccattggcccgtcctgaggggtaagggggccgggcctggaggggggccttaaaggggggggggggggggggtcccgccgtgggggcccgttaatatggcgaggccctaagcccccggtccttgggttttttcgccttctttgtgggccccggggggtgggttttccccgttaaaccataaaaggggggggttccttgtggggtgggcgggaatgaggggtttggggggcccttgacccccaaaaaaaccggggagggg

SEQ ID NO: 7656 - DNA, 572 bp, Chlorella sorokiniana
  unsure (1)..(572): unsure at all n locations; Clone ID: LIB3602-070-Q1-K1-H10
tggnggctttggttgacgatgggctggcgcggcacatcggcgtcagcaacttcagcctggcgcaggtggaggggctggtgtcctgggcacgcatcaagccggtgtgcaaccaagtcgagctgcaccccatgttggcgcagcgcaaactggtggatggctgccgccgcctgggcgtgcaacccattgcctatggcccgctgggccatggcaagggtgggctgctggaccacccagtggtagtggaggtggcagaggcagctgccaagtcgcctgctcaggtgctgctgcggtggaacgtgcagcgcggggtgccggtgatccccaaggccggcagcgagccgcacctgcgcagcaacattgagggcctgtttggctgggagctcacgccggatcagcaggcaaagctggatgcactggacagccacacgcgctttgtgaacaacagctggcacgactggggggatggagacgagcgagcgtgacatgcggccttttgactggtgacaggttgaaagagcaggttcatccatgtacagagctgcatgcaactgcaactctgcaaaaagtgagtg

SEQ ID NO: 7657 - DNA, 102 bp, Chlorella sorokiniana
  Clone ID: LIB3602-070-Q1-K1-H12
gcgttctataaggcaaggctgccgcgtaaacgccgcctagcgaggccgcaacccccgggtgccacttgctggataggatcaagttgtaaggcaccaactcgc

SEQ ID NO: 7658 - DNA, 506 bp, Chlorella sorokiniana
  unsure (1)..(506): unsure at all n locations; Clone ID: LIB3602-070-Q1-K1-H2
tccggtggtaggcgggnacacagtcggtcgtgaaaacgcgcctccccacatggccggcgagcgtgtgcggctctacgtcacgggccagttcctgggctacaagaggagcaaggccaaccagtacaaccacaccgcgctggtgaaggttgagggcgtgaacagcaaggaggagaccgagttctacctcggcaagcgcctggcgtacgtgtacaaggcgaagaccgagaagaagggcagcaagtaccgcgtgatctggggcaaggtgacccgcgcccacggcagcgtcggcaccatccgggccaagttccagaagaacctgccccctgcggccatcggcagcaagatccgcgtgatgctgtacccctcccgcgtgtgagggtcggttgcttcccggagcagcagcggtgcggcacggcgcggcggtgacgagtcgtggcagtgcgaccccgctcggcacggccgcccgggtggcgccgccgtcgcctccatgtaacccttgattagcc

SEQ ID NO: 7659 - DNA, 582 bp, Chlorella sorokiniana
  unsure (1)..(582): unsure at all n locations; Clone ID: LIB3602-070-Q1-K1-H3
gnaataccccgccccccaccccacaatgcacccctttgatatttgtcccagccgtcccgtgcacccccgcccgtgcggctcgcgctgatgccactgactgctctgcactgccatgcttgcgcgtgcgctcccttgtgtaacacacgaccccaaaaaaaaaaaaaaaaaaaaaaaaaaaaaaaaaaaaaaaaaaaaaaaaaaaaaaaaaaaaaaaaaaaaaaaaaaaaaagaaagaacagggctaaacgatcaaaaatatccaaacgcgagcatcgcgactataaagcatctttaattttgtttacctagccccaataaattgaaccgacgtggccggagcataaacaactgggaaaaccggggaaaatcccccagcttaacatcttagtagcccagccgggtttccccttttggaggattggcgaaatggcccttagcaacggcccttccgactttttgaacattgggacaggctaatgggacacgccttatacccctgtattaacccattaacccccggggtttacgcgcaacttgacagcgacactggtcaacttcctagcgccctatcccctggttttt

SEQ ID NO: 7660 - DNA, 569 bp, Chlorella sorokiniana
  unsure (1)..(569): unsure at all n locations; Clone ID: LIB3602-070-Q1-K1-H4
naaaaaaaaaaaaaaaaaaaaaaaaaaaaaaaaaaaaaaaaaaaaaaaaaaaaaaaaaaaaaaaaaaaaaaaaaaaaaaaaaaagggaaaaaaaaaaaaaaaaaaaaaaaaaaaaaaaaaaaaaaaaaaaaaaaaaaaaaaaaaaaaaaaaaaaaaaaggggggggcctttttgggggtccaagttttccttcccgtgctttccaactttttcttttttttttggggccccttattttaatttcgtgggcgggtttttaacaccgtggggttgggaaaaccctggggttcccccattttattggtttggggaaaattccctttttccccggtggggttttttggaagggggcccccccgtttcccttttccaaaattttccccccctttttgggcattgggacccccccttttaggggccttttagccgggggggggggggggtttccccccgggggtccctttttttttcccggccctttgcccccgttttttttgcttttttccctttttttttccccctttttccgggtttttcccggagatttttttaagggggggcttcttttt

SEQ ID NO: 7661 - DNA, 206 bp, Chlorella sorokiniana
  unsure (1)..(206): unsure at all n locations; Clone ID: LIB3602-070-Q1-K1-H6
gcttngacagtcgagctggccagnanatggtcgccagctgtccatgttgcctgcagcccaccaaaagcctgcccatttttccgaaaagacgccggagccacgctccctgtgcactgagttttgttgctgctgtttcacgcctgctgcggctccgcagcccagttttgccatgcgctgactttatgcactgtaagtgacacacccgt

SEQ ID NO: 7662 - DNA, 597 bp, Chlorella sorokiniana
  unsure (1)..(597): unsure at all n locations; Clone ID: LIB3602-070-Q1-K1-H7
ctgtatttgtccagccccaacgcggcggcacgactgcctttcctgaagccgagctgaccaagcaggccatgggggcagagcaccggccaggcaccgaccctgatgagtggtattgcagggacgagcgtgtgctggctgcgtcgccgccgcccggcaccggcgtgctgttctgggactaccggcccaacaatggcggcggcactggttcatacgaggacggcagcgcagacccgctggccgcgcctgtgtacgaggcactgcacagcggctgcccggtggttgagggcgagaagtgggtggccacccgctggatccggggcaaccgcttctactgagcaggcacaggctgttgcttgtgaaggctgggctggcaggaggcacgctgcggccctgtctgcgaaagctagggattgctgcaggcatctcgcatggccatcagcttccagcgtgatgacaacccaacatgttcactgctgtgtgtgttgcatgtgcgactgctgtttcattcgctttgccttcttcatgctgatcgttgcactgctgtaagactgactgctacaaannaaaannnnnnnnnnaaaaaaaaaggggcggccg

SEQ ID NO: 7663 - DNA, 270 bp, Chlorella sorokiniana
  unsure (1)..(270): unsure at all n locations; Clone ID: LIB3602-070-Q1-K1-H8
gnaagccactgtgagcgacggccccggcggcactgtgtacgccaccgctcgctcactgttcattgcgcccaagcccagggtatgagcgcattggcacgtactttggacgacgttcaatgctacatgcctatgatgcagccgagctgccgcacgtgacaaataccaacgaataatcagcctgcttgctgccctgccgctcgtgctgctttccagaaaaatcatcacttcaatttcatttcatgccacacctgctgtgtaaagcctgtccag

SEQ ID NO: 7664 - DNA, 477 bp, Chlorella sorokiniana
  Clone ID: LIB3602-070-Q1-K1-H9
gcgctctatgcctttagactggcgctggctctgcagaagctgaacatggacaagctcaaggcctgccactcgctggccgacaagtcggatgacttccaggcccaggatttcctggaggacgagatgagcgcccaggccaaggtggtgaaggagctgggagactatgtgtgcgagctcaagcgcgtgggcaagggccacagcgtcttccactttgatgagaggattgaccagggaggcctgactgctgcggcgtgagctgaccaggcagcaagttgcaaagggcgcagctgcagaaatggcctgcaagcccagcggcgccagcagggcggcaggcgtcggcggcggcaggcgtcggcgtggcatacgcactgatgcccacctgccacacaccactagcttgcgttgaatgatggttgatgaagatggcaacaaaaacagctgttcaatgttccattccttgtaaagcagcgagcattt

SEQ ID NO: 7665 - DNA, 481 bp, Chlorella sorokiniana
  unsure (1)..(481): unsure at all n locations; Clone ID: LIB3602-071-Q1-K1-A1
ggnagtccaagtctctggtggacgagctgcgccccgagctgcccgagcgctccaagaaggcgcaggtgccctactgcgtgtgcctggcctggtccgccgatggctccaccctgtactccggctacaccgacggtgccatccgcgtgtggcaggtgggccgcgccatctaagcagctggccacggcggtcggtctcagctgccctgcgctgcagcaggtgctgccccagtggcaccccgcacctggctgtggcggcggcggcggcggcctgacgcacggcgcgcggcgcggcgccccccgcggcaggatttgtgacaggccctctgcacatcgaacgctaccatagacggtggaagagctaaagacgggagagtgttctgggcccggtcactgagatgcttgccgcggggtgggtgctcgctttcatgcgctgcggcgcggcgcttgcacctgcgctagtcgccagtgtaacagccccgtgc

SEQ ID NO: 7666 - DNA, 274 bp, Chlorella sorokiniana
  Clone ID: LIB3602-071-Q1-K1-A10
gcctagttctagatcgcgggcggccgctcgcgatctagaactagtgtacggcggccacctggcggcgggcgtggtcaaggagcgcatcgtgcgcgccttcctggtggaggagcagaagatcgtgaagaagtgctgaagctgcaggctgccaaggaggctgcgcaggccaaggccgcggcggcaggcagcaagggcaagaagaagtccaagaagtgagcggcgcacgcgagcggacagttgcgccccatgctcccgctgtaatgcaccctcgatg

SEQ ID NO: 7667 - DNA, 319 bp, Chlorella sorokiniana
  Clone ID: LIB3602-071-Q1-K1-A11
gcagcagcagccgccggcggtcagcggcggcggcgtgtgcggcggcccgcacagggcctttgcccgccgcctctcgctgccgccaccccacccctcccaacccgacattttttgtttggtccgcagggcggttctcctgtgtctgtgtctgtccgtccagagaagagctcccctctattgatcggtacagtctttaattccgtccctggcacgcctgcatttcccctgctccctccctcccccccctgtattcacaaattgtttcgtcataggacgccggcgtctagccggagcgcgctccttgtaacattcttgggcc

SEQ ID NO: 7668 - DNA, 418 bp, Chlorella sorokiniana
  Clone ID: LIB3602-071-Q1-K1-A12
gcagcggccgggcaccccctcttcaactcaagcctacctgcccgtcattgagtcgttcggcttcaccgccacgctgcgcgccgccaccggtggccaggccttcccccagtgcgtgttcgaccactgggagctgatgacccccgacccgctgcagagcggctcgcagaccaacgagattgtgctcaacatccgcaagcgcaagggtctcaagccggagcctgccgcacttaacgaatacgaggacaagctgtaagctggtcctgcggcgtcccttttggcgagtgagcggcatgcgtgagcggcgcagcgcgcgcggcggcggccgccgccagcccacctgtccctgcgacctgcccgtaccgtgctcaacgtgcaccagatccacacactaggctgaaatgtaatcagttcaattgac

SEQ ID NO: 7669 - DNA, 566 bp, Chlorella sorokiniana
  Clone ID: LIB3602-071-Q1-K1-A3
cggtcgacccagcgtccgcggcgactggtcatggcgaccgtgaagaaggcaagcccgacctgcgcaagaaggtcatgcccgcgattgtggtgcggcagcgcaaggcgttccggcggaaggacggcacctacatctactttgaggacaacgcgggcgtgattgtcaacaccaagggcgagatgaagggctccgcgatcaccggccccgtggccaaggagtgcgccgacctctggccccgtgtggcggcagcagccaacaccattgtgtagagcggcggccgtccggctgggcgtcgcggcagcgcggaccacactgcagtacccaccgcctgccgcgctcccggcgcagcatgctgtaatgcacatccagcgaaaaaaaaaaaaaaaaaaaaaaaaaaaaaaaaaaaaaaaaaaaaaaaaaaaaaaaaaaaaaaaaaaaaaaaaaaaaaaaaaaaaaaaaaaaaaaaaaaaaaaaaaaaaaaaaaaaaaagggggggccctttttaaagaaccaaattttacttccccttgcttgcaaaattaaaactttttttttggggcccccaa

SEQ ID NO: 7670 - DNA, 551 bp, Chlorella sorokiniana
  unsure (1)..(551): unsure at all n locations; Clone ID: LIB3602-071-Q1-K1-A4
gctggntgcgctgttcgagatgctgttcaggtgctgaagacctgttcatcatctgggctgatgcagttggatgctgctccactctcgcgacgtcgttttcaggagaaatttccactgttgttccctgggcttcggctgctgagcaagttcgtgcatctcatcagtatcgagtacatcgaggacattgcagcagagcttcgactgctgctgcgcagcagtgcgctgccaccccaggaacgcctgcgtgtgctgctcaccgcggtgaatattgtgcagcagcagggtgggaccgtagtagccgagcatgacggcttctactcggagctgtacgccgcactgaagcacatcatgttggtgccgctgctggagggttcgccgacgcgcagcagaagtggcgcagcagggcaggaaccaagcgaggaggaatggttcagcagcgctgctgcggcagcacaggcacaagcagacagcattggtgaccaggtatcctacctggcatgccaggctctggagcagcttttgctggacagcaagcagcttgttggcgtgcg

SEQ ID NO: 7671 - DNA, 507 bp, Chlorella sorokiniana
  Clone ID: LIB3602-071-Q1-K1-A5
tacccttgcacccccgcctgcctcggtacgcaccctcccttcctgggcctcggccctgtctcgcaccctcctacctgggcccttggccctgtctgctacgaccccacccgctgccgcactgcggcgcaccctgctccttccccgcaccgacttgcactttggccctcttgctttggccgcccattgcctgccgtgccccgcccgcccgcctcatggggcgctccatgcagctcacatccccctggcaggctggctgagcgcttaggctggtcggctgctgcccgttggcctctttgctctcggttttgctccctttgcttccacaacccgcttgcagcaacgttgctcgtgcactgctcccagcagttggtggtgctcaacgatggggtcacccggacacccgacctccgctgttgttgtttcattccagcattgcatgcccacgttgtgttgtttccagagccagtcagcctgtggaccaggcccagcctctgtaacccaagcaag

SEQ ID NO: 7672 - DNA, 216 bp, Chlorella sorokiniana
  Clone ID: LIB3602-071-Q1-K1-A6
aaaaaaaaaaaaaaaaaaaaaacacgagaagaaaagaaaaaaaaaaaaaaaaaaaaaaaaaaaaagaaaaaaaaaaaaaaaaaaaaaaaaaaaaaaaaaaaaaaaaaaaaaaaaaaaaaggggcggccctttttaaaggtcccaactttccttccctttttttgcaacttaaaactttttttttggggtggggagattaaatttcccggcccgcct

SEQ ID NO: 7673 - DNA, 589 bp, Chlorella sorokiniana
  unsure (1)..(589): unsure at all n locations; Clone ID: LIB3602-071-Q1-K1-A8
aggaatgcgccaatgccgcccatgactttggtgtggattgggtgaagggccactactaccgcgtgcccaagtactgcaagaccaagtggctggcctaccccgtggagtgctccacttgctccggctactactaggcaactagctgagcaaggcagggcagcctgaaacaggctcccatgtgccgacgctgctggcggcatgaggcacagcaccaagaaaggcagctttcaagggcggcgttgtgctggagcaggcatggccgccagtctggagcgccagctacagcacgttgccgcgctcgatggccctgccaaccagcctcgacgcacagctgaagcgctgcaacacacccgtgacaaaccgtgcaacagcagccacacactgcgttgcttgaaccccctttccgtgacccaagacccgatccattccgtgatctctcccatctgcaaccaancacactcccccattccctggaccccatgcatgaaccctcccccctccctgaccccgaaccattccgatgaatgaaaccacccncccgccgctgtgcttgccccacacatgtgtacagatgtaagcacacagtccc

SEQ ID NO: 7674 - DNA, 215 bp, Chlorella sorokiniana
  Clone ID: LIB3602-071-Q1-K1-A9
gtcgacccagcgtccggttatctcctcgcccttgcaattgtgtatcgaatcgcatgcgccgtaccgctttgatcatcatgcatctctctcatccatatggcacatcttttgagcggccttgcccaggccccacgggataactggggggcctgcctgcgccttgccacttgtatctgccggccgcactctgagtgcacggtcccatgttgcactat

SEQ ID NO: 7675 - DNA, 583 bp, Chlorella sorokiniana
  unsure (1)..(583): unsure at all n locations; Clone ID: LIB3602-071-Q1-K1-B11
tgtgtggttcaggctggcgcccagacttccaggaggcggcctcgactacctgggcaaccccaacctggtgcacgctcagtccatcgtggccatcctgctgacccaggttgtgctcatgggcctgattgagggctaccgcgtcaacggcggcccggccggcgaggtggtggaccccatctaccccggtgaggcctttgaccccctgggcctggctgacgaccccgacaccctggctgagctcaaggtgaaggagatcaagaacggccgcctcgccatggtgtccatgtttggcttcttcatccaggccattgtgaccggcaagggccccgtgcagaacctgtccgaccacctggcctccccctccaccgacaacttctactccctgtacgccaagaccctggcgtaagcggcctgcacttgctcctgcttgagcctcgactggcggcgggcgtgaccctgtggcagtgcgctcccgcttgcgcccgctgcctgacttgaattcagctccactgttgcaccgaggggatggtgtaacatgtatgctggggaanaaaacgnggnaaactgtaagcgctggaacagc

SEQ ID NO: 7676 - DNA, 501 bp, Chlorella sorokiniana
  unsure (1)..(501): unsure at all n locations; Clone ID: LIB3602-071-Q1-K1-B12
cccggtcgacccagcgttcggcggccgcagntgtgaggccgcaataagtgacgtaatttttcagcgccccaaccaggaggggccttgcccgccgttgacagacgaccccctaagcgctgcccggccgcgcgctgccgctgtaaatgcatcccggatgtacccgtgccccccgtttttcttcgcgttcctcctttcagcgctcaggaaccctttttctgaccgtctgtcagcacgcttttccagcgcaagagccgcagcatgcggccgccaggccgccgctgccgttttccgagtcccgttttagctcccctgcgtcgactaactcccttgtcactggttctttgcactgctgtgccagccctgcctcactagctagcgtcatgaacggtgtaagacgtgtgcgtgaaaaaaaaaaaaaaaaaaaaaaaaaaaaaaaaaaaaaaaaaaaaaaaaaaaaaaaaaaaaaaaaaaaaaaaaaaaaagggggcggcgcgttttaaa

SEQ ID NO: 7677 - DNA, 462 bp, Chlorella sorokiniana
  Clone ID: LIB3602-071-Q1-K1-B2
ggcaagccacgcggcgcgccgcaagcacgcgcgcgcgtaagcagcccgccacccgcgcagcagcattgttgaccactgttgttaccctgcgtctgggcccgctgtgggcagcgctggggtggtgcccaccctagcgtgtctcgcagcggcgccgcccattgttgtacagtgccgaacgtctgcccttgcggcgtcggtgcctgtcgcgtgccagcaacccccctcgtgctgtcgcattttccattctctacaaagcagtttcatgaacccaccctgccaaattgctttctttggatgccgcacatggcgtgtgtgcctgcacgtctgtgcgtgccggcgcgccgccctgcacagcctgcccgcttgacctgcccttgcctctgctgctcagccccgaagcccggcagattttcctcgtcagcggctcgggcccgcacctctcaacactgtaaagacccctcg

SEQ ID NO: 7678 - DNA, 247 bp, Chlorella sorokiniana
  unsure (1)..(247): unsure at all n locations; Clone ID: LIB3602-071-Q1-K1-B3
tgnatgcggcgccagcagcagcggcaggcattgtgctgaacgcacggagcgcaagcgcgtcccgcgcacagccgccaccgaagcggcctgccagcgtcgacggcagcgaggcagcaaggcgcggcctggcatgctagcagcgcgtactgcgcgccacggcgctagcagccgcaccctggaacagcatcagcagtaattcagcagcccacctgcatgccgaacgctccgctgtaacaggttctcagng

SEQ ID NO: 7679 - DNA, 484 bp, Chlorella sorokiniana
  unsure (1)..(484): unsure at all n locations; Clone ID: LIB3602-071-Q1-K1-B4
tgtcgtgnntctgccctttcaagccctcgccgcgngctgnngcggggcccgcagcagcagggtggnntgccgctggnntggcacgcacnncggctctttgcatcctnncccgctgnatgcnnnaccttacnncccggnncggtgccacntttgtgccnnnccagtgnanntgcacncnnatgtncnccnnggtgnnatggnatntnnaggaaattgcangnncacacncnncatttgcatgcagaccgacacttttctgcgnnnacacgcntnncagccnnnccaaacgngnntctggnnnagctcaagcactttatcaaaacattatgnnncggccanncgacannnactgcccnnagctggcttaacaagctnngcctcctgacnngtcggcatgcncnntgccaatcanncacaccanngccctcacttgcgccaaccccttctgcccaaccctgcaccctgccccgtacccaaaacacct

SEQ ID NO: 7680 - DNA, 590 bp, Chlorella sorokiniana
  Clone ID: LIB3602-071-Q1-K1-B5
ggtcatcttctgcccaccacccgccgccaacaagtgcgagggcaaggtgttcaccgtggagtatgcaccacaagcgcgtggacaaggccggccccggcgacaacgtgggcatgaacatcaagggcctggacaagggcaacatgccccgcaccggcgatgtcatgatcctcaagtcggacgccaccctgaagcaggtgaaggacttcaccgcccagatccagaccctggacatccccggcgaggtcaaggcgggctactcccccatcggctttgtgcgctgcggccgctccgcctgccgcatcaccggcatcaactggaaggtgggcaaggagaccggcggcaagaagctggaggccccccacagcctcaaggccaacgagatggctgaggtggtgttcgagccctgccagccgctggtggtggactccttcaagaactgcgagggcctgtcccgcatcgccttcctggacggcaacaccgccgtcatgctcggcaaggtggtgaagaccacccccaatgcgtgagcaccctccgcctgagacggcggtgcacgccggtgcggcagcggcggcttaagctgcctgctgccg

SEQ ID NO: 7681 - DNA, 563 bp, Chlorella sorokiniana
  Clone ID: LIB3602-071-Q1-K1-B6
gcccaaattcgaccggccggggcgctcacctgcagccgcggcgcggcctcccacgcgctcgggcacgcctgccgcaccagcagcatgacggcgatcagcgtgacgagcgtgaacgtgctggacaacccctccaagtcacgaacccgctgcagttcgagattcagtatgaatgcatgttcgacctggcagacgacctggagtggaagctgacatatgtgggcagcgcagagaatgagaagtatgaccaggtgctagacacggtgtttgtgggccccgtggcacccggccagtatagattcgtgttccaggcggacccgcccgagttcagccagatcccgcccgatgacattgtgggtgtgaccgtcatcctgctgacctgcagctaccgggagaaggagttcattcgtgtggggtactacgtgaacaacgagtatgcggaggaggagctgcgggacaacccgcccgacaagccagccatcgacaggctgtaccgcaacattctggccgacaagccccgcgtcaccaagttcaacatcgactgggactcgacgcgggaggccagc

SEQ ID NO: 7682 - DNA, 583 bp, Chlorella sorokiniana
  unsure (1)..(583): unsure at all n locations; Clone ID: LIB3602-071-Q1-K1-B7
ctagttttagggggctagcaagnnccgtcgcggtgtccagcccccctttcgcaaccctccaccagctcccccgtgtctgcacacccgccatggctcccaagggttttnncagctggaacnnttccccggcgcttacnngccgtgcagttcattgannccgtggtgtcgtgcacccgccttgcgtgtaccacttgctaccactgtcctggtgcaagaaaccccggatgtgcactttttgtcaaggagctgaagcaggacgagnnctggcggagagcgcgcggtggtcccagcaggccaaggccgtccagggcaacgtgttccgctggctggcgcagacgcgcgacaccgccgcgggcgagcagaaggacacccgcatcttccgcgtttgagcgcccgccaggctgctgcgctaaatcggcgcgcaataccagccgctcaccgccactcgccgccgctgcgcccccctgtgcttgctctcagggcctgaggccctctgccagtcagccacctggggccggcacccccttgccgctatgatatgcgtccccaaagctggagtgaggcattgcgggaacccaatgct

SEQ ID NO: 7683 - DNA, 595 bp, Chlorella sorokiniana
  Clone ID: LIB3602-071-Q1-K1-B8
ggggcagcgtggcggcggcggcgggcggcgggccagagtggagcagtcgctgcgcgtgcgctggctggcggaggcgccctgcttcccgccggcgctgcagcccagcctcttcctgcggtgggaggaggtgaaaggagagccgcagcaggcgcaggcggtgctgtcgtggggcggcccccctgtgcgggccaccttcacattcgaccgctggggtcgcgtggcgcgctgcagctcccacgacttcttgcggcgcctgccggacggcagctttgagcagggggaatggcaggtggcgtactcgggccacatgctgtttgggctcagcccgcagggccccgtcatgcaagaggagattgccacacacgccggcgtgtttgtgcccacaaatgtggaggcagcctgggtcatgccagacagcagccgctgggtgtatgcacagatgacggtcagcaaggtgactgccagcatttgatctgcatttcgaggcgctgtgcagcgggcgggctgctcgaccgccgtgtccacgcccttccagccacgcagcggcttgcagcacacagctgcttgcgtaagcgagggtttcaggtgccggctg

SEQ ID NO: 7684 - DNA, 418 bp, Chlorella sorokiniana
  Clone ID: LIB3602-071-Q1-K1-B9
cgcccagtccgcgctgcgcgccctggcccgctccggcatcaaaatcggccgcattgaggatgtgacccccatccccaccgactccacccgccggaagggtggccgccgcggtcgccgcctgtgaggcgggcgcgctatgcgcgctccggccacagcccggatgctctgcctggcctgccgcgcccggctgccgcgcccgcggcctgatggcggcccctgccgcctgatgggcctgtggtgcagcagcggcgccggcacagcccaggcagcggcgcgcccccgcctgccgcacacggcggcagctgcgctggcggcccccgctgcctgaggctggaggtttgagcaccccctaatgcgatgtgccactgactgcttgtgttgtctctccccagccagcatgtgtaagccaagcacacgc

SEQ ID NO: 7685 - DNA, 289 bp, Chlorella sorokiniana
  unsure (1)..(289): unsure at all n locations; Clone ID: LIB3602-071-Q1-K1-C1
ccgtgnaaaaaaaaaaaaaaaaaaaaaaaaaaaaaaaaaaaaaaaaaaaaaaaaaaaaaaaaaaaaaaaaaaaaaaaaaaaaaaaaaaaaaaataaaaaataaaaaaagggggcggtccgttttcgtggcttccacttttctttcccttttgtttcccgctattttaactttttttttagtggcccctttaatttgggttgtctgggccgtcgcttttccatggccctggccttgggtaaacccctgggggtcccccatctttattcccctttgcggccctttcccttt

SEQ ID NO: 7686 - DNA, 528 bp, Chlorella sorokiniana
  Clone ID: LIB3602-071-Q1-K1-C10
ccgccatcaaggtatcggccgccgcttctccacatctgctgcaagaaggctgaggtggacctgagcaagcgcgccggcgagctgtctgccgaggagctggagagcatcatgaccatcgtggccaacccccgcgcctacaagatccccgactggttcctgaacaggcagaaggacgtcaaggacggccgctactcgcaggtgacctcctccgcgctggacaccaagctgcgcgatgacctggagcgcctgaagaagatccggaaccaccgcggtctgcgccactactggggcctcaccgtgcgcggccagcacaccaagaccactggccgccgcggcaagaccgtgggcgtggctggcaagaagaagtaagcagcttcttgcgggcgcggcctgcggcacgggcggatgctggcggctgggtgacggcggctggcgccgcccgcgcagcaaccccactggcagagccggcggcagcaggtggatccacaccagtcgttgcagtgctgccgtcgtgtaatgcacccttcg

SEQ ID NO: 7687 - DNA, 603 bp, Chlorella sorokiniana
  unsure (1)..(603): unsure at all n locations; Clone ID: LIB3602-071-Q1-K1-C11
gccgccgtgcgacctgaccggcaagcgcgccaacaatggctatgtggtgaccttctcgcacaagcgcaacaagaagctgcagcaggtcaacctgcagtacaagaaggtgtactggccggaggggcagcggtgggtcaagctgcggatcagcaccaaggcgatgaagacgattgagaagcggggcctgcagaacatggcggaggaggcgggcatcgatctgtggaagctgccgtacgaggacgcgcgccccgagcgcctgcagtggctggccgagaacgcgggcaacccgcccatggccaaaaacaagcgggccatgaagaaccccgagaagctggcggccagcaagaagacgccgctggtggcccgctacctgcacggcaagattgcctatgtgcgcgccgactcgcagtaaacgggcggctccccccgcccccaaacgggcaggcgccgagtgacactgctcgtcggcgggccgcggcgcgcgagcctccctgccatagcgcttgaggggcggcttgccatgcccgcgccgncgcccgcacctttgcttgtgtagtttcccgctgctgttctgcttccttcctctgacctctcgcacacata

SEQ ID NO: 7688 - DNA, 546 bp, Chlorella sorokiniana
  Clone ID: LIB3602-071-Q1-K1-C12
gcgttcgggcaagaccacggctgaagaaatgtgcctggagaaggctgcaacccctggatcgaggtggacggcggcgtgacgcccgagaacgcatacaaggtgattgaggcgggcgccaacgccattgtgagcggcagcggcgtgttcggcgccaaggactacgcggcggccatcaagggcatcaaggagagcaagcgccctgccgctgtgcacgcttaagcggccagccatgtaagccgtctgcgtgcggatgacgtgcgccggtgcctgcctgtccggcagcattagacccgccctccgcctgcccgcatgtcatggcccgtcccctgtgttatgggccgccagcggggctgctgcgctgccttgcagccccgccgcgaggcccctggatctgcttgcgatttgatttcccgctttcgtgtccgttttgctgcgctcagaaacgcctgccccatccccgcatcccgccgtattctttccgtgccttattccgccggtgccctgctcggagctgcctgtgcgccgtagccaggttttgtaagtgcc

SEQ ID NO: 7689 - DNA, 534 bp, Chlorella sorokiniana
  Clone ID: LIB3602-071-Q1-K1-C2
ccacgccgtccgtaaaaaaaaaaaaaaaaaaaaaaaaaaaaagaaaaaaaaaaaaaaaaaaaaaaaaaaaaaaaaaaaaaaaaaaaaaaaaaaaaaaaaaaaaaacaaaaaaaaaaaggggggccgcttttattggtgccccctttcttccccccgtctttcctggcgtcttctcttttttttttttgtcccccccacatttctttgagttggcgcggccggttttttaacatctgtgtctgggggaacccctcttgtctccccccctttttgaccctttttgggcctccccctttttcccccgggtggcttaccaaaaaggtccccccccgctggccctcctcccaaatggccccccctcctgggtgtgtgggggccccccccctgcgcggtgtttttcccccccccccgtgggggtgccccccctcgtgccccctttttttttctcctccttattgcccccccctttttttggtttcctttctttctttgccccctctgttgggtttttccccgggggcctcttttgggggg

SEQ ID NO: 7690 - DNA, 571 bp, Chlorella sorokiniana
  unsure (1)..(571): unsure at all n locations; Clone ID: LIB3602-071-Q1-K1-C3
ctgcccctgncgcacccggngctgtatgaggacattggcatcaagccgcccaaggcgtgatcctgtacggcgagcccggcaccggcaagacgctgctggccaaggcggtggccaactccaccagcgccaccttcctgcgtgtggtcggctcggagctgatccaaaagtacctgggcgacggccccaagctggttcgcgagctgttccgcgtggctgacgagcaggcgccatccatcgtgttcattgacgagattgacgcggtgggcaccaagcggtacgacgcgcacagcggcggcgagcgcgagatccagcgcaccatgcttgagctgctcaaccagctggacggctttgatgcgatgacggatgtcaaggtcatcatggccaccaaccgcatcgacagcctggaccccgcgctcatccgccccggccgcatcgaccgcaaaatcgagttcccgctgcccgaccagaagaccaagcgccgcatcttccagatccacacggggcgcatgacgctggcggacgacgtgaacatcgaggagtttgtgatggccaaggacgagctgagcggcgc

SEQ ID NO: 7691 - DNA, 459 bp, Chlorella sorokiniana
  Clone ID: LIB3602-071-Q1-K1-C4
ccccgcgtccgcttgcggtggagcaggggctggagattgaccgcttgcgtcgcacaaaagaggcctgctgctgcgcctgcgcacagcagaggagcagctgctggcaacctaccgggacgaagctgccactgacctcattcaggcgctggctgaggcgcgcgtggaggcggcacagcgcgactttgagatcatggagctgcaggggcaggtgcggaagaaggatgcgctgatcgataagctgcgagcgcagctgacacgtgcagaggccaagtatcgcgcgcggctggatgcagcacactcgccgggccccctagccgcagccctctctcctgcctcacgtggccttccgccgtcgccgtggcgagacgaggctgattctccggctgcgccgcagcagtctcaggcaggcagcagcgcggcagtgggtgcaatgcacgacagcccagcagcactggaggt

SEQ ID NO: 7692 - DNA, 584 bp, Chlorella sorokiniana
  unsure (1)..(584): unsure at all n locations; Clone ID: LIB3602-071-Q1-K1-C5
accaggcccatttgccgagtacctgaagacggcgtggagcccgacgagctggaggacctgtacaccaaggtgcacgaggcgatccgcgccgacccctccgccaagcccaaggcccgcagcaagcccgccgaggccaagcggtggaaggaggtcaagctgacctacgagcagcgcaaggacaagctcaaggccaagctggccgagctggcggccgacgagtaagcgcctcccctttggggcgcttgccagttggagcaggcgggcgctgcgcccgccgtgcccgctgcgccagcatagcgctcggcgctgccgcccgcgctgcggcaggtgggcgggcgctccacaccacaccacacctcaccacaccatgcctcccggtggaaagagagcggttgcggcgctgctagtggcgccgcgccgccgcgcgacggtttcaggcggctagatccacaaaaagccgccggcagtagctggccggccggcgccgcggccggngggccggcgcggcggcggcggccacgcgcaaggcctttgcaggcccncgcgtgagacgcacacccttaccgtgtaaggaacctactcgc

SEQ ID NO: 7693 - DNA, 599 bp, Chlorella sorokiniana
  unsure (1)..(599): unsure at all n locations; Clone ID: LIB3602-071-Q1-K1-C6
gtcgacccagcgtccgcccgcgccgnccgtcgattctacggccccgaccgcgccagtggctgggccccttctccgagggctccgtcccctcctacctgaagggcgagttccccggtgactatggctgggacaccgccggcctgtctgccgaccccgagaccttcgcgcgctaccgcgagattgaggtcatccacgcccgctgggccatgctcggcgccctgggctgcctgacccccgagctgctgcagaacaacggcgccgctgacttcggcgaggcggccgtctggttcaaagccggcgcttcgatcttcaacgaggacggcctgaactacctgggcaacccctccctgatccacgcccagtccatcgtggctgtgctgctgacccagctggtgatcatgggcgccgccgaggcgtaccgctacagcggcgagggccccgtggagaccagcggcgactccctgtaccccggcggcttcttcgaccccctgggtctggctgacgaccccgacaccctggctgagctgaaggtgaaggagatcaagaacggccgcctcgccatgttctccatgttcggcttcttcgtgcagggcctggtg

SEQ ID NO: 7694 - DNA, 563 bp, Chlorella sorokiniana
  Clone ID: LIB3602-071-Q1-K1-C7
ggggtctcatgcacaggatggtgaagttcctgcaacccgccaggtggtcatccttctgtccggccgctatgccggcaagaaggcggtcatcgtgaagaactacgatgatggcaccagcagccgcccctactgccacgcgctcgtgtgcggcctgtctaagagccccggaaggtgatcaagcggacgcccctcaagaccaggcgcgccgctccaccctgaacaccttcatcaaggtggccaactaccagcacatgatgcccacccgctacacgctggaggtggacctcaagggcgtggtgaccgcctagtgcgtggacaacagcaccaagaaggtggaggccaacaaggaggccaatgcgctgctggaggagaagttcaagagcggcaagaaccggtggttcttcaccaagctacgctctgaggagtttcttggagagcctaggttgcaacagccgtgacgtgacgtgctccttgcccctagacgccatgtaacgtcacaccccgcacaaaatgagtgctgctgtgggaggcggctcgcgacggcaaggggggtgatgttcact

SEQ ID NO: 7695 - DNA, 201 bp, Chlorella sorokiniana
  unsure (1)..(201): unsure at all n locations; Clone ID: LIB3602-071-Q1-K1-C8
tctgggcatcccatattaacggcggccagccggttttggacaagcacacacaacatatgagattcccaacctccctgcgcactgcnttgtaacaatncnnctggctccctttcttgtacccccttgacnnccgcactcgggccgtggnatatgnntaacgttccgcggngaaaaaaaaaaaaaaaaaaaaagagggggggg

SEQ ID NO: 7696 - DNA, 477 bp, Chlorella sorokiniana
  unsure (1)..(477): unsure at all n locations; Clone ID: LIB3602-071-Q1-K1-C9
tcgtaaaaaaaaaaaaaaaaaaaaaaaaaaggaaaaaaggaaaaaaaaaaaaaaaaaaaaaaaaaaaaaaaaaaaggcaggaaatataaaaaaaaacccaaacttagacgcgccccccttcctagagctcgcgtttgctctggggtcacctaaagctgttttaggggccgtccgtgtcccccgctttgggggggggggcgcccctgacttccccctctttctgctgctggaagccttccgttttccgccatttgcgctaatgtcgaccaggccctctccggtgcggctttaccaaagcgcttgggcggccctggatgtggtcatnatgggtacagcccgcctgttctccgctcattgcgcccgggggtgacttttgttacgcgcacatggccccgttcatttgcgggtaccctctcaccgggacctttgctttccttttctcccttttgtcccccttcggtggttttcccactgggc

SEQ ID NO: 7697 - DNA, 562 bp, Chlorella sorokiniana
  Clone ID: LIB3602-071-Q1-K1-D10
gcagcatgacatattgtgagcacgcacatggcggcgctgcacgtggaggacgccgaccggtccagctccggcggtcggagccagcaagtgtggctggtgcagcagtactgcaaccgcgggacgatatatgacgcgattgaccgtggctggctgcggcagtgccgcagcctggacagcccgcccgacctgcgagccgtgctgctgactgcccgggagattgcatccgcgctggcctacctgcacgccaacgacgtgctgcatggtgacctgaccggaagcaatgtgctgctgacggacgcgcccaagccagagggcgatgagcgcggcttcacagtcaaggtgtcggactttggcctcagccagacgctgggctccaccggctgcaagcccgacagctttggcacggtcagccacatgcctccggagctgctggatgggggccacctgaccggcgctgccgatgtctactccctggggatactgtgctgggagatgttctgcgctgcgcatgcctggtccggcttgcgcctgcccaaatcatccaccgcaaggtggtggggca

SEQ ID NO: 7698 - DNA, 512 bp, Chlorella sorokiniana
  unsure (1)..(512): unsure at all n locations; Clone ID: LIB3602-071-Q1-K1-D11
cgnanaccggtaccgaaatcgacaagctgaccgcctcgcagcgcctggacctgaatctggagaaggggcgcatgcgggacgagctgcagtcgctgcgggacaagaccaacgagttggagatcaagatggacaaggaggtgaactccctcaaggcagcgatggagcagagcaagaacgacaccgtcaagtacgtgctgggtctgatgctggcgctgatgacggcaggcctgggtgccgcacgcctgctcatgcactaaagagggcaagcgacgcccgcctgctgctgcacccgaaaattgaggctgcccgcccgctcatgccctgaagcagcggctgctcttcatggagtagggttgtggctgcatcatgctggtcatgcactagttctgcggctgctcgtcaatgccgctcagccgctcagccgggcagccgggcagctgggcccataaacccggcaccactattgacggtcaggcagggctatactcgctgtgtaacacaagcattgcana

SEQ ID NO: 7699 - DNA, 323 bp, Chlorella sorokiniana
  unsure (1)..(323): unsure at all n locations; Clone ID: LIB3602-071-Q1-K1-D12
nccacctgcacctgcacatcatcggcggccgccagatgaactggccccctggctaaccaatcgacttgcaagccctgcaaacgaactgtgtgatgggcagcggctggcccaccggccggacgttgcgtgctgcaatccagcattgtgcattgtcctttcttgccaagagtgcctgccctgtaagcactgcgttacaaaaaaaaaaaaaaaaaaaaaaaaaaaaaaaaaaaaaaaaaaaaaaaaaaaaaaaaaaaaaaaaaaaaaaaaaaaaaaaaaaaaaaaaaaaaaaaaaaaaaaaaaggggcggcccgttttaaaagaac

SEQ ID NO: 7700 - DNA, 581 bp, Chlorella sorokiniana
  Clone ID: LIB3602-071-Q1-K1-D2
cttactcccaggttccggtgtgatgtggccctactactaagcgagctggcagctctgcagcccgctgcggcatgctgagcccaacgctgctccgcaagcacagcacggaccagcatgccgccatgacctgctgtcctgagcaaacagtcagcagcgtttcgactgccctcgcccgcctcaaggcggtgcagcgctgagcggctgacccaaatccacagcacccaggggactgcgctgcctccgccaactggagtcccgcccgcctgctgctgagcggcaggcaggtggtggcggtgccgcgctgtgccccatccaatccatcctatcgatgccgtccaggacttgccctgccttcggacttttctcagcagactgcatgctgatcgccaccctccggcctgccttccccctcttctctgggcttgctgcctccctggcaacagggctgcggctgcccgcctcagtttctcccaatgcgattgccccctcacagcctccgcagctccccacctgcctagcctcactatgtttcattgccacccgctctgccccccacacgagccgctccttcatctcaatgc

SEQ ID NO: 7701 - DNA, 596 bp, Chlorella sorokiniana
  unsure (1)..(596): unsure at all n locations; Clone ID: LIB3602-071-Q1-K1-D3
cccggtcgacccagcgtccggggctgcatcttccccgagtgctggnagaatacagcggcgtgcagttcggcgaggccgtgtggttcaaggctggcgcccagatcttcgctgacggcggcctgaactacctgggcaactccggcctggtgcacgcccagtccatcgtggccaccctggtggtccaggtgctgctgatgggcgccgtggagatctaccgcgccaacggcgagggccccaacggcttcggcgagggccaggacaccctgtaccccggcggcgccttcgaccccctgggcctggctgacgaccccgacaccctggctgagctgaaggtcaaggagatcaagaacggccgcctggccatgctctccatgctgggcttcttcgtgcaggccatcgtgaccggcaagggccccctggacaaccttctgcagcatttggaggagcccggggagttcaacttctacgccctgtacgccaactccctggcgtaagcagcttgtttggagcacctgcggcggccgaggcggcggcgctgagctggcgcaaagcgcggttggcgaccgccgccgcctcacgctgttgcccttgaccct

SEQ ID NO: 7702 - DNA, 395 bp, Chlorella sorokiniana
  Clone ID: LIB3602-071-Q1-K1-D4
taaaaaaaaaaaaaaaaaaaaaaaaaaaaaaaaaaaaaaaaaaaaaaaaaaaaaaaaaaaaaaaaaaaaaaaaaaaaaaaaaaaaaaaaaaaaaaaaaaaaaaaaaaaaagggggcggccggttttgaggaggttccacaagtttaacttccgcggtgcttggcaacggtaatagctttctttttatgggtgccccctaaattgtaatattcactgggcccggtcgtttttacaaacgttggggcctggggaaaaaccttgggggtttccccacctttaaatcgctttgcagcaaatcccccttttcccccagttgggtttattagccaaaaaggcccgccccgttccccctttccaaacagttgcccaccctgattggcaaatggaacccccct

SEQ ID NO: 7703 - DNA, 588 bp, Chlorella sorokiniana
  unsure (1)..(588): unsure at all n locations; Clone ID: LIB3602-071-Q1-K1-D5
cgcgctgaccttcgaccanctgcaaggcctgacgtatctgcaagtcaagggcacgggcattgccaacacctgccccactctggacagcggctcctccaatgtcaaggacctgaagcccggcacctacaagctgggcaagttctgcatggagcccaccagcttcaccgtgaaggaggagtctcagttcaagggaggcgacgcggagtttgtccccaccaagctgatgacccgcctgacctacacgctggatgagatgagcggccagttcaaggttgacggcagcggcaatgtggagctcaaggagacggatggcatcgactacgcccctgtcaccgtgcagctgccaggcggcgagcgtgtgcccttcctcttcagcgtgaaggagctggacgccaagggcaatgctgatggctttggtggggagtttgtggtgccctcctaccgtggtgccaccttcctggaccccaagggtcgtggcgctgcgactggctatgacactgctgtggccctgcccgccgctggcgacgatgaggagtacctgaaggagaacatcaagtcggccggcgcaatgaagggccaggcagtgtt

SEQ ID NO: 7704 - DNA, 550 bp, Chlorella sorokiniana
  unsure (1)..(550): unsure at all n locations; Clone ID: LIB3602-071-Q1-K1-D6
gccctcttgcctacagcgagcacaggggcaaccatgaccaanaagcggaggaacggagggcgcaacaagcacggccgcggccacgtcaagcgcgtgcgctgcgagtcgtccgccgccatggtgcccaaggacaaggccatcaagcgcttcatcgtgcgcaacatggtggacgcctcggccatccgcgatctgcaggacgcctgcgccatcgacggctatgcgctgcccaagatctaccgcaaggtctactactgcgtgtctgccgccatccactccaagattgtgcgcgtgcgctccgtcaaggaccgccgcaaccgcgagccgccccgccgccccggctttggcgcccgccccgagcgcaagtgagcgtcggcatggccgcagcagcagcagccgctgaggagcagtgagggcggcgctctgcagccgcgcctcgtcctgcgatgagtcagcaccgcggggccgcccggcgcacggcacgccacccggcaggcagcttatttatgtgcgctgggccgcgcgccggcgccccgtgtaaatcgcgatatgc

SEQ ID NO: 7705 - DNA, 587 bp, Chlorella sorokiniana
  Clone ID: LIB3602-071-Q1-K1-D7
tactgcccgtcatcgtgacccgcggcaacaacgtgtacggcccccaccagttccccgagaagatgatccccaagttcactctgcgcgcttcccgcggcctggacctgcccatccacggcgacggcctggccgtgcgcagctacctgtatgtggaggatgtggcagacgcgtacatcaccgtgctgctcaagggcacggtgggtgagacctacaacatcggcacgcagaaggagcgcagcgtggtggacgtggcgcgcgacatctgcaagctgttcaaccgcgaccccgacaccaccgtcaagcacgtgcgcgaccgcgccttcaacgaccgccgctacttcatctgcgacaagaagctgctgaagctgggctggcaggagaagacgagctgggaggaggggctgcgcaagacggtggactggtacctgcagaatgccaaccgcgagtactggagccacggcgacatggagctggcgctggacgcgcaccccacgctgcagcagcccgtgtttggcagcgccaacctggcggtgcacctggcgtagtgtcgtcggccggccagcgcggcaaggcgtgccccattcagt

SEQ ID NO: 7706 - DNA, 580 bp, Chlorella sorokiniana
  Clone ID: LIB3602-071-Q1-K1-D9
ctgctgggggtgtctgtgcgagcgatggaggacgccctggcggggctgaagcgcggcgcggtgccgcagccgcccgccatgccaaccttccaggagctgcaagcggcggtgggcttcccagaatattacgctgaggaggcacgctacgctgtgcccgctgcgtctgctgcgcccgctgcggtccccagcagcagtggcggcggcagcagcagcggcagcggcatcgctccgagcagcgtggcggcgcaggcagcaagcgaggcatcgggtgttgagccggatgcagtgctagagccgggctccagccgggagcctgcctcagatgcatcctcgggcaccattgatctgtacagcggcagcggcaatggcgacagcggacggtacggcgctcgcgacccagcagaccgccgagcgcagtggctgcgggtgaaggtgaccgacaccaagagcaagacgaccacacttgacacacgcttcccggcaggctttctgaattccgtggccactttcattccggctgtggccggcgtggatctggaggggctggtgaagcaggccaccggcgatgagagctgggagc

SEQ ID NO: 7707 - DNA, 122 bp, Chlorella sorokiniana
  Clone ID: LIB3602-071-Q1-K1-E1
taaaaaaaaaaaaaaaaaaaaaaaaaaaagaaaaaaaaaaaaaaaaaaaaagggcggaacgatataaaggaaaacaaaaattacagacgcgctgcttgcaaaggatctaagttttctttcgg

SEQ ID NO: 7708 - DNA, 164 bp, Chlorella sorokiniana
  unsure (1)..(164): unsure at all n locations; Clone ID: LIB3602-071-Q1-K1-E10
tctttcttatgtgcgccgccggcgatgccagccagtccgctggcctgcacccaagcggcgcggccctctctgcccacatgcatgccctctgtatgcctgcagctaccacacatgctcagttggcgcccgtctgctgactctactcgtccacacgntcctccaac

SEQ ID NO: 7709 - DNA, 518 bp, Chlorella sorokiniana
  Clone ID: LIB3602-071-Q1-K1-E11
ccgcccctctgcagcacgcaccttgtgcaagactgcagcgagaggtcgatggccgccctgctggctgccatgcagcaaggcgcggcagcgggtgcggcagcaggcgtgcaggcggccgaaggcggcgctgcggaggtcgacatggcagctcccatggacgaccttctgtttttcgctgacaaggagggcgacacaactgtgtttggcagggactggcagatggagtctgaagacgaggaggaggaggaggaggaggcaggtgcagccggcctgcgcctgcaggacctgcctggcagcgaggagcagggaggagaccgccggcgctccgttagcctgggcagtgattgaaagtgccactcgtttgctgtgcatgccatgcgccctttgcactcgttcgagctgttgttggttacagcgtgagtgcagactgccaagctcattgatttgggagcttgccagggccaagaacagatgtgcgcaagaatggctcaagtcagttggaaagaagacgtggcaag

SEQ ID NO: 7710 - DNA, 194 bp, Chlorella sorokiniana
  Clone ID: LIB3602-071-Q1-K1-E12
gcgtttcgacagctgcttcccttgcatgctggctctggcacatgccaggctgccaggcggcttattcctcacgccgggggtcctttccaaacccttgtgcccgtgcatttcagcgctgaacatcagcctgatgctctgagagattcctctgctgcaaccttgcatgcaccacatggccttgtaacgagtccatc

SEQ ID NO: 7711 - DNA, 594 bp, Chlorella sorokiniana
  unsure (1)..(594): unsure at all n locations; Clone ID: LIB3602-071-Q1-K1-E2
gntcgctgggcagcacccagtttgacttgcccccctgcgctcacctctcccctgcccaagcacaccaccatggctcgccgctgcggccccaccgctgttctgctgcttgccctggccctgggcgcggcctggggcgttgctgcagatgatgacgaccgctgcgccgctggctggcagccggtggaggcgggcgctctcctggacttggccgcagatgtggccacccgggtgtcggagctagccaatgctaccggcgttctgacctgtggcacgcaggcttctgatgtcgtcgactgcccacgggactggcagggccagacccgccaccgcctgtatctcaacgtctcctgcgaggagtctgctcgtgaggtgattgtgaacctggaggtggacgccctgggcgcagctgacggcaccgtgcggggcattgacgtagatatcgagcgcgtcactgttgatggccagcggattggcgacgacctggaggacctgtttggcgatgatgacccgcgggaggacaccatggagacgctggaggaccgcattgaggacctgttcggcgacgatgatgacaatggggacgacattggcgac

SEQ ID NO: 7712 - DNA, 256 bp, Chlorella sorokiniana
  unsure (1)..(256): unsure at all n locations; Clone ID: LIB3602-071-Q1-K1-E4
tccgggtcccgcnttgcccgccctgcaggtggcagcgggcgggcgcctggtnggctcgcggcagcctgtggagggccctgtccgacttcattcaccccctgcaaacgcgatagtgcgctgcactgctgcacctcccctgcccacccatcacccacgtgatgctgccacccatcatgctgcaccatgctcacatttacttcacgtgccctggaactaaaaccctacctgctgcctgcctttgtaaatgccagagctg

SEQ ID NO: 7713 - DNA, 194 bp, Chlorella sorokiniana
  Clone ID: LIB3602-071-Q1-K1-E5
cccacgccgtccgtaaaaaaaaaaaaaaaaaaaaaaaaaaaaaaaaaaaaaaaaaaaaaaaaaaaaaaaaaaaaaaaaaaaaaaaaaaaaaaaaaaaaaaaaaaaaaaaaaaaaaaaaaaggggcgggccgttttaaaagaacccaagtttacgtccccggtgcttgcaaaggtcttaagtttttttttggggc

SEQ ID NO: 7714 - DNA, 556 bp, Chlorella sorokiniana
  unsure (1)..(556): unsure at all n locations; Clone ID: LIB3602-071-Q1-K1-E6
cccacgccgtccgcgnaaattttggacacagggggaaattcgagccgctgtatcgctccactctggacgtgcgcagcggagagctgccggtgctgccgctcagcatttatggcgcagtggcgatggcacacctgccagacagctctgccggctacgtgagcggcctgaacttcttcatctacaaattcgaccggcagcaagcgggcctggcggggctcagcttcgacgagggcgagtttggcgtgtgcggctacattgtgcagggcctggatgcggtcagcaagctggagagcggggaccgaatcgtggcagcaaaagtggtctccggactggacaagctgactgccacatgacgcagcagccgcagcggatactagctggggcctccgcagcaacactccgaccgtgcaactgcatttttgtcaatgctgtggggctaactgtcttgtgcgcatgccactgtgttagcatgagccgctcccagacttgccgctggctttctttcttgttgcatgaacctccaatgaccttgagattggtaacatgcgcaattgct

SEQ ID NO: 7715 - DNA, 494 bp, Chlorella sorokiniana
  unsure (1)..(494): unsure at all n locations; Clone ID: LIB3602-071-Q1-K1-E7
gtctgggtggacccccagngccgcaagggcaagggctacggcgtgtaccgcttcgccaacaagtacggcgccaacgtggacggctacagcccgatctacacccccgacacctggtccgagtctggcgactcttacaagctgggcaccaagggccttattgcttgggccggcctgattgtggtgctgctgggcgtgggcatcaacctggtgatctccacctctgccctgggccagtaaatggcgacgccccccgcgtcggcagcagcagcagcagccagcagcattcccttgcagctaccccccgagaagacaaaccctcaccctaccctagctggcggcgtcaccatgcgccgctcccttgctttccgtttcactgtccctttcgttcctgcgttcgtttagtggaggaggcccgcctgtgtacctgacctggtggccgcgtttttggttgagcggcttgtagccgcacatctgtattatcagctacgtcaaaa

SEQ ID NO: 7716 - DNA, 593 bp, Chlorella sorokiniana
  Clone ID: LIB3602-071-Q1-K1-E8
cggccgcgtgggggtggctcccatcaacggcaactgggggcagctcgcacagcggcgaacctacccctgaagcttggtcggccgcgtcgggaattcaagctgccaatcgccttgcactccaggttgtgggcggcctctacttgctgcagcctgccaggactgagtcgagatggcccgctgcttgatcgtctgcgtactgctggccagtgccgtggctgtcgcacgcgccgaatgcaacctctaccccgacacgccgctgacgctgtgcggcagcgacggccgcacgtaccccagcctgcgggcggcatgcttggcaaccgccaatcccctgtgcttccagacctgcccctgcccctgggcacccccagtgcccccagtcgttcccgtccccaccctggcgcctcccgctcccgcacctggagaggcgtgccgggcggtggcatgtattgccagcgttgacccagtgtgctgcatgggccgtgagtacagcaaccaatgctgggcagatgcctgcaactttacggcagacatgtgcacccccggcccctgccctcccgtcgaccccgcgtgcacccccagctgcgcctgccccg

SEQ ID NO: 7717 - DNA, 528 bp, Chlorella sorokiniana
  Clone ID: LIB3602-071-Q1-K1-E9
gcgacatcttgctgcatgaggcggtgcccaagaggcacaaggccaatgcaaaacacgtcgtaccaccggaggatggatgccattggcatgccaccaacctcaccaagcccgtacggctggatcacaccgtaacacaccggtgcatcaagtaagcgactcccatgtcgcatataacccctgaccatcagacaatgaatgaatgtgttactcacacgttccatggacaaccattgaggcccggactgccccctttgatgatggcacccatgcagccggtattcaagatccgttcgagccctcctgccccgtacccatgatgtttgagaaagccaaaacgcataacattactgcaatcctctatgatatggctaaccacacttcctgctctggagcaatagcttgacttgaaatatgctgactgcgcctgcagcttagtgagatgtaaccccgcagaaaaaaaaaaaaaaaaaaaaaaaaaggggggcgcgccgttataaaagaaaacattcttaactccgccatcaaacg

SEQ ID NO: 7718 - DNA, 573 bp, Chlorella sorokiniana
  Clone ID: LIB3602-071-Q1-K1-F1
cggccgcgtgggcggacgcgtgggctgcgacttcctggtggtgggccccaagtgctcaccggcctggccaccgcctccaccctggacggatacaacacgggcctgtccgccactgaggaggtgcccggcagcattgaggcgcggctgagcccccagctggcgcaggcggccgagttcacgccccaggagctggagcacatcgacgagggccgcttcaacgagtacctgggcatggctgcgcgcgacctgctgtcggacggcatccagcgcctgattgacgacgccaaccggctggagcctttcttcctcaacctggcgggcggccaggagtgagcgcggcagaccagcggcaagcccgcctgcctgaccaccccctgtggcgcacggcaaacctgcccgcctgaccaccccctgtggcttggggcacacggccggccggccattttcccgcgaggccggctgcacagctgtgctgcctcgtttgcactcatgcgcaactgtttcactcggtttttccgtgtagcgtgcccgtttcatgcatccccgatcctgcatcagtagtgctattcccgc

SEQ ID NO: 7719 - DNA, 571 bp, Chlorella sorokiniana
  Clone ID: LIB3602-071-Q1-K1-F10
tgccgcaatgccaggcggctacgttttaggcagcgtcatgcttgtgggcactgttgctgccgcttctttcccagacccagccagtgtgcgccacaaaacccaaccgacctggccccacctgcagactgccctccctgcatccgcgaggtgctggcgcacggcaaccgcacctgccccatctgccgcacccgtgagcgggctgggaagggggcctggcagcctcgccagtgttatgcaatgtccgccatgcttgcgtaaacgggtgggtttgtcctgctactgcccatctgtccatgtccttctgctcatgcccatccaccttccacatttccgcagcgctgcgcgaggaggacttgttcgatgcggtgagcgaggaggaggcgcggctgaacgccgcggtgcgcagcgcggccgacggcgccaacgccgacttcggcgccaaggtatccatgctgctgtctgagctggcggcgatgcgggcagcggacccgggcgccaaggcggtcgtcttctccagctggggcccgcctgctcaagctggtgggcaacgcgctggaccagaacggcgtgc

SEQ ID NO: 7720 - DNA, 302 bp, Chlorella sorokiniana
  unsure (1)..(302): unsure at all n locations; Clone ID: LIB3602-071-Q1-K1-F11
tgtngaccgcctctccatctccatccgtcaacttaccaccagacctggcttgagatcgccaccaacgcccacttgcctcctgcaccatgcctgctttgatcccacactctgtgaaccgcctttcagtcacacctgttggtatccgtgctgcctgcctgcagtcaccctgcctcccatcccccatctcacaaaggtccaccccgcattccatcgcccgcaaacgcccatgccgattgatcgaacgctgcagctcaccaaacagtgaacttgaagccacctgggtgctgttacaaaaacgccgt

SEQ ID NO: 7721 - DNA, 274 bp, Chlorella sorokiniana
  Clone ID: LIB3602-071-Q1-K1-F12
gcgttcgcaccaacaacaccacacatcatgcttgctcacccggccccgcgcaagcgggactgcgccgtccctcaaacttccccctgccaatactttacccttttccggatgccgagacgatcacaacgcaacaatgtgtgaacagagctgatcaaaaaaaaaaaaaaaaaaaaaaaaaaaaaaaaaggaaaaaaaaaaaaaaaaaaaaaaaaaaaaaaaaaaaaaaaaaaaaaaaaaaaataaaaaagggaaagcattctttaaaatggcatgc

SEQ ID NO: 7722 - DNA, 481 bp, Chlorella sorokiniana
  unsure (1)..(481): unsure at all n locations; Clone ID: LIB3602-071-Q1-K1-F2
ctttggcctgcgctggtagaacaagtcaagatggcgnagggcgacaagcgccaggaggtgtgcacccgcgagtacaccctcaacctgggcaagcggctgcacggcatcaccttcaagaagcgggcgccccgcgccatcaaggagatccagaagtttgcggccaagcagatgggcaccaaggtggtgcgcgtggacgtcaagctgaacaaggcggtgtggagccagggcatcaagaacgtgcccaaccggctgcgcattgtggtgcagcggaagcgcaacgaggacgacgaggactctgaggagatgttctccctggtgaccctggctgaggaccagaacaccaagaagggcgtggttgtgctggaggcgtaagcgcctgccgcacgccgcagcaccaaattgacgtcacctcccaccgcagcagccgcactctcccgacttccctgcacgcgttgcagcagcatgtaacgcgcgcgctagc

SEQ ID NO: 7723 - DNA, 462 bp, Chlorella sorokiniana
  unsure (1)..(462): unsure at all n locations; Clone ID: LIB3602-071-Q1-K1-F3
tgctgntcaagttcctctcgctcatgatgaagcacggctacatcggcgagtttgagtttgtggacaaccaccgctcgggcaagattgtggtggagctgaacggccgcctgaacaagtgcggcgcgatctcgccccgctacgacattgcggccaaggacattgaggcgtgggtgggccgcctgctgcccttccgccagttcggccacatcatcctgaccacctcccagggcatcatggaccacgaggaggccaggcggaagaaggtgggaggcaaggtcctcggcttcttctactgagcggccttgttggatgcgccgcagcagccacggtggaccacagccgtggcggatgcagcacggccggcgcgcccggccgcggtgtttgctgcagcaccggcggcagccctgggtgctgcccccctcttagattgctgcaccgcacggttgtaacagaggttacatg

SEQ ID NO: 7724 - DNA, 473 bp, Chlorella sorokiniana
  unsure (1)..(473): unsure at all n locations; Clone ID: LIB3602-071-Q1-K1-F5
taaaaaaaaaaaaaaaaaaaaaaaaagaagggaaaaaaaaaaaaaaaaaaaaaaaaaaaaaaaaaaaaaaaaaaaaaaaaaaaaaaaaaaaaaaaaaaaagggggggggcttttcagtttttccagttcctacctttcccttccctgcgccggcctcgtttttttttttttttttcctttacttaatttggggggggggggcctttcctttttcggcgtgggggaatggccttgccctttccccacctttttcttctttgcctttgttccccttttcccttcttctcgcgttggcagtaaaaggggacccgggcccgtccctttttctcctttccgttcctcttcccttagctgtgagggtgggtcggccccttccccttgtnactttacccttcggcggctgtggtgttttcccctcccctggcctttcccttttccctggccttggccgccggatccctttcctttttctt

SEQ ID NO: 7725 - DNA, 464 bp, Chlorella sorokiniana
  Clone ID: LIB3602-071-Q1-K1-F6
cagcacttggcggcggcggcggcggcagcggcacagctggtggcgctacaggcggcaacgatgcaggcggctatggaagcacgggaggctacggcggcggcagtgcttacaacccgctctctgcggctgcagcatacggcatgggcggtgcagcggacggcggggaggctggtggctacggcggcagcggcgggtatgggcgtgctggcggtcgcagcggcacaggaggtgctggtggtgcccagcagcagcagcagcgctaccgcccgtactagtgaagcatgggaccccatgtcgtgctgcgcggcatgaccaggttcaatcctgagcgtgtttgcattgctgcatcgactgtttagtggcgcccatgccctggatagcttttcgggcatgggtctgctctgtacagttttgcctgcgcccttcctctctttgacaaacacacgtgttagacgacagttttg

SEQ ID NO: 7726 - DNA, 411 bp, Chlorella sorokiniana
  unsure (1)..(411): unsure at all n locations; Clone ID: LIB3602-071-Q1-K1-F7
tgcagctccagcagcagcagcagcaacagcagcagcagcagcagccgggcgaccggcagtaggcccagcggtaaagcggggatgtcaagttgctcaggcctccctagctccgcctcccctccctcttcttccacctccccctttctgacccgctttcctctcctgcccctcacactacctctctctgtttgacgccgccccctcagagtgcctttccatgcgaaaccaagtgcgcacgtttgaatagccccagcatttgatgcagttgtttcggccgaacaaatgtatgacgctgcctcggaaacagcataaactgtctgctccatgctacgtggctgccgtgatttggctagatgatggatggactgtgtaaagacgatgcagannnnannnnnnnnnnnnnnnnnnana

SEQ ID NO: 7727 - DNA, 581 bp, Chlorella sorokiniana
  Clone ID: LIB3602-071-Q1-K1-F8
ccccgcccgcccggcctgccagctcgctcctgtgctttgattgtgcagcgcccggcgcccgatgccgcagccggcattccctgtctgtgcccccccgctcctcccgtcgcaccgctctcagctgccaccaggccccatgatacgacgccgatgctatatatgccccgcctggcggccctcgtgccccacgcacacccccacgcttctccctgtgtcattgtctctctgtgcccctcagccacctgtcggcggcgcatgctgtgcccccgctcgcctcagcagggcagccaccccaccccccattcttgcctcgtcgcggctgcaacacgccccctcctcacccattcttcccgcactgctggccgacacgcccccatgctatacatcgctttgaattgcccctccatgcctcggccagcaggcaacaacccagccccgacacccctaccccctgtgctgccgcccctgctctcgagcccccgcactgcccatgcgcccccttcgaattgtttgtcctgccctaatcttttcgcatatcaccccgctgcctagccgtctactacccagccccaatgtgtgac

SEQ ID NO: 7728 - DNA, 591 bp, Chlorella sorokiniana
  Clone ID: LIB3602-071-Q1-K1-F9
cgcaggctcctccatcctcatccgctcctacacctggccggagctgcgctcctccctgccctggctcatcggctccctgggcaccgtggcgctggatgcggccatctttgtgcagtggcgcacgctgggccatggcggcggcggcggccccaaggaccacccaagtgatgaggagagcccgctgctcgacccagacgtttagctggcccgcagcgctctgaaaattgggtggcatggcgtgccagctccttctgccatgtagtgcatgccgagagtaccctgtaatcaaccaaacaacaaaaaaaaaaaaaaaaaaaaaaaaaaaaaaaaaaaaaaaaaaaaaaaaaaaaaaaaaaaaaaaaaaaaaaaaaaaaaaaaaaaaaaaaaaaaaaaaaaaaaaaaaaaaaaaaaaaaaaaaaaagggggcggcccgttttaaaagaaccaaatttaacttcccggggaatgcaaaattaataccttttttttggggcccccaaaataaaataaacggcccgggttttaaaaacttggggccggggaaaaaccttggggttccccaattaaatccctttggaaaaaacccccttt

SEQ ID NO: 7729 - DNA, 111 bp, Chlorella sorokiniana
  Clone ID: LIB3602-071-Q1-K1-G1
cagttctgtccatagcttctgtcctgatcgctgctgccactgctgtaccaatgttaccaatgttgacccactgtttgatctgatgtggagctgtgtaacatcatgtatgat

SEQ ID NO: 7730 - DNA, 371 bp, Chlorella sorokiniana
  unsure (1)..(371): unsure at all n locations; Clone ID: LIB3602-071-Q1-K1-G10
gccctgcgggnagcgcttccatacccaccctggcagcgcttgcttgctaggcttgtaccaacaccttgacctgaccagcgttgtgctggcacctcggcggcccgtgttgttggctgccccaattcccctgcctttttgcctccctgccgatagccctgaatagcccttactaccctttgtttctctccctctgctggtgtgcagcagctttttcattttgtggccgccgcagcgccaagctgttgcagccaccacagtgcatgctgaagccgaacgacgcactgtgcaacgcaactctcacacctgtcgattgttcacattgggtctactttttgggatcgcctccctgttacatttaaagcaaggatctg

SEQ ID NO: 7731 - DNA, 520 bp, Chlorella sorokiniana
  unsure (1)..(520): unsure at all n locations; Clone ID: LIB3602-071-Q1-K1-G11
ttccccnctgcagcccgcacttccccgcgcgtggngcgaggtgtggncgcacnaaggtcaggcggtcggtgtatggncgnngctggttccnngccccagtccccaagtcccaagnnacgcagggngnncagcagtgnaggggcggggcnccggcgcatcaacagtccctttggccacggcggctttcgcaaggctggcttttgccatgccccagcgagcggcagaggcannggtagcctcgcttccatttcttggcaccagcccggctttggcagcggcacgccgctcaaagcagcacagcnnaaatgatgaccaggcggtgatgccnaacctcacagtagcngtgtgtnttccangttttgatgcttcggtttttgngaacccagatttttcccactgctcctctcagcccgactcagcccatctgacttgcacccctgcatgctttctggccctgacccatgctcctcggtccatttcattgacacctagcgacttgttacacgcaaaagacanaana

SEQ ID NO: 7732 - DNA, 151 bp, Chlorella sorokiniana
  Clone ID: LIB3602-071-Q1-K1-G12
aaaaaaaaaaaaaaaaaaaaaaaaaaaaaaacggacccgtgggagccaccacacaagtgggtgctgccccggagcccggctttcctgggagggcgttgacctccaaggaaccgttgccatcctgaaaaatgcccgaccgggaaacttcaag

SEQ ID NO: 7733 - DNA, 106 bp, Chlorella sorokiniana
  Clone ID: LIB3602-071-Q1-K1-G2
taaaaaaaaaaaaaaaaaaaaaaaaaaaaaaaaaaaaaaaaaaaaaaaaaaaaaaaaaaaaaaaaaaaaaaaaaaaaaaaaaaaaaaaaaaggggcgggccgttta

SEQ ID NO: 7734 - DNA, 566 bp, Chlorella sorokiniana
  unsure (1)..(566): unsure at all n locations; Clone ID: LIB3602-071-Q1-K1-G3
ctggncctgttcgacgaccgcaaggcccgccaggctggtttcgacatcatctacgaggcccgcgacctggatctgccccaggcgtgcgcgacggcctggcccaggcccgcgagaacctggacgtggccaaggcccgcatcaaggaggctgagaagcgcatcgacgccgacctggacgcctacatcgccaaggcgtactggactgagggccgcaacgagctgcgccgccaggtgggcaccctgcgcttcgacctgaacgcggtggccgacaccctgcccaaggccgccaagaaggaggcgcaggccgccaagaacgagttcctggccgccgtggaggcgctggacctccagctgcgcaagaagaacggggacaaggccgccgctgccctggctgacaccaaggccaagctggacgccgtgatcgccaagctggcgtaagcacccgccagccaggcggctggccggtaccacccggacggccgccgcggcaccccgcagcagcccccttgccagctggcgccccacgcgccggcgcaacgttttgactccctctcgcaccctggtggg

SEQ ID NO: 7735 - DNA, 199 bp, Chlorella sorokiniana
  unsure (1)..(199): unsure at all n locations; Clone ID: LIB3602-071-Q1-K1-G4
gactccccctcccctgnccaaacgtgaccatgcatcctttccctggcatcctttcccccccttcttttcctggcgtgtcgcccaaccgttgcccgggccgcccattctgcggctcgtggcccattcagctgctgctgcggcctgatcgcaccccatctctggcattccgggtctgtatttgctgtaagcaatatgttac

SEQ ID NO: 7736 - DNA, 469 bp, Chlorella sorokiniana
  unsure (1)..(469): unsure at all n locations; Clone ID: LIB3602-071-Q1-K1-G5
gccacgctcaaccagnagttcagcggagccatcatggcgcagagcgagcaaatagagaagctgtacgcggatgcggttgaggccacgcacaacatcagccgcgccaacgtgcagctggacaaggcgatacgcaccaaccggtcggctcgcaagtacatgatcgtcttcttcctggtggcctccctagccctgctgttcctggactggtggaactcgtgagggggcaggaagagcacagtcagccgattgctaatgcaagcggcagtttaggatctctctgcagcagctgcggcagctcacttccaaaccaaacgatctctgccaacccggcagtgccaacggctgctgaaccgaccgccactgcaccttgccacgtgtttgctccatgtgttgcacagcaaaacggttacacgaaccttcaacataacatgtcgatggctgcaaataggcgcggtaaagagcggtttac

SEQ ID NO: 7737 - DNA, 414 bp, Chlorella sorokiniana
  Clone ID: LIB3602-071-Q1-K1-G6
cccggtcgacccagcgtccgctagttctagaacgcgggcggccgctcgcgatctagaaccgcagccatttatgaattggttgaccaagtacgctctctgattcctctattctgcgcacttcccctaagtaccgcttttgactcatttccacctgtcacaacagccgtactagtctccctgcctgtctctcatctttctcattcttcatccccagttcatcgcgctacgtggcgaggcgcgcaacacataaagtgttgcacgcacgtgagctgaatagcgacctcagcggtaaatagtaactataaaaaaaaaaaaaaaaaaaaaaaaaaaaaaaaaaaaaaaaaaaaaaaaaaaaaaaaaaaaaaaaaaaaaaaaaaaaagggcggccgttcaaaaaggggccggcctttttaa

SEQ ID NO: 7738 - DNA, 578 bp, Chlorella sorokiniana
  Clone ID: LIB3602-071-Q1-K1-G7
ctcgctgccggtgtcaagccgcaactggctcacaagcaagctcgaggcagcaggtttctcacggcaggttgccatctgggcagcaaccaacctggcaccgctgccgagcagcggcgatggaggccttggctggggatttgacctgtccgggatagcgcagatgttcaggtcatacgaaggtgcagacctctggccactcttggcgtcacctgctgacggcgtgcagctatcttttgtcaaagctgagcgcagcacattccgttggggtggcaaggatgaagagcgcatacgccagctgggccaccctgtccacctgcttcaaggggccgggcactgggtccacactgataatcctgatggcctgttcgatattctcgcgccatcttttggtagcacgccagacctgcggatgcagcgcagccccagcagggcgcccccggtggagccagtggccagtaacatccgagcgtttcctgctacgacacggcagctgcaagccatgctggagtgaagtagacgtgaacgaatacaaagtgcgcattgtaaaccctgtcaacttaggctgaccgttcagcatt

SEQ ID NO: 7739 - DNA, 590 bp, Chlorella sorokiniana
  Clone ID: LIB3602-071-Q1-K1-G8
gaagcactcggggcatgattgttctttaccgacacggacctgaaagatcccaggcggtgtgtataccttgctggaggcacgattgggctgttagagcgttaagactgggtgagggcagcgcttttacctactgtggggctggagacatccttgcgatcctctggctagctgtgccccgcgacttgccgtgctttccacgatgcctgtgtcattatgtggcctggggcaactacaccttgctgctctggatctatctggattgatggcatgagcgccacattcacgacaatgctgtaccaaccatccgcccatatagccttacgcagctgtcgcgctgtcatttgcgtgctctgctgatctttcagccacctgctccggacattcctagaccagtcttgatatgcaagcaagctttctctcatgcttcaacactcgatctttcttgtattatacagctatgctctcttagcgctgctattatttgttttgtccaatcctgaatctgactcgtgtactattaccaatgactaacttctctatgtgcctcgccgaccaccaaaactcgatccctccggtccagccttcttgct

SEQ ID NO: 7740 - DNA, 489 bp, Chlorella sorokiniana
  unsure (1)..(489): unsure at all n locations; Clone ID: LIB3602-071-Q1-K1-G9
tggngcctgccacgctgtggtgctgtgggcaatcgagaaagcctaccacgatgcatggcacgcccacatgcccggcatgccagcgccctaccaccactatgcagagcggtggggctccctggcctttggagactatgtggatcagctgcagcgccaggcggacgcagcgctggcggcggccagcgcggcagagcggcaggaggcggaggccctgtttgtgcaggtgtgcggcctggagcgcgacttttggtcgatggcctttgacggtggcgcagcgcaggcgtgagcgctggcggcggcacggcggcacggcggcacggcactcttcagtgcatgtgtggcacatgcggctcggacgcaaatcatgatggcaacatgtgtcacactgcgcggtgtgctccatgtgcgctccatgttttctatattgaggtggatcctctttatgaagcaatccaattcggcctgcagcgttgcaagggctggcatggc

SEQ ID NO: 7741 - DNA, 303 bp, Chlorella sorokiniana
  unsure (1)..(303): unsure at all n locations; Clone ID: LIB3602-071-Q1-K1-H1
gggggggggcggnaagggcacgggtgtttttgggcnngcgcccnccnngacgcacacgctgtgccgccgctgcggccgccgctccttccacatccagaagagcacctgtttttttttttttttttttccgcggccanagaccgggtggggggcgggngcgtgatgtgcctcngccgcaagaccaccggcnccggccgtttgcgctccctgaagaacgtgcagcgccgtttccgcaccggcttccgcgagggctctgctgcctagaagatcgctgcctaaacagctggtgtctgcagcttcgcg

SEQ ID NO: 7742 - DNA, 232 bp, Chlorella sorokiniana
  Clone ID: LIB3602-071-Q1-K1-H10
aaaaaaaaaaaaaaaaaaaaaaagggggagaaggaaaaaaaaaaaaaaaaaaaaaaaaagggggggccgaatctaggggcgtccagagtttaggggcgccctgcttgccgacgccctagcttgtcctctcgtgcccccttaatttcatgtcactggacctgtcgtttcaacagccgcccggtctggcgagggcggtggcggggccccaccttggtgcgccccgacctaaatc

SEQ ID NO: 7743 - DNA, 568 bp, Chlorella sorokiniana
  Clone ID: LIB3602-071-Q1-K1-H11
gtggcatgcctggggggatgccaggcctcaacattgagcgctgcagcagatgatgcaggaccccaacatccagcgcatgacccaggcgattgcccaggaccccgtgttcatggagatggccaaggagatgcaggaggccatgctctcacagaacctggaggggctgaacctgggcggcgagggcggcgaggagggcgccgcggcgcgcggccccggcggcatgcccggcatgcccggtatgcccggtatgcctggtatgcccgctatgcccggcgtggaccccagcaagtacatgcaggcgatgcagcgcgtgatgcagaacccggagttcctgcaggcggcggagagcctgggccgcggcctcatgcagcaggtggcggaccccgagatgctgaccatgatggagctgttctccaaccccgacaaccaggcgctgctcaaggccaagatggaggagatgaaggacgacccggagctgaaggaggtgatgcaggacattgaggagaacgggcaggcagccatgatgaagtacatgcaggacgaggaggtgatgagcaagctgggcaag

SEQ ID NO: 7744 - DNA, 534 bp, Chlorella sorokiniana
  unsure (1)..(534): unsure at all n locations; Clone ID: LIB3602-071-Q1-K1-H12
gcgtttcggnagccttcagctgagaaggaggcgtaaactcgtcaccatggtggccgccaagaagacaanaagctcaggagagcatcaactcccgcctggcgctggtgatgaagtcgggcaagtacacgctgggctacaagaccacgctcaagacgctgcgctccggcaaggccaagctggtgatcatctccaacaactgccccgccgtgcgcaagtcggagatcgagtactacgccatgctgtccaagaccggcgtgcaccactacaccggcaacaacgtggacctgggtaccgcgtgcggcaagctgcaccgcgtgtccgtgctgaccgtcaccgaccccggagactctgacattgtgtccggcatgtaagcggcgcagcatggcatgcgtacccgggcgctgtctgagctgggactgcccctgtataagaaacagaggacannnnanaaaaaaaaaaaaaaaaaaaaaaaaaaaaaaaanaaaaaaaaaaaanaaaaaaaaaaaaaaaaaaaaaaaaaaaaaaaagggcggc

SEQ ID NO: 7745 - DNA, 460 bp, Chlorella sorokiniana
  Clone ID: LIB3602-071-Q1-K1-H3
aaaaaaaaaaaaaaaaaaaaaaagagggagagaaaaaaaaaaaaaaaaaaaaaaaaaaaaagagaaaaaaaaaaaaaaaaaaaaaaaaaaaaaaaaaaaaaaaaaattaaaaacaataatttttgcttaattaataaacaatttttttgttgccttttttttttttttcactgcccaaaaattttgttgtggtgggggggtaataaaacccccttacctttccctccttcttccccttgtgttttttttttcctttccctcttttgccgtttgcccttccttttcctccccgtgtggtttttgctatttgtggcccgcccttttttttttttttttaccccccctccccctttttttttaaggctttgtgaccggtttttttcccctttctttccccccaaagtttctttttttctagcgggcgtttcttgccctttttgccgtgcttttttttctcgtt

SEQ ID NO: 7746 - DNA, 483 bp, Chlorella sorokiniana
  unsure (1)..(483): unsure at all n locations; Clone ID: LIB3602-071-Q1-K1-H4
gttgtgtacgaaccccaacacgcggcgagtcgcaccgagnagcagtttgccttcagccagtccacagagggccccgagtacgtcatgggcgagtacgtggacatgacggcggtgcacggctcgcggcggcagcacgacaagctttttttcagccccgaggcgtataacgcgccgccggccgccggcctgctggccgcgctcgcgccgccgccatccaagaagcgaaaaagcgtatccggcgtgcctgtgcccgcggacgcgccgtttgagctcacgtacctcaacgcgcggctgccggtggcgcaggaagacgagctgcagcagatgctgtcggtgctggagcgcaaggagcggatcgtggaggcggagatcaacatcctggagtaccaggaggccaaccgcgaggacattgagaagcgggtggcgctggagaagcggttccaggagctgtgcgaccgcgaggcggcgctcatggccgagatt

SEQ ID NO: 7747 - DNA, 581 bp, Chlorella sorokiniana
  Clone ID: LIB3602-071-Q1-K1-H5
gtcgacccagcgttctgggttctgcaccagtacacccaatctcactttgagggagcagaaagagcaggccgcacggctgtatcggcgcacagcctatggaggcatccgacttggcggctgctgccgcacagctcgagcaagagctggccagccttgttggtcggaatggcggcgggagcgtggcggtgatgcgccacacaatccggctgggtgccgctctggcagcgtccggcagaccacaggaggcctttccattgctggagcaggggctagaggcggctaccgcctgctttgcaagcaacatgccgaggttgcacctggtcaggaaggaagcggcagacggcactacccaagacgcccagcagctggtggcggcgctgggggcgctgcagcgtacaatctgggaagccaaatacttccgctgcctgtgctttgtgagcctgcacgggcctgcgatcgaggagacgtggcatgccagccaggacacatacctggcggtgcgccacgagatgagcgctgcgctcccagagctcgcacgctggagcggcccagctgacccggtggtgcagtgcgcgctgcgt

SEQ ID NO: 7748 - DNA, 206 bp, Chlorella sorokiniana
  Clone ID: LIB3602-071-Q1-K1-H6
cccggtcgacccagcgttcgggcaaccaattttgcagctccacatcccaccccttctgcccctttttttgttgccccgctctgtgcactcctgactgccacatctgtgcccccgcctgtggtgccaacgcgctcgattgttgatgctcgaggcatggtgcaacaagcaaggccacagaacatttttttttgtaagattgccatgtg

SEQ ID NO: 7749 - DNA, 433 bp, Chlorella sorokiniana
  unsure (1)..(433): unsure at all n locations; Clone ID: LIB3602-071-Q1-K1-H7
tacagnagcgcttgtgagtaggacacctcgcccagccaagcctgaactgctcatctgttcttctcaacttctttttaaacgaggtgtggcagccgctgctcgttccgatggagcagcagtggacgccccttcggtcaagactatgcaccaaatgtgcctactgccccccgcacaacatggcgcgcccattcatgtcctacttctttgccccctttctctgcaattgtttcatgccaagaacagttcttctgcattcatggcccgccggcccttctgcattgctaccatgtgctcttctttgattctatcctgtttcttcctgtccaagcccaaagtcttaaccaagtttccacctgcacctacaagcgcttgctgaacagtcgcgctggttacacgctgtggcgcaaacactggttgtaattcaacagcaagg

SEQ ID NO: 7750 - DNA, 574 bp, Chlorella sorokiniana
  Clone ID: LIB3602-071-Q1-K1-H8
gcgttcggccgcgtccagttgagccgcttagttacaccaatcatttcgacgccaggtacggctccaactttatgaaggtgcgggcgctggggctgacccagtacgacgcaatcattctgctggacagcgacgtggcggtggcaggcgacctctcgccgctcttctcgctacccaccgagtttgcggcggtgtgggaccagcccaaggtcctgggcaggtttggcccgcacctccagggtatcaacggtggcatgctgctgctgcggccctgcaaagcagtcatgcggcacatgctggcagtactggaggcccagcccaagctgcgattctcgcatggagcggcagagcaggactttttccactggtatttcaagtacacgggcatgcggctgccacttgagtacaacacgatggcatcagacagcctggcgggcaaccgcacgctgggcgggcgggaccctgttgtggtgcacttcacgcgcaacaagcccttccacggcccgcagcctggccggccagggcaccaattcctgtgcagactcgaagaaatggactgagggtgttgcgccagcag

SEQ ID NO: 7751 - DNA, 599 bp, Chlorella sorokiniana
  unsure (1)..(599): unsure at all n locations; Clone ID: LIB3602-071-Q1-K1-H9
tcgggnanacggcggtgtggggcacggcatcggcgcggacgcgccccaggcagtgcccgcctcgcctccagactacatcgaagagccagacgatgaacccatcattgaggagcctcccgaggtctcggcggcagcccgggtccgcggctttggggcgcagggccggcccgccagccggccgctgccagcggcggcgcgcccgcgcagcaccccgatcgagatcctggacgacgacgacgatgacagtcaagtgctggccagcagcctggggcggcggcgaccggggcgcgtggaggaggtggcagacgacgagcacatgcacccggttggatcagtggaggatgaactgggcggcgcggccgccatggggcggcgcgtgcgccgcaaccggcggcggctggcgggcgaggttgaccgcgatttggagctgctgggccagcggtttggcgtgatggatgagttccagcccgcccccacggcgcagcagcaccaggcgcagcagcagcagcagcgggacgacgatgaggacttcgccgacctgccagcggatgtggacctggaggagcagcgcatgctgatggcggccatccagggcggcg

SEQ ID NO: 7752 - DNA, 188 bp, Chlorella sorokiniana
  unsure (1)..(188): unsure at all n locations; Clone ID: LIB3602-072-Q1-K1-A11
ggcaacatnacgcacagcgggcggggacagcgggcttgctgcggctcggtaccacaatgcacatggcggcgcccgcctgccccgcccaccctccctttcctttcctagtttcagctgccttctgctagtttctcgggctgcattcacgcccaatgcccttcacgcacctctgtaaactggccattcgc

SEQ ID NO: 7753 - DNA, 407 bp, Chlorella sorokiniana
  Clone ID: LIB3602-072-Q1-K1-A2
taagcggccatgaagaaccctgtagctggcggccagcaagaagacgccgctggtggcccgctacctgcacggcaagattgcctatgtgcgcgccgactcgcagtaaacgggcggctccccccgcccccaaagggcaggcgccgagtgacactgctcgtcggcgggccgcggcgcgcgagcctccctgccatagcgcttgaggggcggcttgccatgcccgcgccgccgcccgcacctctgcttgtgtagtttcccgctgctgttctgcttccttccctctgacctctcgcacacataccgctgctccacgattcgctttggcggcgccgcgcccctgctcgccggcattcggcggcggggcgctgcactgcatgcgggcgtgccccctctgtaaggcaggcccatgc

SEQ ID NO: 7754 - DNA, 198 bp, Chlorella sorokiniana
  Clone ID: LIB3602-072-Q1-K1-A3
tcgtggtgcggggcttggcccactgcgaacagtgcagcacctatgccagagagagagaccgactggcccggcccgggaaaatacagaacccacactgcgccttgactatatgtagggcggcgtgcctgacctgcttttccttccatccattctgaccgactctgtctactttattcggcactttgaatgttaatcgac

SEQ ID NO: 7755 - DNA, 622 bp, Chlorella sorokiniana
  unsure (1)..(622): unsure at all n locations; Clone ID: LIB3602-072-Q1-K1-A4
cccacgccgtccggtcggcagcccaccatgggcagcaaggggcgtgcgtttcgcggnctgcagnaaggagtacaagngcgatcctcaaggagccagtaccacagatcaccgcgcacccagcacccaacaacctactggagtggcactacgttctggagggcagcaagggaaccgactttgagggcggctgctatcatggcaaggtcatctttccggcgcagtacccatacaagccgcccagcatcctgatgctcacgcccaacggccggtttgcagtcaacaccaagctctgcctcagcatgtcggacttccaccccgagacgtggaaccccatgtggagcgtgagcaccatcctcaccggcctcctgtccttcatggtcgagacgcagcacaccacgggtgccattagcaccccgcctgccgagaagcggaagctggcgcgcgagtcgctggcgtacaacgtgcgcaaccccaccttcaggaagctgttccctgagtgggtgaagaagcacgaggaggcgctcaaggcggcccagcagcaacaggcgcaagcccagcagcagcagcagcagcagcagcagcagcctcccgagcagcagcagcagctaagtggcgcggcggt

SEQ ID NO: 7756 - DNA, 594 bp, Chlorella sorokiniana
  unsure (1)..(594): unsure at all n locations; Clone ID: LIB3602-072-Q1-K1-A5
tccggngctggntcacgcgacgtgggacgtcaggcgggccgccgtcaccaagcacctggagctgctctaccaggcctcgcagtcgcagtctgagcgcaccaaggtggagcagtgcgagtgctgcagcggctcgggcgagcgcgagtgcggctggtgccatggcacaggcgccatgacggtcggcgatgtgctgtactgcagcgagggcggctgcgcgccttgccctgtttgccgcggcacgggctcctgcaagtgcgaccactgccgcggcaccggccggcgcgcttcctggctgccacttgccccctgatggggcgcctgagcggtgtcacctgtatagttggcgtccagcgcccgtactgtacattgcctgtacctgattaactgtgtttccatgtcagcaagccctgcagcagcggcgggggctcagcaccacccatcccatctgatgcacttcgcagcgccgtgctcgtgtcgccctactctgaacccatacccgaccaccattccctgcccatccatccatctgcccggcgctgccaattttgcttttgcccccatgcgcatgctgcaaccaagctgtggccgctgcac

SEQ ID NO: 7757 - DNA, 441 bp, Chlorella sorokiniana
  Clone ID: LIB3602-072-Q1-K1-A6
tctgaaaaaaaaaaaaaaaaaaaaaaaaaaaaaaaaagggaaaaaaaaaaaaaaaaaaaaaaaaaaaaaaaaaaaaaaaaaaggcaaaaaatataaaaaaatcaataataaaaaaccacgggcttggcactttcttggggtctccctttttgcggccctggttttatccctgtggtcgcccttttttggggggggggggggggacccccttgtcgccacccttacttagtggggtttgggggaaaatcccgttttgtgccacccccttgttgtttccccctgtttccccccttttgccgcttctcccttttttgccccttggcgtccctgccctattgggccttccccccgagcgggctcctttagagtgggccagggctctaggctccctttcggttccccccttttccgttgctttttccctaccgccccctgtctttc

SEQ ID NO: 7758 - DNA, 449 bp, Chlorella sorokiniana
  unsure (1)..(449): unsure at all n locations; Clone ID: LIB3602-072-Q1-K1-A7
cggnacgcgtggngctgcgtnttcacggatggcgggtggagnaatgnncgcggcacaggcgcggctttgcgcagaggagtgttactacantcattgtgnccgcgccacccggnccgccccgcgggcgcctcgtgtccacaggcaccatccagggcgatgacgccaaatcagcggtgcccgccgctgtggcgctgcccacgcggcggtggaccacggacggagccggcacggcgcagtgagcggtggagcagctgaacatgtgtgctgccccctcggcttgggttggcgtaggtggctgcgttgcagcggcggtaggcggcagcgaagcgacagcaaagtttgggcgccggcccgtgcagcactctttggtagcttagcgcgacttagtcttgttttggaggcctgacgcaaggcagaacctgtgatgcattccaagcnnnnnanannaa

SEQ ID NO: 7759 - DNA, 587 bp, Chlorella sorokiniana
  unsure (1)..(587): unsure at all n locations; Clone ID: LIB3602-072-Q1-K1-A8
gtcgacccagcgttcgcccggngctgncgggcgagcggcagcgcaccaagctgaagccgccgcaggtggcgcgcgagggcaccaagaagacggtgttcaccaacttcatggacctgtgcaagtcgatgaaccgcaaccacgagcacgtgctgcaattcctgcttgcggagctgggcacgagcggcagcctggacggcacgcagcggctgatcgtcaagggccgcttcctgcccaaggtgttcgagaccgtgctgcgccgttacatcaacgactacgtgctgtgcaacagctgcaagtcggtggacacgctgctggaccgcgactcctccacccgcatcatgttcctgcgctgccagcagtgctccgcgtcacgcaccgtgtcggccatcaagaccggtttccaggcacgcacggtctcgcgcaagagccagcagaccggctaagcgggtgcagcggcagccgccctcccggcgtggcggcaacaggagcagcagcagcattcgctgggcggcggcgcctgttcaatgttgtagctgcatgcagtttgcacccttgcatgtggctgcatatgtaatggagccatcagc

SEQ ID NO: 7760 - DNA, 501 bp, Chlorella sorokiniana
  unsure (1)..(501): unsure at all n locations; Clone ID: LIB3602-072-Q1-K1-A9
gggctccgctggttgagggagnaatcctgagtgcagaggttgtggagaaggacgggctgccctactacatttacgagctgacccgccaccgcctggtggccgccaccgctacaggcaaccggctgtacatgctgagcgtgaagtgcaacagcctgcagtggcgcaaggcgggcagcaagctgngaaaaaattcgggattccttccgggtgccgcccaaggttgacgtttgatcggcacaagaagcaagattgcaactctcaaattgccgcgcttatatgtccggttgcctttccatccttgctgtgtattcccccaaacgaccgcttgtgcgccttccactgacccaaactaactgctctggacttgctgcccctggcgatttgatgtgtttgttgttgagcgatgccgcctgtgctgcggcagatttcatgcctgaaaccgatttccttgttgatgcacgcctttcatgcggcggtgttaccgtcaacagaataccatgt

SEQ ID NO: 7761 - DNA, 160 bp, Chlorella sorokiniana; identical to SEQ ID NO: 7188
  Clone ID: LIB3602-072-Q1-K1-B1

SEQ ID NO: 7762 - DNA, 96 bp, Chlorella sorokiniana
  Clone ID: LIB3602-072-Q1-K1-B10
taaaaaaaaaaaaaaaaaaaaaaaaaaaaaaaaaaaaaaaaaaaaaaaaaaaaaaaaaaaaaaaaagaaaaaaaatataaaagaaaaaaaaataaa

SEQ ID NO: 7763 - DNA, 600 bp, Chlorella sorokiniana
  unsure (1)..(600): unsure at all n locations; Clone ID: LIB3602-072-Q1-K1-B11
cgctgnaccgcttcgcgccagcttgcagcttctgtcccgccctcttagccccgccagagcgaaaccatgctggccctgcagacttctcgcatcgcggcgcctgccaaggtgcaggtgacccggcggcagcaggtggtcgtgtgcgcgaccgcgcagcagcaggaggcggcggaggcggtgccccggcgtgcggcgattggcctgctggccgctgccgtgctgggcctgagcgcggacgctgcccaggctgtgggcgttgccaagaacggatcccgcgccggctccgagggctacgtgctggagggcaccaagaagcagggcatcagccccaagcgcaagcgggccgtgctggacaaggtgcgcaaggccgccggcaagcagtgagcctcgctcgcaactcacgagcgctgagcttccgtcccggctgcgccactgttccggcgaggcacgcgcagcggcaccctcccttgcggccctgccctgccctgaatgtgaaccagccctggctctgtaccctcttaccgtcttcacttcccgagcagaaaacttgcatcgagactgcgtttttggcacctcaccttgtcctgctgccgcgtgtaa

SEQ ID NO: 7764 - DNA, 602 bp, Chlorella sorokiniana
  Clone ID: LIB3602-072-Q1-K1-B12
gtcgacccagcgttcgcggcatgctgatccatacatggcggagaacgggagggcggcctgaacgcagccactgatgaggatgtggccgacctgcaggtgctgtaccgcgccgccaagcagcgcttcgacgaggaggaggacttcaagacgcgggcgcgtgaggcggtgacggagctgcagagcggtcggcccgagtacctgcaggcatggcagcgcatctgcgatgccagccggcgcgagttccagaaaatctacgaccgcctggacgtgacgctggaggagcgcggcgagtcgttctacaaccccatgcttaagccactggttgaggacctgatggcgcgcggcgtggcggtggagagcgatggcgccaagtgcgtgtttgtggagggcaaggacatccccctcatcgtgcagaagagcgacggcggctttggctatgcatccaccgacatggcggcagtcaagcaccgcattgatgaggagaaggcggactggatcatctacatcaccgacatgggccagtcgagccacttcgacctggtgtttgcgggcgcggagaagcgggatacctgcccaagaccgcaggtccgcatcgaccacgt

SEQ ID NO: 7765 - DNA, 479 bp, Chlorella sorokiniana
  Clone ID: LIB3602-072-Q1-K1-B2
tcggactagtgcctgccccccatctgaacctggccgtccaccaacaggtgggcggtaccaccgcaacttgaaggtgccaagcatccctcctggcagccctacagacgtgtacatgctttaatgtatggcacgccaacgcagcatgctgccatactgttgtcacgcacagcaagttgccgtgctgcggcggtgcacatgcaaggctaggaaaagcgctgttgctcgaactctcaatgcttggaatttgtatgcacgtggaatgcttccaggcgcacgcggacgtggcgtgcagcatggccatgcacaccaagggcgaacgcctgctgaccagatgcgacgaccgctccgtcaaggcatgagtgtgaaccaccatgcttggtcttgccactcgacccaccctttttggcagttcatgtgcggctgctcgttgctgttctatgagtcaatcatgtgccctgtgcaatgcatctgctcctgat

SEQ ID NO: 7766 - DNA, 462 bp, Chlorella sorokiniana
  Clone ID: LIB3602-072-Q1-K1-B3
cccggtcgacccagcgtccgggctcccgccccagttcaagcgcagcctgtccaggctgagctggcggcggctgagctggtgcggcaagaggagcgggggctgccctcccaggacagcggcgatgcgcgcatgatgcagcagctggcgcagctggcggcgctggcggtgggagggggccggcagcagcagcaggcggaggcgggagacctgcacccgcactcgctctagtggacaagcccagttgggccatgtgcacttgcgctgctcctacgctacgtgtcgtgctctggtctcgcccgtgtcctccttgtgttgcccggtgttgcctgctttcacattctttcctgccagctgaacccccttgccaagtcgtccctccaccccgcttgactgcccctgctctgcctcctgcttcgaacaaccagaattattttgacattcactgcaacccagcacagatga

SEQ ID NO: 7767 - DNA, 93 bp, Chlorella sorokiniana
  Clone ID: LIB3602-072-Q1-K1-B4
aaaaaaaaaaaaaaaaaaaaaaaaaaaaaaaaaaaaaaaaaaaaaaaaaaaaaaaaaaaaaaaaaaaaaaaaaaaaaaaaaaaaggggcgggc

SEQ ID NO: 7768 - DNA, 598 bp, Chlorella sorokiniana
  Clone ID: LIB3602-072-Q1-K1-B5
gggcaaggcgagtgaggccgcagaaaaccgcaggttcgctggtggcggtgctgcaaccccaagtgcggcaatgttgagcctgcgcacaccaccatcgccaagggccgggcgacgtgctgcaccaggcagacaagctgtggcagcagggcgcgatgctgtaccagatgaagatgccgcagctgatgccgcaggccgaggcgttcctgcagcagctggcgcagggcgtggacgggcggctgcacccctaccatgcccgcgtcatcgactctctggcgccgctcatcaacctggccctgcggcgcaacgacgcgctggcggtgttcaaccacgcggtcaacctgtgggaggcggagaacgctgtgcaggcgcggtacagcctgcaccagctgcagtacctgtcggccatcatcgacacctcggctgccaaggcgaccaacgcgcagtcggcggtggtcaagcgccagtttgagaagaagctcaaggcggccaagaccactgcagaggagattcgccgcgtgctgctgggcaagaactgaagggtgtagcgcagtacaccacgggctaacatcgcagcaggccggcaccatgtgccgcctgc

SEQ ID NO: 7769 - DNA, 553 bp, Chlorella sorokiniana
  unsure (1)..(553): unsure at all n locations; Clone ID: LIB3602-072-Q1-K1-B6
cgcgggcggctcggggggggggggggagcatttgggcaagctgggcgggggcgcaaccgcctcgctgcagctggccaacgcggtgcatgagggcgcagaccaccctgtgcttgcgtcgctgcagcgcactgtctactccttccgcgtgaaggtgctgggtgggggggggggcgcgtacctttgcaggcancccgccacgctgagcgctctgcgcgctgagctggatgcccccgcctcagcagggcgccccctggtccttgtcctgtgcctgccggcaggcatgggggctgaggagcaggtggaactggtggagggtgcacaggcggcgctggctgctgccgcaccctcccaccttctggtgcacgccgcccgcccgccggctggcgagggcgagcagcggcggcgcctgctggtagaggctgtcgatgcagccgccctgggcgtggcggcccagaacgcggggctgcagaaagctgaccgttccaaccagacggtcaactacaccaactgcgacccgctgtgccataaagctgttgagtggctggagggtctg

SEQ ID NO: 7770 - DNA, 600 bp, Chlorella sorokiniana
  Clone ID: LIB3602-072-Q1-K1-B7
gcagcgcagggccccctggtggtctacggcaacgacgccggcatcagcaaggccttccgcaacctgcccggcgtggaggttgcctccgtggagcgcctgaacctgctgcagctggcgcccggcggccacctgggccgcttctgcatctggaccaagtctgctgtggagaagctggacaagatcttcggcaccaccgagaccgcgtccgagcagaagaagggctacaagctgccgcgccacatcatggccaacggcgacctggcccgcctcatcaactctgatgagatccagtcggtggtcaagccgcagaagaccggcaccgcccgcgccgcgctgaagaagaacccgctgcgcaacctgggcgcgctgctcaagctcaacccctacgccaaggtggcgcgccgcgccgagctgctggccgcgcagaagggcgccaagtcggccaaggtggaggcggcccgcaaggccaaggccgccgcgcgccccgcggtgaagaaggtgtccaaggccttctacagcaccatgatcaccgactcggactacgtgggcgaggactacgaggtgttcagcagctggctgggcaccacccagtgagcgccc

SEQ ID NO: 7771 - DNA, 276 bp, Chlorella sorokiniana
  unsure (1)..(276): unsure at all n locations; Clone ID: LIB3602-072-Q1-K1-B8
tgnagacgatgtgccctctggcgtgaacgccgaggcgatcagccgcgaggactacctgaacgcccccggcgaggagttcaccgtcaagctggacaccgctggcgagtacggcttctactgcgagccccaccagggcgccggcatggtcggccgcatcaccgtgaactgagcgcagcatgctcagcgccgcggcgtgcactgacccatttttgaagcacttgctgtctctcttcggttgactggcctctattcagggtgtaacgctacacacgcatg

SEQ ID NO: 7772 - DNA, 550 bp, Chlorella sorokiniana
  Clone ID: LIB3602-072-Q1-K1-B9
cggccgcgtgggcgagcgcctgcgctttgaccaggcgtgtgccgaggcgctggccatcagcgggcggggcaaccagctgctggaggagacggcgccctggaccgccttcaagaaggcagtgaggaggacaaggtggcagcggcagcagtgctggtggcggtgcttgaggcggtgcgcgtggtggcggtcctgctgtcgcccgtcaccccggggctgtcctcccgcatctaccagcagctaggcttcacgcagcagcagtttgaggcgctgacctgggcggatgcagagtggggcgcgctgcaggcagggcatgccatgccgcagccgcagcccgtcatgcagcggctagagggcgactttgtgacagagcccgcccccgcagcagcagcagcgccggcagctgtggcagccaaggtgtgattgcctcggctcgcccgccagtttcttgctcggtgtctgctcccgctccctcttgactgtgtattctttctgctgcccagcactgtattacatgttcatttgcaattgtttggctgcgttgaatcggtgc

SEQ ID NO: 7773 - DNA, 94 bp, Chlorella sorokiniana
  Clone ID: LIB3602-072-Q1-K1-C1
aaaaaaaaaaaaaaaaaaaaaaggggggaggaaaaaaaaaaaaaaaaaaaaaaaaaaaagaggaaaaaaaaaaaaaaaaaaaaaaaaaaggaga

SEQ ID NO: 7774 - DNA, 200 bp, Chlorella sorokiniana
  unsure (1)..(200): unsure at all n locations; Clone ID: LIB3602-072-Q1-K1-C11
naaaaaaaaaaaaaaaaaaaaaaaaaaaaaaaaaaaaaaaaaaaaaaaaaaaaaaaaaaaaaaaaaaaaaaaaaaaaaaaaaaaaaaaaaaaaaaaaaaaaaaaaacttttttttgaaaccgggaggcgggccgttttgggggatacccaagtttccttcccgggtccttgcgaaggtataacttttttttttgggggcc

SEQ ID NO: 7775 - DNA, 490 bp, Chlorella sorokiniana
  Clone ID: LIB3602-072-Q1-K1-C12
gtcgacccagcgttcgctgcatggacgactctcgcctaagtggtggcaggcgccgactgctgcgaccacgaggttgttgaggtagcgcacggggtggcagcattcgcacctcgtccacctgcgtaaatgcatcgaggtgccacaagccccggtccatgttgttccagctgcccacccagctgctcggactgaacacgtttatgcctgacagtatgctccctggcagtcctaccccccacatacgaccaacaggatgccgtggagagcgatgagccactgaaggtagggagcccactgctccagtacaacggccgctagcccctgacatacagatactatttcatccaacctgtgttcttgtgtacccgctagaagggtctgaaccctaaaagctgggactcgtaccatgacagcgtgactacgctcaagctgcccttgttgagtgatcaacacgtggcgcccgcggcggcaacacagctggccggccgct

SEQ ID NO: 7776 - DNA, 509 bp, Chlorella sorokiniana
  Clone ID: LIB3602-072-Q1-K1-C2
gggcacactacatttacacatcgttgaccctttggaaaagcagcgaggcatcaagcctgtgctgcacccccacaaaaccgagctgggcaagcgcataaattacagggcttgcaggcgggggggggctggctgccgcgggaaggcagagcgctggttgctggctggctggtcggttcaggcaaagcagattcgtcctggaagcgctggtgttgtttgctacacgggtggcggtagaccctccatcaattcatttggagcgagggggcggctcctccagcggggcagccgttcgctgccttgcacagccgccaaggctgcctggcccagctggctgctgccttcacggctgccaaggctgccttacacggcctgtgcgccctcggggaagggcacgcccagctccagcagcttggcaaatgcagaggcaaagtcggcgaaaaacttgtcctcgttcttggcgtactccagcgtgtagggcttgaactttttgtcccaaagcatccacatgt

SEQ ID NO: 7777 - DNA, 573 bp, Chlorella sorokiniana
  unsure (1)..(573): unsure at all n locations; Clone ID: LIB3602-072-Q1-K1-C3
ntctcgctcgagcccgcccctggcccagcccagccgcgccgctccagcgcgctccctcctcgacccttacgctctgcgcccctggacccgacccaaacgcagccatgtccggcaaggcggtgattcgggccacgcagatgttcaccaagaccggccaggccagccgcgtcagcctgggcaaggagattgccatcggcctgaccctgggcgcgtccctcggcttctggtggcagacttatcactgggatctggcgaagaagtgggacaactactacaaggcgctggaggcccagaagtgagctgctcgctggcagccggtgcggcgcgatgatagcatagcgcgccaagcaaagcagttttatgtgcttggcgcaacccacgcgccctgcgccggcccccagtttttgcttgcttncggcggcgcggcttgcgcagagcggctgagccgcacgccgcagccgcgcgccgcatgatgttccccagcacttgtgcctctcgcttgatgcccccaacgacccacgctgtacccgcccagccctgtttcgggagctgtttgtaacgtatgtacacaaa

SEQ ID NO: 7778 - DNA, 593 bp, Chlorella sorokiniana
  Clone ID: LIB3602-072-Q1-K1-C4
gtgaccctgggccccatccgcagcatcaccgacaacaacttcgcgcccagcccctcccccgtccccatgcccgccatggagtctgccgcaggcgatgccgccaagcagacgcccacccctgtttccattggggccaccgatctgaccgccaccgtggctctggagtatgctttcgacaactgagtgagcgagagagctggaatgacaaggcaggcgagcaaccgcccctagccctaaggctacgcgaacacacagcccacaaccacggcttgcaagcggcttgcaagccttcaaccgcccctcggcaactgagcacaagcgcagtacccccagcgacctgagcaagggctctaagcctggtctgaggcgcggctgttgccgccacagtgcatcatcctttttcgccaccttcccgtcacaccaccatcataagcgccgccctaatatcagcctcatgtctgtatgccatcagcactccctcggctgcacctcgcaccttgcacctccgcttggccgctgctacttgcggcctcacacattttgagttttgcaccagtcgcgggcccacactcatgccagaggtttgcgggccc

SEQ ID NO: 7779 - DNA, 603 bp, Chlorella sorokiniana
  unsure (1)..(603): unsure at all n locations; Clone ID: LIB3602-072-Q1-K1-C5
ggtccgccttcccggtcgacccagcgtccgcggncgcgtggggngaagctgccacctggcaccaccaaggcggagctgggacaagcgcaggccaagctcaatctgcatcgcgacgatgtgtcgcctgaggcgcagcgcctggtgctgcccgacggtcatgatgcggcgccgctgaagggcaaagccctgctgcccgcagaccagtgcaagcacatggacaaggaggtggccaagatgaggacggagggcacagcggcggtgaacaacgtgatcaacgccatgtggaccaagttcggcaccgccgcgcgggcactgacaatgaagcagtggcgcgcccaagtgcgcagcgcggggcggcgcttcatggcgcagcagaagaagaaagcagccgagggggaggcgcacatcgcgccgcgggcagtgcagaaggcgcagaaggaggaggagcgcaagcgcaagcgcaagggagagaagattgtgtctgtgaagaagctgacgaaggcgcgttgaggcggcggtggcagcggtgcagggccaccatgcgcaggcgggcgctcccaagagcctccgcctttctcacattgcatagattgtaaagcaaac

SEQ ID NO: 7780 - DNA, 336 bp, Chlorella sorokiniana
  unsure (1)..(336): unsure at all n locations; Clone ID: LIB3602-072-Q1-K1-C6
cgtgggnaaaaaaaaaaaaagggagaaaaaaaaaaaaaaaaaaaaaaaaaaaaaaaaaaaaaaaaaaaaaaaaaaaaaaaaaaaaaaaaaaaaaaaaagatataaaaaatttaaaaattacaaaactaaaaaatacaaagggggggctctttttttgggttcccatttttccttcgtttggggggggggtttttctttttttttcgggggcacccttgtttatatttttccttgttcccctcgttttaccccctttgcccttttaaccccttgggttttcccctttttttccctttgggccccttcctctttttccttccgtttgcggtttttaat

SEQ ID NO: 7781 - DNA, 532 bp, Chlorella sorokiniana
  unsure (1)..(532): unsure at all n locations; Clone ID: LIB3602-072-Q1-K1-C7
actgtnntccgcaagaagcctacgaggnagnnggcggcaaccatctcagaatgccagnaggtgcnnttctggnaggtgggnngcgccagctggnngcctgccagnaggcgnagnnctgcaggcggcgccctgggcggtgatgatgctggacgggngaagctgctcgcggtaggtgcagcgaggacgatngcggtgtgccaaagtcgcaactgcgtnngtgtcgggcccgtgcccttcttcctcatccagagtgggngacagcaagnngcctacgcgctctcaggcgcacagnccgcccngaagtgttccaagaggcagtgcagcgggcgttgaaggaggcaggagcaggcagcgcgagcggcacagccggcagtgagggcgcagccaacggcggctcgtgcacacgcgagggctgcacctgagcggccccatctgttgagtgcacattgccaggcgtgcgcgtgcgagtgcgggcagttgagacgagccatgtacatccattccactcctgagtgtgtaatatagcaagccc

SEQ ID NO: 7782 - DNA, 511 bp, Chlorella sorokiniana
  unsure (1)..(511): unsure at all n locations; Clone ID: LIB3602-072-Q1-K1-C9
caggggggggggggcaagattgccattttttatgagcctgctggaccagcagttcatcaaggacacctccaataccgtggcggcgcacatcaaggattcttttgcgggcatcggccaaaacattttgggggggggggggtcccnctacgtcctcngcgaaggcattgagaagaagcaggtcgacttcgcggctgaggtggcggcgcatacgggcggcaagctctgagcggccggccagccctcactgcccccctcctaagcagcaaagccgcccggccctccaggccgagcggcttaaacaacccagcaacgatgcgaggccaaccgcgcccctctctagtctatactcacgtcccctctcctgtccgattttaagccttctgccgacccgctcacagcaccgacaatgccctctcgcactgcgctgcgcggcccagcggcccgcgcctcctcactttttgtgcccagcccgcattggggtggtctgcctatttcattctgggctccctct

SEQ ID NO: 7783 - DNA, 574 bp, Chlorella sorokiniana
  unsure (1)..(574): unsure at all n locations; Clone ID: LIB3602-072-Q1-K1-D1
cggaaacccccgggttcgacccacgccgtccgtaaaaaaaaaaaaaaaaaaaaaaaagaaggggaaaaaaaaaaaaaaaaaaaaaaaaaaaaaaaaaaaaaaaaaaaaaaaaaaaaaaaaaaaaaaaaaaaaaaaaaaaaaaaaaaaaaaaaaaaaaaaaaaaagggggggccccctaaggggacccaaccttccgcccccggcctgccaacttagggggggggggggggggcccccaaaatgaaatcccggggcgggggtcaaccaccgggggggggggaaaaccccgggggtcccccacttaaacccccgggaagaaccccccctttcccccggggggggaaatgcaaaagggcccccccccgaccgccccccccaccgggggccccccctgagggggaagggggcccccccctggcggggccctaaaggcccgggggggggggggttcccccccggggggcccgttcctttggccggcccctaagccccggccctttgggttcccccccctccctttccgccccgggttccgcggggtttcccccggnaagccttaaaagggggggccccc

SEQ ID NO: 7784 - DNA, 575 bp, Chlorella sorokiniana
  unsure (1)..(575): unsure at all n locations; Clone ID: LIB3602-072-Q1-K1-D10
cgcagnaggtaaagagcaaatagccggcgggccagggctaccgcgcgcgtacgcgccacatgttcagccgcggcttcaggcagaagggcttcatcccgctgtccacctacctgaccaactacaagctgggtgactatgtggacatcaaggtcaacgccgcggtgcacaagggcatgccccacaagttctaccacggcaagactggctgcgtgtggaatgtgaccaagcgcgccgtgggcgtggagctgctcaagcaggtcaacgggcggtacatcaagaagcgcatccacgtgcgcatcgagcacgtgacccccagccgctgccacgaggagttcctgcgccgctgcaaggagaacgacgcggcgcggcacgcggccaaggtggagggcaagccgctgccggtgctcaagcgccagcccaagggcccccgcaccgaggccatcatgctggagaacgtgaagatggagaccatcacggccatcccctacgatatcctcaaggagggcgtgctctgagcgtgatcggcggcgacgttccgttgattgcggctgcagcttagtgagatgtaaccccgc

SEQ ID NO: 7785 - DNA, 592 bp, Chlorella sorokiniana
  Clone ID: LIB3602-072-Q1-K1-D11
gcagcaaggacttcaccagcgcgcgggaggcgatggccagcccgctggccaagaagctgttccacatcgacggcgtgacgcaggtgttctttggctccgactttgtgacggtgaccaagagcgaggactatgcgtggtcggtgctcaagccagacgtgtttgccgccatcatggacttttacgccagcggcgagccgctgttctacgagagcgaggcgggcgggccgcacgctgagcacgtcatcaccgaggatgacgatgaggtggtggccatgatcaaggagctgctggagacgcgcatccggccagcggtgcaggaggacggcggcgacattgtgttccgcacctgggaccccgacacaggggtggtcacgctcaaaatgatgggcgcatgcagcggctgcccctcgtccgcggtcacgctgaagagcggcattgagaacatgctgatgcactacatcccagaggtgcgggcggtggaggaggctcctcccgatgagcacgagaacgaggggctcaaggccttccacaagctggagcagcacctgtcaccctgatagtgcggcaacaggatagtgcggcaactaacatc

SEQ ID NO: 7786 - DNA, 568 bp, Chlorella sorokiniana
  Clone ID: LIB3602-072-Q1-K1-D12
cgcgcatcctggtgctgggcttggataatgctggcaagaaaacgattctttatcggctacacgtgggagaggtggtgcagaccatcccaaccatcggcttcaatgtggagacggtgacgtacaaaaacatcaagttccaagtgtgggacctgggcggccagaccagcatccggccgtactggcggtgctactaccccaacacgcaagccatcatttacgtggtggacagctgcgacgtggaccggctgcccaccagccgagaggagttccaggccattctggaggaggaggagctcaaggactcggtcatcctggtgtatgccaacaagcaggacctgccgggcgcgctgagcgatgcacaggtggcggagggcttggggctgacgtccatcacgaaccgcgattggtccatcttcaagacctcggcgatcaagggagaggggctgttcgagggcctggactggctgagcaacacgctgaagacgaagcggcgatagggcccagccgccaccgtggcagctgttggcgggcaggcaaattgacgcgcaggcaccagttattcggctgc

SEQ ID NO: 7787 - DNA, 590 bp, Chlorella sorokiniana
  unsure (1)..(590): unsure at all n locations; Clone ID: LIB3602-072-Q1-K1-D2
cctgcagcagcagctggnagcacagccggcgtcagaggtggccatggagcgcggcagcgacgacgagcgggaaggcccggtggtggagctggacctagcctgcggcctgtttgacttgaaagatgagacggcagtggcagcagcagagcgcgccatgctggcacagggcgtggcgatagaccggtttgagggggccagcaccgatgatagcagcgaggaggatagcagcagcggcagcgaggacgaaggggaagggcaggagcagggcggcatgcgccggcagggcccggcagcagcgacagcggcagcagcagcaggagcgggagcagaggatttagatgccatgcaagaggacgagccagacggcagtgcaggcaccgtggaagcagcagcagcggcggcggcagcaggaggcgggcagcagctagaaggtgcagcgccggggcggcggcgcaaaggcaagcagcgcggcagcaggcggcacgccggcatacaagagctgtcgtgacgcatttactctctcgacctgttgctcttcccgactgcttcactctgactgcttacgatcatcatcaaccaacttctgccct

SEQ ID NO: 7788 - DNA, 516 bp, Chlorella sorokiniana
  unsure (1)..(516): unsure at all n locations; Clone ID: LIB3602-072-Q1-K1-D4
gccagnatgcggnagagctgcttgaagaggagtttgacaccgcgcgcatcatctacaaccgctttgtgtcggccatctcccagaagcccacgatcgccaccgtgctgtccccggacgcgctggagaagacggcggcggagggcgcgcccatcgagcagtacgagattgaggggcccgaccgcgcggagctgctcatggacctggccgagttccagctggccaccacgctgtacaactgcatgctggagaacaactgctcggagcagtcgtcgcgcatgagcgcgatggagaactcgaccaagaacgcgggagaaatgctgggcaagctgacgctgacctacaaccgcacccgccaggcttccattacaacggagttaatagagattatcagtggtgccaccgccctggctggctaagcgctcagggaacgacaaaccagtcaaggcggcaggagtctgcgccacttgcgngaccaagcagggggctgaagcccccagccgcggtgcagcggcctac

SEQ ID NO: 7789 - DNA, 582 bp, Chlorella sorokiniana
  Clone ID: LIB3602-072-Q1-K1-D5
cgccaacgcgccgcgtcaaggcgccacctggtttgagaccggcgccgccatgctcaacggcggcactctcaactggttcgcggtgcccttcgtgaacttcaacaacccgctgcccctgttcgccgtggtggccatcaacgtggccctgatggccgcggccgagaactaccgccgcactgaggacggtcccgctggctacgccccgggtgtgggcaagttcgacgagtctgtgtactccaacatggacaacctgtaccccggcggccccttcgaccccctgggcctggctgacgacccggaggtgctggctgagctgaaggtgaaggagatcaagaacggccgcctggccatggtgtccttcctcggcttcgccgtgcaggcggccgtcactggcgagggaccctacgcgaactggtcgaagcatgttgctgaccccttcggctacaacctgctgaccatcctgtcctctgaggaccgcgccgccgtgctctaagcagccggccccgcctggcgcccgccgccgccccgagtgtagctctgtagtcccaccccttccctgtttccgcttgttcttgtgctctc

SEQ ID NO: 7790 - DNA, 561 bp, Chlorella sorokiniana
  unsure (1)..(561): unsure at all n locations; Clone ID: LIB3602-072-Q1-K1-D6
tgtgggccaccggcgccgtgcgcgccaagtccaagttctggtacttcctgcgcaagctgcgcaaggtgaagaaggccaacggccagatcctggccatcaacgagatctttgagcgcanaccccaccaccgtgaagaactacggcatctgggtgcgctaccagtctcgtaccggctaccacaacgcctacaaggagtaccgcaacaccaccctgaacggcgctgtggagcagatgtaccaggagatgggcagccgccaccgcgtgcgctccccctgcatccagatcatcaagaccgccacgctcacggcgtcccagtgcaagcgcgcggccacgcagcagctgcacgacagcaagatcagcttcccgctggcgcgcaaggtgctgcgcccctcgtcccgcaagttccgcaccaccttcaaggcggtgcgccccaacgtggccatctactgagcgcctcgccccaagcggctcgcggccacactggcggcagcagcggcggcggcggcgacccagcttgtgctctggagcggcgccgctgaggaggagaaggctgcccggccg

SEQ ID NO: 7791 - DNA, 375 bp, Chlorella sorokiniana
  Clone ID: LIB3602-072-Q1-K1-D7
ttccccggccttccaacgcaatacctttgggggggggcccccaaatttaattccccggcccgccttttaacaccgtggggccgggaaaaccccgggggtcccccacctaaaccccctggcaaaaaacccccttttccccagtggggttattaccaaagggcccccccccaacccccctccccacaagtggccccccctaattggcaaagggacccccccctgtaggggccctttaaccccggggggtgggggggttccccccagggggcccgttaccttggccagccccctagcccccgcccctttggttttttccctttctttttcgcccccttcccccggtttcccccggaaggctttaaacgggggccccct

SEQ ID NO: 7792 - DNA, 566 bp, Chlorella sorokiniana
  unsure (1)..(566): unsure at all n locations; Clone ID: LIB3602-072-Q1-K1-D9
tgcatttattgnaattgacaagaacacacctgcaaatcgcagcaggnagacgagnaggcccatgtcggtggcagccagctgcgtgccgccagcaggcactgttgcagcagttgctgctgtttcattccgtcattgctgcagcgccactgccaggtgctgcaggagggctgcgctactgctgtgctgccaagcaacgctgctgagcacgagtgattatcctgcacagctgccacagctgagctggcatgctggcagaggctgccgagctggcgaccaagcaggctgccagctgcagggcgcccgcagggttggtgcacgattgccaagtggaaggcggcgcacagtcggcccatgccggcgcggcgtgcggcggcgtggcggcagctggccttggtcgccctgcacctgtgtcctctcactttgtattacacctgcaggcatcgacacaaccccaggcgccactgctgcacctctgcggactcccactcactcgcacccagccttggcagacccttcgccatgccgaagcccgtgacggatccagcacagattgtgcagcgcccgcc

SEQ ID NO: 7793 - DNA, 562 bp, Chlorella sorokiniana
  Clone ID: LIB3602-072-Q1-K1-E1
gtcccgacggccacaccgatgggtctcctgcgtgcgcttctcccccgtgacccagaaccccatcatcgtgtccgcgggctgggacaaggcggtcaaggtgtggagcctgaccaactgcaagctgcgcaacaacttggtgggccaccagggctacgtcaacaccgtgaccgtctcccccgacggctccctgtgcgcctccggcggcaaggacggcgtggccatgctgtgggacctgtccgagggcaagcgcctctactccctggacgccggcgacatcatccactccctctgcttctcgcccaaccgctactggctgtgcgccgccacccagtcctccatcaagatctgggacctggagtccaagtctctggtggacgagctgcgccccgagctgcccgagcgctccaagaaggcgcaggtgccctactgcgtgtgcctggcctggtccgccgatggctccaccctgtactccggctacaccgacggtgccatccgcgtgtggcaggtgggccgcgccatctaagcagctggccacggcggtcggtctcagctgccctgcgct

SEQ ID NO: 7794 - DNA, 342 bp, Chlorella sorokiniana
  unsure (1)..(342): unsure at all n locations; Clone ID: LIB3602-072-Q1-K1-E10
tgcaggggcaaaacagcaccatgcccaanaagattgaggagattaagaagttcctcctcaccgcccggcggaaggatgcccgctccgtgaagatcaagaagagcggcgacgtgaccaagttcaaggtccgctgcagccgctacctgtacacgctgtgcgtggcggatgctgacaaggccgacaagctgaagcagtcgctgccccccggcctgcacgtccaggagatctgagcggctgccggccggctcagcgcgctggcgggagcagccgcggcgtccccggcagcatcagtgtgatatgccgtgcagcgccgccacccccagtgtaacttgaggcttcgaa

SEQ ID NO: 7795 - DNA, 581 bp, Chlorella sorokiniana
  unsure (1)..(581): unsure at all n locations; Clone ID: LIB3602-072-Q1-K1-E12
gcgttttgctggnacggcagcggcgcgaggagcgcctggcggcccaggaaaggctgaggcggtgcggcgcaagcagatgaaaccgtgctgttcaccgtgcctgaggtggtggaggcgggcgaggaggtgacggtgtactacaaccccaacaactcggcgctgcccggccgcaaccaaatctggatcaagggcggctggaaccggtggcgccacccccgcagctttggcccgcttgagatgactccgcccaaggttggagaccacttccagaccaccatcaccgtgcccaaggacgcctattccatggactttgtgttcactgatgcgttggagtacgggcagtatgactccaatggcggcctggactaccacctgcccatcgagggctctgtggtggaggagccgccgctgcacgtggtgcacattgctgtggagatggcacccatctgcaaggtcggcggcctgggcgacgtggtgactgcgctggggcgtgcagtgcaggagcaggggcacacggtggaggtgctgctgcccaggtacaacttcttctcgcagtcgcccctgctgggcggcacccagta

SEQ ID NO: 7796 - DNA, 560 bp, Chlorella sorokiniana
  unsure (1)..(560): unsure at all n locations; Clone ID: LIB3602-072-Q1-K1-E2
tccgcgcaccgcctgcgcatcgcggtctccacatgaanacgccacactcgggagtccctcgacaagatccgcacccggtgctcgaaacctggcggtcatgccgcccgcgccctctgcccagatggcccccgtgccgccgcagcacgaggcggcggagctgccggaggaggacatggaggcgcggggcggcggcgccgcatacgacgaccgccacgtgcagcgcgagcacgacgtcgctgatgacgagcgcgacgacgtcaaggcggcccgcaacgagcaggcgcacggctccgagcccgcggcgccggtgcccgtcaagcaagagccggctgcggcggcgcctgctgctgccgcccccgccgccgctgcgcctgcagctcctagcagcgacgaggccttcttgaacggcacaaccgccccggcgcccgcagcagtagcagcagcacctgccgcccctgccgcgccagctgtgcagcccgccgcagagcagcccgcggcggcgccggtggcagcgcagcaggcagccgtgcccgcggcggtgcagcagccggcggcccctg

SEQ ID NO: 7797 - DNA, 504 bp, Chlorella sorokiniana
  unsure (1)..(504): unsure at all n locations; Clone ID: LIB3602-072-Q1-K1-E3
tggctcatgctgtgggtggccacgggggtggggctgtggcacctggccaactacatgaggggggtgtggcacttcttccgcttcccgggcgtgccaaagccgccgcgcccgccgcgccagtgaacggccgccagctgctttgggagaaccgctggcgcaaacatacatagtggggcgtggggccacatctagcgcgacactagcttgagccatgtggcaccattcatacgcagtgcgtgaatctttcctcccattcatttgcacttcacacccgcctcgtgcctttccactgccgcccatcaacccctgccattgctgcctgcttgtttgcacagagcatcatcttggttacttcctccaacatctcaaattcatctgtgagcgaatgtnngcatataaaaaataaacaaggccaacaacctactaagctttaggacgaccaccacaataaaaaaaacaaaaaaaatgtcaggaccgctttaaaaaaaaaaaaaggggccgccc

SEQ ID NO: 7798 - DNA, 577 bp, Chlorella sorokiniana
  Clone ID: LIB3602-072-Q1-K1-E5
cccggtcgacccagcgtccgccccttctgccacactggggcaccttcatcctgctcacctggatgcccacctactacaaccaggtgctgggcctggacctgcgcagcagcggcttctactcggtgctgccctgggtgaccatggcggtgtctgccaacgtgggcggctggatcgccgacacgctggtggagcgcggctggagcgtgaccaccgtccgtaaagtcatgcagacgattggcttcctgggccccgccttcttcctgacccgcctgggaggcatcaccagcgtggccggcgccgtgggctgcatgatggcggcgcagggcctggatgccttctcccagtccggcctgtactccaatcacgccgacatcggccctcggtatgccggcgtgctgctggggctgtccaacaccgcgggcgtgcttgcgggcgtgctgggcaccgccgccaccggcttcatcctgcagaacggctcctggaaccaggtgtggggcgtggcggtggcgctgtacctggtgggcactgttgtgtggaacctgtttgccacgggcgagcgcgtgttcgagtgagcacg

SEQ ID NO: 7799 - DNA, 211 bp, Chlorella sorokiniana
  unsure (1)..(211): unsure at all n locations; Clone ID: LIB3602-072-Q1-K1-E6
cctcatgcaccctgnacccatgcctttgcctgtttccgtttccctgccgctccgctctctgaccgctcagtctctccgggggctttgtcgcacgcactcgagttttccccagtggggggcgcggaccatgcgcccgcccctcgagccccattttgtccttcagccactgtagattccaggcccagagtacccccactgttgtaacaattgg

SEQ ID NO: 7800 - DNA, 585 bp, Chlorella sorokiniana
  Clone ID: LIB3602-072-Q1-K1-E7
ccccacccaaccaaccaatccaactcactagcagtgctcgccacgcaaaacaaccctcaaacaagcggcccgccataccaggcgccaaccaacgaacgccccccttgttcttttgcgctcaaacttatttgccacaccgtgcacgtagccgccgcaaaggcggctgcctccctgctgccgcacttgagcctcaatcgatctttgtccctgcccacctcaccgccgccattttgatgcaccgcctgcttctggcccctccctttgtcatgctcctgtgcccaacttgggtggccgccggccggtccccctgcttctgtcctgcgttgggctccccaccctcactcgcacagcagtgccccaacgaacggtgcatccccagaacacttactacaccccgcttgtgtttcattgctttgcacgatgcgctttactgaacccctagctgcgtgggcgccgtccattgaccgaggcgccgtgcagcgggcggataacctcccccccttttcccgcttgtccccctgtgtcccctgctgtcgaactgtccctgcccttccattgtctgtgctttccctgttcagtctgtgc

SEQ ID NO: 7801 - DNA, 576 bp, Chlorella sorokiniana
  Clone ID: LIB3602-072-Q1-K1-E8
cccacgcgttcggccacaacgcctgtcagctggcgcatgggtggaaatcggaagcggctatttcctgtacgacataatcatctgcctgctcaagttcagcgacaacggcttcgaattcatgctgcacgccgtcgtctgctgctccgtcttcctcaccgccaccgccaagggtgtgatgcactactacggggccgccttcctgatgtgggagctgtccaccccgctgatgtatgtccggtggctgatgctcaaggccggcctgggcaaatccgctttgatgccgctggtcaatgtcgccttcatgctcgtcttcttcggttgccgtaacgtgtggggccccatcatgacgctgcgcttctggcgcgacggcggcctgcagctggcctcctccgcccctgcgctgccgcacaccgccatccacgtcattcgggtgatggccatcgcgctcaactgcctcaacacctactggttctctcagatggtccgcattgctgtgaagggcggcaagccgaagcaaaaggcagtgtgattcgttgactcaaaccactctaattgttccacatggccagccacagc

SEQ ID NO: 7802 - DNA, 590 bp, Chlorella sorokiniana
  Clone ID: LIB3602-072-Q1-K1-E9
gtcgacccagcgttcggtgctcaagtggcctgccactttggcaagcgcaaaagcctggcgtccatccgcacctgcacctcgccgtgcagaactgatcaccggcgtgaccaagggctacgagtacaagatgcgcctggtgtacgcccatttccccatcaacatcaacatcgagaacaagggcggcaaggtggagatccgcaacttcctgggcgagaagattgtgcgcgtggtggacatgctgccgggcgtgacctgcgagcgcagcgccgccgtcaaggacgagctgatcctgaccggcaacgacatcgagctggtagtcccgcagcagcgcgctgatccaccagaagtgcctggtgaagaagaaggacatccgcaagttcctggacggcatctacctcagcgagcgcggcaccctggtgaagcccgagtaagcggagcccgcacgttgcagtagaggtggcggcacgagcgcagcagtgcgcagcgctcacgcccgctccggcggagcatcggcggcggcagccggccccagctgcggcgctgcacgccatgtaacgcacacgttggccgagctcgccccatgcctagcc

SEQ ID NO: 7803 - DNA, 592 bp, Chlorella sorokiniana
  unsure (1)..(592): unsure at all n locations; Clone ID: LIB3602-072-Q1-K1-F10
gctgccccgngcggnatgccgccttgcctagcctgccgaggcctcgcgacccgcgctttcacccagtgccaccatgtccagcaccgaccgccctcgcgtgaccgctgagcgcctgagcgacgccgaccagcttgcggagcgcacccacttcatgtccatcggcacgggtgcgaccgccggccgccggccgggcgccgaggaagacgacttcctgcccaccatcgccacctcctcctcaggccccgtcggccccagcagccacaagctgagccgccacagctacggcccctcttccccctgcagcccgcactccccgcgcgtgggcgaggtgtggcgcacaggtcaggcggcggtgtatggcggctggttccgccccagccccaagcccaagacgcaggggcagcagtgaggcggggccggcgcacaacagccctggccacggcggctcgcaagctggcttgccagccccacagcggcagggcaggtagcctcgctccatcttggcaccagcccggctggcagcggcacgcgctcaaagcagcacagcaaatgatgaccaggcgggatgccaacctcacagtagcgtgtgttt

SEQ ID NO: 7804 - DNA, 411 bp, Chlorella sorokiniana
  unsure (1)..(411): unsure at all n locations; Clone ID: LIB3602-072-Q1-K1-F12
acgaagcaaggcgtgcaaggagcatcgctacaaaagctcctaggagcagcagaggcggaggcgtacaagaggagcacgaaggcaaggcgtgcaagaggcatcgctacaagagctccccgattggaagtgcaccctcggagcactgccacctgctaacctacgtgaactccccaacgtgaaaacatcgcaacccatgccgtgaccccccgcccctgcctgaccatatgcccgtgatcccctcacgtcttttccctgctgtgacccaagccccaagtttttgtgccccctgccccggatgccctgcccatctgtcgtggtgtcccgacattccgnatgcaccccgcccctgatccccactccccatctgtccatcccccctccatcccctttgcgctgtaactaagtagtggt

SEQ ID NO: 7805 - DNA, 585 bp, Chlorella sorokiniana
  Clone ID: LIB3602-072-Q1-K1-F2
agcagtggctgcacacttccccatgatgcggtcgccctggacgcgggcaactacaccgccctgctcggcgccctggagctgaccggcctgactgatgccttccggcccgacttcgagggcaccatctttgcccccagcgacaacggctttgagtccctgactgagctggtcacctcccttggcctggcctcttccctggaggaccccgccatcgtcgccgaggtcctgaagtaccacgtgctgaacaccaccgtgaaggccgctgacctcgaggagggcctgaccgtggagaccctggccggcgtgcccctgaccatcatcaagaagaacggcggctgggctgctgaggacgtgaacggccgctctgccaagatcaacaagcccgacatcgctgctggcaaggccatcatccatggcatcaacggcgtgctgctgcccattgagctgcccggcgccggcaacgccaccgagcccgccacccccgaggagactgagaccaccgcccctgagggcactgaggtggctgcccccaccggcgctgcatccggcctgatggcctccgccgatgacgtcgccgcctccctg

SEQ ID NO: 7806 - DNA, 572 bp, Chlorella sorokiniana
  Clone ID: LIB3602-072-Q1-K1-F3
tccgcaactgcctcggggggagcttccagcagcagcagcagccctcggccgggagcagcgtggcctacagggcttatgccaccaccagtgagctggcggcagcgcaggcagcgggtctgacgcccacagtgtacgctatgaagaaccccacccccgatatcacgtacgacaactccaaccacgatgccttccccgtgggcgacccctccaagcgcgccttcacatactttgtgctcaccggcggccgcttcatcggagccgcagccgtgcgcctggcggtcctcaagtttttgctgtccatgaccgctaccaaggatgtgctggccatggccaacctggaggtggacatgaagaacattcaggagggccagaccgtgacggtcaagtggcgcggcaagcccgtgttcatccgccaccgcacccccgccgacattgcggccgccaacgacgtggacatcagcaagctgcgcgacccgcagcccgactcggcgcgcactaaggaccccaactggctgattgtgctgggcgtgtgcacgcacctgggctgcgtgccgctgaacaacgcgggtgac

SEQ ID NO: 7807 - DNA, 596 bp, Chlorella sorokiniana
  Clone ID: LIB3602-072-Q1-K1-F4
ctcctcgcagctgctgtcgcccaccaagcggcagcaggcggcagaggcgcccgcggctccgcccagcatggaagccaacgagcagcgcctggagggcctgctcactcgggcccagggcctgctgggacagcttgcgtccagcgaggcagcagtggcgcagctgcggcagcaggtggcggcgctggaggcggcggcgctggaggcctcggcacggtttgcacaggccaagacggagggcctgcaggcggccgaggctgcacgcaccgcagctgtcgcgccgctgcacgccgaggtatcccgcctgaccgagcgcgtcaacagcctgcagaagctgcacaccagcgagctggccgccatcaaggcatcagctggacagcaggcggcggcggcgcaggcggcagcgcaggctgagctggaccgtctgagtgcagcgggcgcagctgcacggcgggagcgggatgctgagggggcacgtgccgaggggctgaccattgacgtggcccgcctgcaggaggagctggccaagcacacacagcgcgccgcctccaccatcgagctgcagcagcaggagctgggcatgctcaaagagcgcatca

SEQ ID NO: 7808 - DNA, 593 bp, Chlorella sorokiniana
  Clone ID: LIB3602-072-Q1-K1-F5
gccagctcttcagtgccatgtgcatccgcaagcccgcggacaagttcctggacgagctgcaggtgccctacgaggacgagggctcctttgtggtggtgcgccatgccgccctcatgacctccaccctgctgtccaagtgctggccgcccccaacatcaagctgttcaacgccaccgccgccgaggacctggtggtgaagcaggacgagaagaacggcaagtacgtggcgggtgcagtgaccaactggacgctggtgtctctcaaccacgacacccagatgtgcatggaccccaatgtgatcgagtccaaggtcatgatctcctcctgcggccacgacggccccatgggcgccgccggcgtgaagcgcctcatgcgcctgggcatggtggagaaggtgccgggcatgggcgcccttgatatgaacaccgccgaggactctgtggtggaccgcacccgcgaggtggtgcccggcatggtcatctgcggtatggaggtggctgagctggacggctgcccccgcatgggccccacctttggcgctatgtacatgtccggcctcaaggctgcccaggtcgcgctcaactccctgcgca

SEQ ID NO: 7809 - DNA, 429 bp, Chlorella sorokiniana
  Clone ID: LIB3602-072-Q1-K1-F6
tgctgctgcacgacggccgcagcgacgacctggtcaagtccttcttccgggacgtgtacgagctgtagctgcgggtgatgctgaaccccttccacacccccacctccaagatcacggcaccactcttccaccacaaagtgcgccagctggcgcgcaactacttccgatagcaagggttgctcggctgcgggcgaggcgcccgacggccgactcgccagcaacgcctcgacatcaattaccatctggccgcagcctcaaccagccttccaccccgaccgtgcccgtcctgcttcctccgacatgacagtgcctgcagccatgatgcactctccgtccgtcacaatacttgccctcgtgtgtcgttgctggcaacatctcatcctgctgcgtacggcagccataccctccctcttaaatcaaatgcaggac

SEQ ID NO: 7810 - DNA, 74 bp, Chlorella sorokiniana; identical to SEQ ID NO: 648
  Clone ID: LIB3602-072-Q1-K1-F7

SEQ ID NO: 7811 - DNA, 587 bp, Chlorella sorokiniana
  unsure (1)..(587): unsure at all n locations; Clone ID: LIB3602-072-Q1-K1-F8
cccagcgtccgcggccgcgtgggcagctccaaaccgcctcccagcccaccatgaagaagttcctggctattgtgctggccgtgctggccctggcgcagctggcccttgccggcgcgccatgggaggccaacaagacggtccgcgcctgcgtcaagtcgcgcaagtgctggaccaagggcaccaccgccgtgtgcggcgtggatcctcacacgcataagcgcatcggatttcccaacaggtgctactttgcttgcgtcaacttccacgccggtgacacctgggagatcgaccactggtaccaccccagccacaagtgctacaccaagcactggactgcacgctgctcccgctgctaagctatcagcttggcactatttacgcctgctgagcaagcagcgctccctcgcaagcgcctgctgagcaagcagcgcgccacgccctgactgtgcaccggtgcctcgcaccgctgctcctcttgtacgcctccgcctctgctgctcctaggagcacgaaggcaaggcgtgcaagaggcatcgctacaagagctccccgattggaagtgcaccctncggacactgccacctgct

SEQ ID NO: 7812 - DNA, 610 bp, Chlorella sorokiniana
  Clone ID: LIB3602-072-Q1-K1-G1
tatcgagcgcagaaggcggccatgtgccccgacgtggccaaggcgctggcccgcgtgtcgggcggcctctacatcgtgactgcggcgcacgcgggcagcaatgctgccaagtctgccatggtggcctcctgggtcagccaggcctcctttgagcctctgggcctgaccattgcggtggccaaggaccgtgccattgagtcgctgatgcaggtgggcgacacctttgtgctcaactgcctgggcgagggcgagtacaaccaagtgctcaagcacttcctgcagcgcttcccgcccggcgccgaccgctttgcgggcatcggctggcgctccgccggcaacggcagcccggtgctggagtctgccattgcgcacatggagtgccgcgtggtgtcgcgcatggagacgcccgaccactggatctgctacgccgaggtggaggagggcgaggtgaccaagcccgaggcgcgtaccgcggtgcaccgccgcaaggtggccagctactactgagcagcctgccgcaggcacagcataagaataacagatgttgccgctgacgtcgatgcatggcgtcgctggcccgcctggcgggccgcgtgcccacccccttgta

SEQ ID NO: 7813 - DNA, 672 bp, Chlorella sorokiniana
  unsure (1)..(672): unsure at all n locations; Clone ID: LIB3602-072-Q1-K1-G10
gtgtcggcagcggnnncatcaccccgnatgtgatcagggggtggcccaggnagaattctnngaacgatcccaatgnnatgacacctccnnctctcgctcatnnctatgcaaacccgtcaacgaggggatgatannttctgcnntgcgcagnncgagctggnannngacctggcnnggagcggnncaccccaacnnttcaacgtgtacctacnngtgctgagacagacgccgccgcgccgagtctggcagnnggcggcaagggggctttgtnncaccgccgacccatgatcaagaaagcacctgccggcgccnncggcaccgacgtgnctggtgcnnntgcgctgcggccccggncccccatgaacaagngccanntggaggcgcnnacctggatnngctctgggcttacaccnnnacggccagcagttcccagttcttagagcgcagcancctggctgagcgcgcagcattggtagtgcgcggcatgtggagcgcagcatttggagcgaagcatttggagcggcggcaggcatagtgctgcctgctggagcttggacgcagtgcaggaatcgcattgatcttgcgggcgaagcaccccaccccagcagctcctgcccaggcggagcagctgctgcgcccgcctgaaagccaccaacaccctgcgccttgcac

SEQ ID NO: 7814 - DNA, 577 bp, Chlorella sorokiniana
  Clone ID: LIB3602-072-Q1-K1-G11
gcgttcggttgcaggagcatttggggaatcgagttcggctcgaccgaaccgcgaacagccaaccagccaccatgctgatctccaagaagaaccggcgcgaggtgtacaagtacctcttcaagagggcgtgctgtacgcggagaaggacttcaacctgcccaagcaccccgagattgatgtgcccaacctggaggtcatcaagctcatgcagtccttcaagtccaaggagtatgtgaccgagcgctacgcctggcgccacttccactggttcctgaccgactctggcattgagtacctgcgcgagttcctgaacctgccctccgagatcgtgcccgccaccctcaagaagagcacgcgccccctggagcgcgagggcgcgcgcccgccccgccgcgacggccccccccgccgcttcggcgaccgcgagggctaccgctccgagaaggcgggcgcccccggcgagtaccgccccgagttccgcggcggcttcggccgtggcgccgccccccagtaagcgtccgcttcctggagcagcgccccctgggctcggcaggcggcggcgggtgcggcggccgcg

SEQ ID NO: 7815 - DNA, 426 bp, Chlorella sorokiniana
  Clone ID: LIB3602-072-Q1-K1-G12
gtggggaagcggagaaaggggggggggggggggggggggagaagaaaaaagggggggggggggggggggggggggggaccttcctgaggaaaaaaacccccaaaaaggggttttaggcaaaaaaaagggtcaaaagagaaaaaaacctcaaaaaattcccggggacccaggggggccacccgggaaaaaaaatgcaaaagggggggggcacccactgaaaggcgaagctaaacaccgacgggcaaaatttgggggccaaccaaaaaaaccgggaacaaatttttttgcccaaaaaccccggaaacccctttatgggagggggaggcccccctttagaaaaaaaaagcggaaggccgcccccccaggggaaaggggatttcggggggacaccccccctagcgaaggggggccttccaaaacaaaaat

SEQ ID NO: 7816 - DNA, 585 bp, Chlorella sorokiniana
  Clone ID: LIB3602-072-Q1-K1-G2
cgacccacgcgttcgcgaccccattgtgggtggggcagtcaccagcccgcccatcagcatgtttgaggtggacggcaagaagagcaaggtgtactgccagaacctgtgcctcctgtccaagctgttcctggaccacaagacgctgtactacgacgtggaccccttcctcttctacgtgctatgcgagaaagacgcgcagggctaccacatcgtgggctacttctccaaggagaagaacagcgcggagggcaacaacctggcctgcatcctcacgctccccgcgtaccagcgcaagggctacggccgcttcctcatcgcctttagctacgagctgagcaagaaggaggggcgggtgggctcgccggagcgacccctctccgacctgggcgcggtctcctaccgctcctactggacgcgcgaaatcctggaggtgctgcgggagcacaaggcctcgctgtccatcaaggacatcagcgagcggacggccatccgcaccgacgacgtggtgaagacgctggaatcgctcagcctgatcaagtactggaagggcgaccacatcatctccgtcacacagaagattgtgga

SEQ ID NO: 7817 - DNA, 376 bp, Chlorella sorokiniana; identical to SEQ ID NO: 7243
  Clone ID: LIB3602-072-Q1-K1-G4

SEQ ID NO: 7818 - DNA, 550 bp, Chlorella sorokiniana
  Clone ID: LIB3602-072-Q1-K1-G5
aaaaaaaaaaaaaaaaaaaaaaaaggaggaagaggaaaaaaaaaaaaaaaaaaaaaaaaaaaagagagaaaaacaaaaaaaaaaaaaacaaaaaataaggctccacgttttaaagaaccctaaataacgggcgcctggcttctcgtgttcccaactttcttttctccgttcttcccccccctttttttgtggtggggggggggggcatcacccctctctgtggccccctttttcccccccctttacttggcttaccccgcggtttccctgccttcgccgatcgccattccaacccgtttccccccctgggtgttttccggaagggcccctgccgtggcccttttgcccccgctttctggccctgttcgtctaatggctcccccccttttggcccccccttttccccccgttttttgggctttccccccagtttcccccccttcctttctggccctttctccccgtgtttttagggtggttttccttcttttgcccccttttcgggcgcttctccccggttgccttttaatggggggcccccttttgggtc

SEQ ID NO: 7819 - DNA, 571 bp, Chlorella sorokiniana
  Clone ID: LIB3602-072-Q1-K1-G6
acaggcgtacatgcatcgcaacgactggaaggctgccatccgcgcctgacgccacttgcggccgtattctttgacaactctggcccgccgcgccgccctccccgggggcggctgccccggcgcgcgacccaaagactctgcacagctgctgggcccgtctgcgtgccctacgcatatacacacccggtttttccagaccatttggtttttccacggcctagcgccgtgcctcctgagatgagggcccgtgccgccccccttgtgtacccgcttttgtagaagcctggcgcggcgccgggggtgctcgccgcctggcgtgcccccggtgccccctctccgccggcccccgcctgtaccctagcgaattcccaccccacactggatcgcacgcagttttggatgcgctggactagaatccatagcgtctctatcccctttgccgctctggcgccctttttgtgcatcccacccccatcaaatctcatccgacattgataccgccctgattttgtgagtgatcgaatgacgaagaatggggttgcatggtgtaatcggatagcgtcgccaaaaa

SEQ ID NO: 7820 - DNA, 599 bp, Chlorella sorokiniana
  unsure (1)..(599): unsure at all n locations; Clone ID: LIB3602-072-Q1-K1-G7
ggnagcagctggcctgggngctccaacgcggcgcgctcggcggtgactgtgcgcgacgtggaccccacggccccgctgggcgtgcggcgcggcatccagacgcagatcgaggtgcgggagcacgagacgggctcccactccgtgctgctggtgaacaccgtggaccggccaggcctgctcacagacattgtgcgcgtgctgaaggacatcaacctgaacgtggtcagcgcggaggtggacacgattggccgcaacgcctttgaccgcttcaacgtcacctaccacggcgagccgctggaggagcccatggcgcagctggcggtgaacgcgctgcagtactatctcagccagggcgaggtggagaaggagtggagcgagtcgtactgagcggccctgcctgctcggccggggtggctcacaagggactcttaccagcatgcggcgccgccgccgccgtgcttttgcagttcactccctggctttgccgcacccggcttctggccccccgacccgncctcaccccgtctcacacccccgccgcaatccatagtttgagcgagtcagctgggcgttcacattcccaatttcagtgcccgctt

SEQ ID NO: 7821 - DNA, 162 bp, Chlorella sorokiniana
  Clone ID: LIB3602-072-Q1-K1-G8
tccgaaaaaaaaaaaaaaaaaaaaaaaaaaaaaaaaaaaaaaaaaggggggacgactctaaaggagacaaaaaataacaaacacgaagcatgcgaaaaaaaaaaatcttattatagagtgacctaaaaaacaatacactgggcgcgcggtgtttacaccgcg

SEQ ID NO: 7822 - DNA, 73 bp, Chlorella sorokiniana
  Clone ID: LIB3602-072-Q1-K1-G9
aaaaaaaaaaaaaaaaaaaaaaaaaaaaaaaaaaaaaaaaaaaaaaaaaaaaaaaaaaaaaaaaaaaaaaaaa

SEQ ID NO: 7823 - DNA, 434 bp, Chlorella sorokiniana
  Clone ID: LIB3602-072-Q1-K1-H1
tccgttttgtgcggccgcctgccacatggtgttgggcacgagcacgagcaccagctgcttcccgtgctcacagctgtgcggccctgtattctcccaatccactgtagtgcgcctgccccttctctgcctgtgcaactggtccttttttttttttctgcatgtcagcctctctggtgcgggggggacacccttctcccagcacaccccgctctgcacctcctcccacttctttgcccggcatctgtttgttcttccccgcccatcttcgggcgcacccttgcattctcatgtaccatccagttagccagcagccgtgcgcccaactgccggcgccgcccctcccctgttgcatgcatgctgtatcgatccctgcactctgtaccaaatgaggtttttgcccccgcctatttgccggactgtaacatagagcacgc

SEQ ID NO: 7824 - DNA, 186 bp, Chlorella sorokiniana
  Clone ID: LIB3602-072-Q1-K1-H10
tcggcgtcccccaaacgctcgtctctctcttcctacctcctgcatgctgcagcaagctatacatggccgttcagccaccgcatccccccttttttgcccccctagtgtccttcgtcccctcgcgtgcgtcttactaccgatacctgctgtaccaacaaaacccagccatgtaactgaccgagtgca

SEQ ID NO: 7825 - DNA, 59 bp, Chlorella sorokiniana
  unsure (1)..(59): unsure at all n locations; Clone ID: LIB3602-072-Q1-K1-H11
cccgggtcgnacccacgccgtccgtaaaaaaaaaaaaaaaaaaaaaaaagaggagagag

SEQ ID NO: 7826 - DNA, 500 bp, Chlorella sorokiniana
  Clone ID: LIB3602-072-Q1-K1-H2
ggcctgcatggctcgcgctctccgccctacggcgcgcctgacaaccggtgcacgttcccgtgcaaacagctgtatggcattggatgcctcaaatgcaaccagtggaagtgcttggttacggacacaaagtatgccaaaggccgttgatcagcgaacaaggaatgaggagaaagcagctcgagcggcatgccaccgatgcccgttgcatggtgccgtggatgcggccactgctattgagaccacgccgacttccattgtgtatggtgcacgactgtccgaataagaccccattccttcacacgggctgcccaaacttcatgccattccacttaccttttcatgtacctcgtcaagtcaaccttgctcacgattttcatttagagggctgtggcacgcctcgcatgccctgccctcttgccatcacatcacactgctccacccctttgccgccatcatcttttcttgagtattgttggattcaatcgtaaaccaggtcagcc

SEQ ID NO: 7827 - DNA, 603 bp, Chlorella sorokiniana
  Clone ID: LIB3602-072-Q1-K1-H3
cccggtcgacccagcgtttcgcagcagcggcatcgccggcgccagcagcagtcgggcacagctttggagcagctgctgctgtcggagcagcctttcctggaggcttgcaccttggcaatgcatgtggtcgacagcatgcctatggaggtgctgacgtttcttgccatcctgtatggcagcgccgcgacggtgcagaggtgtctgcagcccagcagttgcccaaaagcggcgcgcttgctcctcacggcactaatgagcaaacttgctgaaggtggactgcccgagagggatgcggttggcattgactggctggcgctcctgctggcgcacaagcccggcttctttgtgcaattcatgcccttcgtgaaagctgctcgtgcggggcagccaatgccgcatgacatcgtggaatcctatgaactcctcttggtgcacatggtgcagcagctggcctcggccctcgccaccggccggctgcccgacagctgcgactttctgttcaaacacatggagcagctgccgcgcaaggcagccaccctgctgctcgccctgctgcgcgacctacgtggcgagctgcgcgctgcgtgccgggcagcagtgaca

SEQ ID NO: 7828 - DNA, 374 bp, Chlorella sorokiniana
  unsure (1)..(374): unsure at all n locations; Clone ID: LIB3602-072-Q1-K1-H4
cccggtcgacccagcgtccgtcccgcgtccgccggtgcccgcctgcgacgccagctagccaataagcgtcgacttcaacaaatgaagtctggcttgccgggccaccccggcgcgtgccgcccacccaacacctgctgtaccctcaccccatactgtcttccctgtttcctgtgtgccgcttgacgctgctcttgtgggctacgcttgctgctgacccctgcctgcttcccttgcactctttgctgcgaatgcccttgatgccttcccagtctgcctcccaagaacccactccgtgctttacttgtaccaggatgtaaacgtagtcgggcccaaaaaaaaaaaaaaaaaaaaaanaaaaaaaaaagggaanaaaa

SEQ ID NO: 7829 - DNA, 339 bp, Chlorella sorokiniana
  unsure (1)..(339): unsure at all n locations; Clone ID: LIB3602-072-Q1-K1-H5
cctgnaagnaccaaagccattagcagtacccgtaaacgtaaagacgatgccatacgtgcttctcactctgaaactgagccaggccaatccactccatgccagccagtaccgtgcttgcagttttgcgcttgctgatacaattttgcaaggttgagcaccgctgtcaacttatcttgtgttatctatgtgggactcgcaagctcccttaccccagctctccacccgtcacctccgtccaatgccgctcagtagatttaccttctgttcactccgtcttcgttcccagtaaacctagagtcccacctcctcttgaaatacagccctgtaagatccggatgc

SEQ ID NO: 7830 - DNA, 475 bp, Chlorella sorokiniana
  Clone ID: LIB3602-072-Q1-K1-H6
cacctgcctccacgtcacccttcatcaaccctcacccaacccatccacctgccacccatccactcaccttccctccgccacaacctctgccacccactcaccacccatcacccgctcaacgccctccatgcaccatcctccccatccaccaaatctgccaccccaaacgcacgtccgccgctgcaccacctgccgccccctcacccgcacccatcttccacccgccacctttcctgccgctcaccgccgcacatcctacctcccacacctcactccatgtccacccttcacccgcgcttcacacagcggctgctgccatgcaaagctgctgccaaacccatccatcatgctcgcacacccactcacccacacgtccaacgtatccagacccattttcaaggcccgactgtacagtgccttttgcgtccttatgccgatctggtaccaggacttaatgtgtaacaaatggtatgtt

SEQ ID NO: 7831 - DNA, 608 bp, Chlorella sorokiniana
  unsure (1)..(608): unsure at all n locations; Clone ID: LIB3602-072-Q1-K1-H8
ggtcgacccagcgttcgcttgggttggggtagaacactagnaacagctcaagagccgcccaagttcgaccccaacgacatcatcgaggtgtatgtgcgtgccaccggtggtgaggtgggcgctgcctcttccctggcacccaagattggccccctgggtctgtctcccaagaagattggtgaggacattgccaaggagacggccaaggagtggaagggcctgcgcgtgacctgcaagctgacggtgcagaaccgccaggccaaggtcaccgtcatcccctccgcggcagccctggtcatcaaggcgctcaaggagccggcgtgcgaccgcaagaaggagaagaacatcaagcacaacggcaacctgacgctggaggatgtgtatgaggtggcgcgcgtgatgcgcgaccgcagctgcgccgccaccttctcgggcaccgtcaaggagatgctgggcacctgcgtgtccgttggctgcactgtggagcacgaggacccccgcgacatccagaccaagattgacgagggcgaaatcgtgtgccccgaggcgtgagcacgcccccggcacacagcagcagcggcctagcagcagcagtgtagctgtcatgt

SEQ ID NO: 7832 - DNA, 411 bp, Chlorella sorokiniana
  unsure (1)..(411): unsure at all n locations; Clone ID: LIB3602-072-Q1-K1-H9
tcgcacaggtcaggcggcggtgtatggcggctggttccgccccagccccaagcccaanacgcaggggcagcagtgaggcggggccggcgcacaacagccctggccacggcggctcgcaagctggcttgccagccccacagcggcagggcaggtagcctcgctccatcttggcaccagcccggctggcagcggcacgcgctcaaagcagcacagcaaatgatgaccaggcgggatgccaacctcacagtagcgtgtgtttccagttttgatgctcggtttttggaacccagatttttcccactgctcctctcagcccgactcagcccatctgacttgcacccctgcatgctttctggccctgacccatgctcctcggtccatttcattgacacctagcgacttgttacacgc

SEQ ID NO: 7833 - DNA, 261 bp, Chlorella sorokiniana
  unsure (1)..(261): unsure at all n locations; Clone ID: LIB3602-073-Q1-K1-A1
cggccgcgtgggcgggccgccaccctgctggacctacatttcattttgcttgttcgacaagggatgcagcctggggcatggctgcttgccactcgtttgattgaaccgaccctcccatccctcttggtcccgtcccaatcctgttccgtcatcaccatccgtctgtccttcccgtctccgcacactgctccattgtttttgtctgctagcgttccacatccccatttcattgtacctgcctgcttgtaagcttacgcgtna

SEQ ID NO: 7834 - DNA, 73 bp, Chlorella sorokiniana
  unsure (1)..(73): unsure at all n locations; Clone ID: LIB3602-073-Q1-K1-A11
ccggngtcgacccacgccgttcgtaaaaaaaaaaaaaaaaaaaaaaaaaaaggggcgggccgatactaaaaga

SEQ ID NO: 7835 - DNA, 602 bp, Chlorella sorokiniana
  Clone ID: LIB3602-073-Q1-K1-A12
cgtttctaaaaaaaaaaaaaaaaaaaaaaaaaaaaaaaaaaaaaaaaaaaaaaaaaaaaaaaaaaaaaaaaaaaaaaaaaaaaaaaaaaaaaaaaaaaaaaaaaaaaaaaaaaaaaaaaaaaaaaaaaaaaaaaaggggcgccctttttaaaggttcaaattttacttccccttccttccaactttttattttttttttggggcccccaaatttaatttaattgcccgtttttttaaaacttcgtgacttggaaaaacccttgggtttcccaaatttattccctttgaaaaaattccccttttccccagttgggttattaccaaaagggcccgcccctttcccctttccaaaaatttgcccaccctaattggcaattggacccccccttttaccggccctttaaccccgggggttttggggtttccccccaggttaccctttaattttgcaagccccttagcccccgtttttttggtttttttcctttcttttttcccccctttcgcggtttttccccgtaaagttttaaatgggggcctccttttagggtcccatttaagtgttttagggcccttgaccccaaaaaaatttttttgggggg

SEQ ID NO: 7836 - DNA, 591 bp, Chlorella sorokiniana
  unsure (1)..(591): unsure at all n locations; Clone ID: LIB3602-073-Q1-K1-A3
cccggtcgacccagcgtccggctggcctgccagttggcgctggnagacccctctcccggcatgccctggggccgcgcacgcttccaggtcaccgcatactacgcgccccagtttgcggagctgcggcgccgctgcgtggcgggcggcgaggctgccttcctggcctcgctgtcgcgctgccgcaagtgggcatcacgcggcggcaagtcggccgcctactttgcgcggtcctgcgacaagcggtacatcatcaagcagctgtcccgcagcgagcggcagtccttcctggagtttgcgcccgactacttccgctacgtggccaccatgctgcaccgcggccaggacacctgcctggccaagatcctgggggtgtaccaggtgtcggttcaatacagcggcgggcggggggcgcccagcggccccgcctggggcggcaaggagggggtgatggacttgctggtcactgagaacgtgttctatgaccgtgaggcgcaggtggctcgcatctacgacctgaagggcagccagcgggaccggtacgcagccgacgaccccaccgctgctggcgcagtactgctggatgagaacctg

SEQ ID NO: 7837 - DNA, 102 bp, Chlorella sorokiniana
  Clone ID: LIB3602-073-Q1-K1-A4
tttaaaaaaaaaaaaaaaaaaaaaaaaaaaaaaaaaaaaaaaaaaaaaaaaaaaaaaaaaaaaaaaaaaaaaaaaaaaaaaaaaaaaaaaaaggggcgggcc

SEQ ID NO: 7838 - DNA, 415 bp, Chlorella sorokiniana
  unsure (1)..(415): unsure at all n locations; Clone ID: LIB3602-073-Q1-K1-A5
cgctgacgccacgccgccctgtgaagctgggcgctgacaacggcgcgctggtgttcgacccctccaacatcaccatctccaaggcgagtctgtgacctttgtgaacaacgccggcttcccccacaacatcgtgttcgatgaggacgatgtgccctctggcgtgaacgccgaggcgatcagccgcgaggactacctgaacgcccccggcgaggagttcaccgtcaagctggacaccgctggcgagtacggcttctactgcgagccccaccagggcgccggcatggtcggccgcatcaccgtgaactgagcgcagcatgctcagcgccgcggcgtgcactgacccatttttgaagcacttgctgtctctcttcggttgactggcctctattcagggtgtaacgctacacacgcnnna

SEQ ID NO: 7839 - DNA, 402 bp, Chlorella sorokiniana
  Clone ID: LIB3602-073-Q1-K1-A6
gcgttcggctagctgcacgctaggctgcacggcggtccggcatgcgcagcgcgacctgcagcacgccggagaccgccgccacgcccggcacgccccttttccctcgcgactgtctgtttgctgcacagttgtgtccaagctgccccaccggcgtctccttgatttgctgattcttatagatctgtgtcgcttcagcacagcccgcctgcaactgtgaggcatagtccccatccgcggctgcggtcaagactacctccgccctgctcgtttgtaacgccgagatgggcaaaaaaaaaaaaaaaaaaaaaaaaaaaaaaaaaaaaaaaaaaaaaaaaaaaaaaaaaaaaaaaaaaaaaaaaaaaaaaaaaaaaaaaaaaaaaaaaaggggggggcgcgttttaa

SEQ ID NO: 7840 - DNA, 514 bp, Chlorella sorokiniana
  unsure (1)..(514): unsure at all n locations; Clone ID: LIB3602-073-Q1-K1-A7
cggncgcgtggngagcggagaacggagggcgcaacaagcacggccgcggccacgtcaagcgcgtgcgctgcgagtcgtccgccgccatggtgcccaaggacaaggccatcaagcgcttcatcgtgcgcaacatggtggacgcctcggccatccgcgatctgcaggacgcctgcgccatcgacggctatgcgctgcccaagatctaccgcaaggtctactactgcgtgtctgccgccatccactccaagattgtgcgcgtgcgctccgtcaaggaccgccgcaaccgcgagccgccccgccgccccggctttggcgcccgccccgagcgcaagtgagcgtcggcatggccgcagcagcagcagccgctgaggagcagtgagggcggcgctctgcagccgcgcctcgtcctgcgatgagtcagcaccgcggggccgcccggcgcacggcacgccacccggcaggcagcttatttatgtgcgctgggccgcgcgccggcgccccgtgtaaatcgcgt

SEQ ID NO: 7841 - DNA, 476 bp, Chlorella sorokiniana
  unsure (1)..(476): unsure at all n locations; Clone ID: LIB3602-073-Q1-K1-A8
gcggcaggtcaanaaaaactcctgccccngacagnacgccgggcagtgctacctggaagtgaagatccagaccgcggatggcgagtcaacaactgtgtacgtggccgaccaccagtgcggagccagcggctcgtacctgggagacccctcagattcctgctcctcgtgaacgggcccggattcgcggcctcaaatgtgtgttttaattgtccgtgtttgtgactccaccatcagctacagcatgtgcagcagcggcagaagctgccgccggctgcgcagtttgccatgcgtcggcagcgccctcactccacaaccatctcagctccatcaagctctgacttttacgtggtcaccctaccgtgctttgtttacccgatcgtgacatgattcatgcatgctctgtccaccctctggagaaccgcctggcattttcggttgacctgcaagacgcccatgttaaagtattgtacananna

SEQ ID NO: 7842 - DNA, 465 bp, Chlorella sorokiniana
  unsure (1)..(465): unsure at all n locations; Clone ID: LIB3602-073-Q1-K1-B1
ttctgccatgttgccgcaggcgtggagacagcaactatgctgaggactgtggctgcgagacagtggtgatgggatcgcgcgggctgggcatcaccaagcgcgcgctgttcaacctgctggccgtgggatcagtctctgactatgtggtgcaccactccaagtgcaacgtggtgattcacaaggaccccagcgcggtgaaggcggccgcgggcagcagctcggagtgagagctcttctgtgaatggaaagcggtgaccattcgaagcggcgtggcatggacgcactctttcaccgcgcggcgtggttcggcaccgtctagtcgctgcactctggtctcggtctgtccatgtgggccactctggatgggccatgttcacacattccctgtaaccaccaccagcaaaaaaaaaaaaaaaaaanaaaaanaaaaaanaaaaaaaaaaanaaaaaaaaaaaaaaaanaag

SEQ ID NO: 7843 - DNA, 591 bp, Chlorella sorokiniana
  Clone ID: LIB3602-073-Q1-K1-B10
tgctgccccgacgctgcaaggctctcaacaccaatgacaactgcctgcactgcggcaacaagtgcactggtaccaccaactgctgcacctccagggctgcaagtcgtgcgctgcgccgaactgctgtgacgtgggctacggctgcgtgagcccatgtaccacctgccagagcaccggcggcaaatgcgtctcgggcacctgcactatgccgggcaccgtgctggctaccggtacgtgcagctaaatgttgagcgtgatagcgccgccgaagcccccactagctggctcggtggctctgtggtcatccaagtccccaagatgatgccctgccagtgcaacggcagcaagcagttgccacctcgtttcatacccctacttgcgtacctgtacatctagttgattgcgtgatgccctgatttcctttcctgccctgcttgctttcgtctttttccaggaacccatgcatcatatgctaccaagcagccagcgcttggtgccccttccccatttaagcgcagttgcacccaagtgctgactgtgccccctttgtttgcacacgcaacaacccctcctgatttctgtacagcaatc

SEQ ID NO: 7844 - DNA, 444 bp, Chlorella sorokiniana
  Clone ID: LIB3602-073-Q1-K1-B11
gcgtgacggcagcgcgctttgcccgcctgcgggacgagcacccgctggcctttggctccaagccaaggcggctagggcgccatggagaaggcgctgcgagaccgccaggcaggcgtgcgctgggtgtatgccaagcgggccagcctggccaacgggaacatcgcctatgatgcgctgcagtggcagccgttcgagccgcgtggctgagcccccacattgtctagtgtttgtctggccttcattctccaacccctgtgatagctggacccggccccttgtgttagctgctcgccacaccccttgtgatagatagctggacccgccctcctcccctcttcctgccggctgcaatgccgcgtacttactgacccctgctcagccgacttactgaccctgctcaacgaccaactctagcgtttgtacatttgtaatgacagggcttgt

SEQ ID NO: 7845 - DNA, 526 bp, Chlorella sorokiniana
  unsure (1)..(526): unsure at all n locations; Clone ID: LIB3602-073-Q1-K1-B12
gcgttctggctggcgcccngaaacctggcgggtgcacgcgccaccacggcatcagacgtgttcagctacggcgtcattctgtacgagctgctgacgtggacggtgccttggggcggcgctgacttctgggagattgtgagcgccctcacgcgcggcgagcgcctgcccatccccgaccggccctcgctccccggccccgacacgctgcgctttgctgggctggcgggctatatcgtgctcatgcagcgctgctgggcacacgagccggcgcagcggccggggttcgaggagattgtgcagtgcctgcggcgcctgctggaggaagcgcccgcttgatcgatcacgagaagaaagagaagcgccacagggggatttcattgggcaacgccaaacacacttttcagtcctttttttccacgaatttttgcatcaaactttagctgtaacgcagcgtaattnanaaaaaaaaaaaaaaaaaaaaaaaaaaaaaaaaaaaaaaanaaaaaaaaaaaaaaaaaaannnnaa

SEQ ID NO: 7846 - DNA, 335 bp, Chlorella sorokiniana
  unsure (1)..(335): unsure at all n locations; Clone ID: LIB3602-073-Q1-K1-B2
ggtcgacccagcgttcttgcgatcactgcggnanagaagaagagagcgcgtacggcaagctgcgtgtggagcggatgaacgcccgcatggtgggcgtccgcgccaagcgcgccgccgaggctgctgctgccgagaaggacgcgtaagcgccctgcgcgcagccgcgactggcagccgcctgtgcggccgggggcgcggtggcggccggcgacgcggcggggggcaggcgatccccaggcccgcccgctgtggagcgcagcgcagcgcagcgcagcatgcatgccagttggccagccgtgcgcgctgccgcgcccctgtaacacacccctgaagtt

SEQ ID NO: 7847 - DNA, 602 bp, Chlorella sorokiniana
  Clone ID: LIB3602-073-Q1-K1-B3
gtcgacccagcgtccgcgagtggggcgtgtggactacctgctgcccggcgcggcgcgcacgctgtcggcctgcgcccgcctggcgcaccgcctgcgcatggaggtgctgctggagcggctggacctgcgcatggaggccgcggttggctcccaccaggcaacgctgcagcggctcatggactggacgcaggtggctgaggagtgcgggctgaagcggctgtggactaagtgcatccgcgagatctgtgtcacgctgtcgcgcggcaagaagggcgtggggccacgcacgacgtccagcaaggacctgcagggtgcgctggctgcggtgcctcccccttcggacaacatgcacacggcggtgcatgacgtggccctgctgaaggacctgagcttgaaggccaagctgagcatcatggccaccctgctggcctcgctgcgccgccagccgggagaccccagcgagctggtgccgccggaggcatgcctggcatctgcactgccggccatgccgctgccacccctacctgagcttgagatggagcagtgagcggtccggccatgagcagcgagagccgcgaccacatgagaggggctgctgaatg

SEQ ID NO: 7848 - DNA, 452 bp, Chlorella sorokiniana
  Clone ID: LIB3602-073-Q1-K1-B4
aaaaaaaaaaaaaaaaaaaaaaaaggggggggaaaaaaaaaaaaaaaaaaaaaaaaagggggggaaaaaaaaaaaaaggggggggcgcgccttttgtgggcccctccttttccttcccgccgtgcggcccggccgttgtgctcttttgtttttggtggcctctctttttctttcactgcgcggcgcctttttttggggggggggtggggtgctaaaacccccgggtggtccccccctctttttgccttttgggagcagatcccccttttttccccggcgtggtgtcgttcttgaagggggcgcgccccagtgtcgcctttcctctccctggggcgccgccccgtggggtggagggggggcccccctgtcttggggcgtttcccccgccgcgggtggggtgtttcctccccgggggcgccccttttttgtgggctctttccccccctcccctc

SEQ ID NO: 7849 - DNA, 589 bp, Chlorella sorokiniana
  unsure (1)..(589): unsure at all n locations; Clone ID: LIB3602-073-Q1-K1-B5
caagcacaagnaagtcgnnggcttccacattgacccctaccacggcgacgagaatgcggagctgatggccgacttcttcgagcgctgccagcgggaccccaaccactggaccaagatcagcgaggcggccatggagcgcatcttctcgcggtacacgtggagcatctacgcctcgcgcctggtcaccctcagccacatctacacgttctggaagcacgtgaccagcctggagtcgcgcgagaccaagcgctacctggaaatgttctacatccttgagatgcgccgcctggtgtccaagatggcagaggaccaggagcgcaagcggcaagcgcagcaccagaaggaggagcagcaacaaccagggcagcaggcggcggggcacccagccacgccagagctgtagccaccgctgcaccaaatttagccaaatcgtgatatctatccctgctaatctgctgcgctgtccccgctcccgccttgcccgctttgtctgctgcccatcagatgcccgaggtgggccgggaggaggagggtgaggagcaggccggagtggatggagtgcccaaggtcggctttggcgccatgtgaa

SEQ ID NO: 7850 - DNA, 587 bp, Chlorella sorokiniana
  unsure (1)..(587): unsure at all n locations; Clone ID: LIB3602-073-Q1-K1-B6
tccgcgggcaagnacctggcctccgccagaacacctacccctcgctcgtcggcctggagcgctcccgcgagattgcggacgagctgattgaggaggccaagtcgatgctggccacgtacgaccccgccaaggccgccccgctctacgccctggccgagtacatccgctcccgcaagaactgagcgctgctgagctggcaagctggctggcagccagcaccacgcagcacggcacagcatggcgtggcactgcgccacgccacagctggcgatttgcggcacccggcgccagagggcctggctgggcccctgcactgcgccgcacgtgggcccagcagccgacccggtgaggcgctgaccgcccccattctaccgcctccattgaggccgtccttccaaatcgtattacggcaacagcaacccacagcggaactcctcgcaccctacatgtaccaccaaccacccgctgcagccctcccccgccgcctgcacagccagcaaaaacttgcctgtgcagacggcagggtcggccgcggccctcttccctcctctttgctgttctttgccctgagctattcgcgctgctgt

SEQ ID NO: 7851 - DNA, 602 bp, Chlorella sorokiniana
  unsure (1)..(602): unsure at all n locations; Clone ID: LIB3602-073-Q1-K1-B7
ccctgttngagtcacccatcccgtgttcacccccaaaccgaccacaatggctctgtccctcaggtgaccgccactttcggcggcaagaccaaggctggcaccaaggccggcaccaagaaggcacccagaagcaggccaccaccaagaaggctgcccccaagaagtcttcctctggcgccagccagtggtacggccccgaccgccccaagttcctgggcccctacagcacgaacttcgtgcccagctacctgaccggcgagttccccggtgactacggctgggatacctctggcctgtcggccgaccccgccaccttcgctcgctaccgcgagatcgaggtcatccatgcccgctgggccatgctcggcgccctgggctgcgtcgtgcccgagctgctggacggcaccaaccacattgcctggttcaaggccggcgccgagatcttcggcgacgacggcatccagtacctgggcatccccggcctgatcaacgccaagtccatcgtggcgaccctgatcgtgcaggtggtgctcatgtcgtatgttgagggctaccgcgtcaacggcggcccggccggcaccggcctggacgctgtctacccc

SEQ ID NO: 7852 - DNA, 459 bp, Chlorella sorokiniana
  Clone ID: LIB3602-073-Q1-K1-B8
tccgggcggcagtgcatccagcagcgatggcagcagcgccagcagcggcggcggcttggcaagcggcggtgcggggctgggcatgggcccaccggtcgggtatgcacacccccgtggaatggccctgcctgttgtggcgcgagttgtcagccgaggcaagctgagcaacctggccagcgactttggagggctgtaggtgttcgttggggcgagcattggccacaccgacccttgcagggtggctgaggcgctgcatcaagtgcaggagcgcctgccgcccatgtgacctatgatccgaccgacttgcagaactgcacactgaaatcctgagggtgcccctcgtgctgagatgccatccgaccacactgttctacactgttccacactgtcatacagaatgccatgctatttcttactccggcccgtcttctgtgacatgctcctcatcatgctcctcat

SEQ ID NO: 7853 - DNA, 582 bp, Chlorella sorokiniana
  unsure (1)..(582): unsure at all n locations; Clone ID: LIB3602-073-Q1-K1-B9
acggccccaccaatacggcgcgccaggcacctacaactacctgattgatgccatcctggacgtgccgcgcacgcgccnagagtacatgcgccgcctgcgcaccctcatggacgcgttccagcccaccggccgcctgcagcaaatcatcacccagatgcacgacgccatccgcgacgaggccaagcgcgatgcggccaagtggcagaacccaggcgaccccgaccgcggctaccagcagctggtcagcgagcaggtgcccatgcggcagcgccagctgtacgagacctacggcccccgcggccccatccccctcatccccgacgcccagccctccagcttccagctgaccatggggcgggtggagccggggccagcgggctacgtggaggtgcgcaaccccaacgactttgcggtggacgtgtctggctacgcgctgcgcggggcagtcaactttgtgtttgcgccgggcacagtcatccccgcccaggactcgctgcacgccgccgccagcgtgggccagttcaagcagcgcagcggcggccagggcgcgtttgtggtgggtccgctgcagggccagctgct

SEQ ID NO: 7854 - DNA, 621 bp, Chlorella sorokiniana
  unsure (1)..(621): unsure at all n locations; Clone ID: LIB3602-073-Q1-K1-C10
gtcccacncctgcctccaacgnntcacccttgcancagagcccctcacnnccaacccatnccacgnctgccacgccagtccacgntcacctnntccctccnngccacaannnctctgccacnnccactcnnaccacccnnatcacccnngctcaacnngccctccatgccccaccatcctncnncccatccacncnnaaatcnnngccacccnncaaacgcacgtgccgcgcgcggtgcaccacnnctgccgnnccccctcacnnccgcacccccatctnntccacccnngccaccnnnttcctgccnngctcaccgnnccgcacatncnnctacctnncccacannnctcactccnnatgtccacccnnttcacccgcgcccttcacaccanngcggcnntgctgcccanntgcaaagnnctgctgcncnnaaacccatcnnncatcatgctcnnngcacacccnnactcacccacnnacgtccnnnacgtatccagaaccccnnattttcaagggcccccgactgtacccagtgccttntnnttgcgtccttnnnatgccgatnnctggtacccaggnaacttaaatggtgtaacaannnatggtatgttnnnnaaaaa

SEQ ID NO: 7855 - DNA, 257 bp, Chlorella sorokiniana
  Clone ID: LIB3602-073-Q1-K1-C11
gcgttcgccgcatgcacattggggaggcttgccagccagctgcgacgaaagcatattgtggtatgctgtattcctgcgtttagcccttagtacctgcatcgcatgcctacggttgtttgcaaaggcatctggttgcatatcagtcgatgtgagatcagtagagaaaaaaaaaaaaaaaaaaaaaaaggaaagaaaaaaaaaaaaaaaaaaaaaaaaaaaaaaaaaaaaaaaaaaaaaaaaaaaaaaaaaatataaaa

SEQ ID NO: 7856 - DNA, 575 bp, Chlorella sorokiniana
  Clone ID: LIB3602-073-Q1-K1-C12
cggccgcgtgggtaggcgatcggcaatcgggcagctcaagagcaggcgaccatggctgctgcctctgtggcccccgtccagacccgctcggcggtgaagggcttcgctgccaagcccgccgctgcgcgcgtggctgcccgccgcatgcgcgtggtgtcccaggccgcttccactgagctgaagcgcgccgacgtgcccctggagctggaggagattggcctgcccatgaacaccttcggccccaagaaccccttcaccggcaagattgtgagcgtggagaccatcaccggccccaaggcgaccggcgagacctgccacatcatcatccagaccgacaagaagatcccctttgtggagggccagtcctatggcgtgatcccccccggcaccaagatcaactccaagggcaaggaggtgccccacggcacccgcctctactccatcgcctccacccgctacggtgacaactacgacggcaacaccgcctccctgtgcgtgcgccgcgccgtgtacgtggaccccgagaccggcaaggaggaccccgccaagaagggcatctgctccaacttcctgtg

SEQ ID NO: 7857 - DNA, 558 bp, Chlorella sorokiniana
  Clone ID: LIB3602-073-Q1-K1-C2
cgggcgaggcgctggccaacggcaagcgcctcagcgattatggcctggccgacggctcggtgctctacttcaaggacctggggccgcagattggttacgccaccgtgttcttctgggagtacttgggcccgctgctggtctaccccctcttctacctcgcgccccgcctgctgtacccgggcctcaaggcgcccgagaagagcgtggtccagaacctggcactcgcttactggtccttccattacgtcaagcggctgctggaaacagcgtttgtgcacaagttctcccacgccaccatgcccgtgttcaacctgctcaagaactgcgcctactactggctgttcgccgcctatgtggcctactttgtgaaccacccgctttacacgccgccgcccacgcgccgcgccgtcatcgccctcgccgccgccatgctgtgccagtttgccaacttccggtgccacgtgatactggccaacctgcgccctgcgggcaccaagggctatgtcgtgccccgcggcttcctcttcaacttcatcacctgccccaactacaccgccg

SEQ ID NO: 7858 - DNA, 492 bp, Chlorella sorokiniana
  Clone ID: LIB3602-073-Q1-K1-C3
ctcgtttgtgccatgcccacctgcctccacgtcacccttcatcaaccctcacccaacccatccacctgccacccatccactcaccttccctccgccacaacctctgccacccactcaccacccatcacccgctcaacgccctccatgcaccatcctccccatccaccaaatctgccaccccaaacgcacgtccgccgctgcaccacctgccgccccctcacccgcacccatcttccacccgccacctttcctgccgctcaccgccgcacatcctacctcccacacctcactccatgtccacccttcacccgcgcttcacacagcggctgctgccatgcaaagctgctgccaaacccatccatcatgctcgcacacccactcacccacacgtccaacgtatccagacccattttcaaggcccgactgtacagtgcctttttgcgtccttatgccgatctggtaccaggacttaatgtgtaacaaatggtatgt

SEQ ID NO: 7859 - DNA, 424 bp, Chlorella sorokiniana
  unsure (1)..(424): unsure at all n locations; Clone ID: LIB3602-073-Q1-K1-C4
cggccgcgtggggcnagatcatgatgtggacaatgcggtgcccatgcgccccggcatgccgctcatctgccagccgggcgcccttggcgtgaccgagggcgacgagctgaccgcgctcgtgtttgcaaaggatggcctgctgtacagcggccacatcagcggcgcggtacgcaagtgggagctgccagtggcgtccagtgaggatgaggatgaggagcaggcgccagcttgggtgccgctcgagggccagcagcagcagcaggggcagcagcagcaggagcagcagccgcaggagcagccgcaaggcgcggcacgatagggcgcatgcagttgaatgacacaatcggcacgtgttttgactccacacaccattctactctagtcaaggacttgtcacaaaactgcggtgcaaaacagtggttna

SEQ ID NO: 7860 - DNA, 558 bp, Chlorella sorokiniana
  Clone ID: LIB3602-073-Q1-K1-C5
caacactaccgtaacggcgtgagcaccggtagttgaaacgtggagggtagattgtacccaggggaatgtgtagccggggggccacctgcaagcagctgggtgggcatgagggtggagggcagccgggactgcgccacgctccctgtcagctgtgctgcacgacaggcaaggcagctactgacgcctggtggaagtgcgctcagagaaagttgctcctgttttccctctgcagccgaggactctgtggtggaccgcacccgcgaggtggtgcccggcatggtgagcccagcctgcgcaatgcacttgccagtgtatttccgcccacgtgctcagggttgtggcgcttggtgggcagctcgctggcttgctgaactgtaacctaaccatatcagcaggcagaaaggctgctagcctctgcaccctgctgagacctcgctgtacatacgcaatgcccagcgtcctcattctcccgccgctgcaggtcatctgcggtatggaggtggctgagctggacggctgcccccgcatgggccccacctttggcgctatgtacatgtc

SEQ ID NO: 7861 - DNA, 584 bp, Chlorella sorokiniana
  unsure (1)..(584): unsure at all n locations; Clone ID: LIB3602-073-Q1-K1-C6
gtcgacccagcgttcgctcggnaccctctcatccccgnagaggtgtctatcgaggtcaaggcgcggcgggttcgcgtgaagggccctcgcggcacgctgcagcgcgacttcaagcacctggctgtggacatgttcctgactgaggaggagggcaagaaggtgctcaaggtggactgccactttggcaagcgcaagagcctggcgtccatccgcacctgcacctcgcacgtgcagaacatgatcaccggcgtgaccaagggctacgagtacaagatgcgcctggtgtacgcccatttccccatcaacatcaacatcgagaacaagggcggcaaggtggagatccgcaacttcctgggcgagaagattgtgcgcgtggtggacatgctgccgggcgtgacctgcgagcgcagcgccgccgtcaaggacgagctgatcctgaccggcaacgacatcgagctggtgtcccgcagcagcgcgctgatccaccagaagtgcctggtgaagaagaaggacatccgcaagttcctggacggcatctacctcagcgagcgcggcaccctggtgaagcccgagtaagcggagcc

SEQ ID NO: 7862 - DNA, 589 bp, Chlorella sorokiniana
  Clone ID: LIB3602-073-Q1-K1-C7
cagaacctcagtggttcttcatcatctcctgcggcctgctgctcatcattgctgccggactggtggcccagggcgttgtgttcttcacctccgccggtctatttggcaccaccttcccctacgagtaccgcccctggtacaacaccatcctgtggaacacctcgggctgctgcgacatgtacaacaaccaattctggtccatgatgcgcgcgctgtttggctacacggaccagcccacgggcctcaacctgatgtactacctgctgtactgggctattgtgctgagcatcacgatctggaagtggtacaccggcaccctcaccgaccgccgccaggcccagattgacgacctcaagtcgtttgcagtccacctgggagagcgcatggacgccgacgccggcctggacaagggcaagcagctcaccagcagcagcagcagcggcggccggctcagcagcgacgtggacctcgagcttggcaagggggaagcagcttctgactccgcggaggcgcaggaaggtgcttaccaggcaccagacagcgcccctgctgcacctgctgagcagcagcaggcggcgccggccaccac

SEQ ID NO: 7863 - DNA, 581 bp, Chlorella sorokiniana
  unsure (1)..(581): unsure at all n locations; Clone ID: LIB3602-073-Q1-K1-C8
ttcgnaaaaaaaaaaaaaaaaaaaaaaaaaagggagggaaagaaaaaaaaaaaaaaaaaaaaaaaaaaagaaaaaaaaaaaaaaaaaaaaaaaaaaaaaaaaaaggggaggaacgtttttaaagaacccaatttttaataacgggaagaatgaaaaataagggggttttcttttttggggctctcatttttttgggggggggggggggttacaatgttttttttggggggccccctgggtttccccactttgcccgcttttttaacacttccctttttgggaaaacccctttgtttccccaatttgtcccgcccttgggcgcctttcccttttttccgctttgttttttggagaaggggcccccccttgttgcgctttttaaagtttgggggttttggtggttccgtggggcccccccttttcgttggctttccccctggggcgggttgttttttcttccttggtttcctttttcctttcgggggccgtttttccctttcttttttttttttggggtttctttttgggcccgtttttgggtttttcccgggccttttttcatggggggctttcttttgggg

SEQ ID NO: 7864 - DNA, 608 bp, Chlorella sorokiniana
  unsure (1)..(608): unsure at all n locations; Clone ID: LIB3602-073-Q1-K1-C9
aaaaaaaaaaaaaaaatgggggagaaaagaagaaagaaanataaaaaaaaattnaaaaaaaataaagaagagaaaanataaaaagagggagaagaaaatatatataataaggaggaccaccaaatattaaacaaaaacccagggctttcgcaacaattaatagactcggggtgggggcgctctccttggggttcccaggctttcggccccctttctggcgcgggggggggggttttccgggggcgccccacccctttttcggggcgggggtttcccccgtttcccctgggggaaccctgggggtgcccccctttgttcgcgcccttcccaatccccttttccccggtggggcttttgggacggggcctgtgcccgcccccttttcccaaagtttgcgcccctttctgggggttggtccccccccttgggcggggccttttcccccgggggttggggtgtttcccctcgttttctcccctcctttggcgggtcccctggccccgtttttttggggtgtttccctttgtttcccccccttgggggtggggttcccccgccccccttaactcgggggcccccttttgggtcccggtttggggctttgccgg

SEQ ID NO: 7865 - DNA, 503 bp, Chlorella sorokiniana
  Clone ID: LIB3602-073-Q1-K1-D1
taaaaaaaaaaaaaaaaaaaaaaaaaaaaaaaaaaaaaaaaaaaaaaaaaaaaaaaaaaaaaaaaaaaaaaaaaaaaaaaaaaaaaaaaaaaaaaaaaaaaaaaaaaaaaaaaaaaaaaaagggggggccggttttaaggggttccaagtttccttccccttccttggcgagtcttagtttttttttgggggcccctaatttaaattcacgggccggggtttaccaccgcggggccgggaaaaaccctggggttccccaactaatttgctttggggaacatccccttttcgccggctggcttattagcaaaagggcccgccccgttcgcctttccaaacattggccccccctgtttggcaatgggacccccccttgtaggggccctttaaccccgggggggggggggtttccccccagggtgaccgttccatttgccagcgccttatgcccccgtcttttcgtttttttcccttctttttccccccctttccccggttttccc

SEQ ID NO: 7866 - DNA, 532 bp, Chlorella sorokiniana
  Clone ID: LIB3602-073-Q1-K1-D10
tcggcctccacgcgaccatgaagagggcattgagcgctgcctgaaggcggcctttggcgagcagctggtggaggtgctgcaggtgggcggccaagaggacaaccgcgcgacagcggagagcgtggacatgcacctcaacatgctgcgcggcgcggtggcggcgtatggtggcagcgtggaggtggtgggtgttgagcagggtgtgtgcacggtgcactacaagggcccgctgcccattggctatggcctacgggcggcgatccgggacaagttcccagatattgtggaggtgctaatgattgatccggacacggaggagcccatcaagtttgaagctatttaggctggaggccgtcgcacagcagagtgtcctcttggcatgcctcggaggagaggtggcccgcgacccgagcacaaacaggcggctggggctgcggcgcctcgcggaggcctggttaggtccgctgcatgcccagctgaggctgcgctttgcagggcctgtcttggcctttgcatttgatgtaaacatgag

SEQ ID NO: 7867 - DNA, 175 bp, Chlorella sorokiniana
  unsure (1)..(175): unsure at all n locations; Clone ID: LIB3602-073-Q1-K1-D11
gcgttttgtggccgccagnagaacaataggttcaggnagagctcaactcccgcctggcgctggtgatgaagtcgggcaagtacacgctgggctacaagaccacgctcaagacgctgcgctccggcaaggccaagctggtgatcatctccaacaactgccccgccgtgcgcaagtc

SEQ ID NO: 7868 - DNA, 561 bp, Chlorella sorokiniana
  Clone ID: LIB3602-073-Q1-K1-D12
gtacctttctgtatcatcttgcagcaatggcagccggctgcatctttctaacatcgtcaccggcccactcgtttgtgccatgcccacctgcctccaacgtcacccttcatcaaccctcacccaacccatccacctgccacccatccactcaccttccctccgccacaacctctgccacccactcaccacccatcacccgctcaacgccctccatgcaccatcctccccatccaccaaatctgccaccccaaacgcacgtccgccgctgcaccacctgccgccccctcacccgcacccatcttccacccgccacctttcctgccgctcaccgccgcacatcctacctcccacacctcactccatgtccacccttcacccgcgcttcacacagcggctgctgccatgcaaagctgctgccaaacccatccatcatgctcgcacacccactcacccacacgtccaacgtatccagacccattttcaaggcccgactgtacagtgcctttttgcgtccttatgccgatctggtaccaggacttaatgtgtaacaaatggtatgtt

SEQ ID NO: 7869 - DNA, 188 bp, Chlorella sorokiniana
  Clone ID: LIB3602-073-Q1-K1-D2
ctgttttgaccgactatgccgccctgcttcgggccgttttgtttgcctttgcaagacactgcgcctccctcatctttctcatgtgcaagcgccgtgccgcctgcaagcacgcaagctgatgtagcctggtgttgtcccaaggctcgcaacccgtctgcaaccaactggcatgtaaaactttgcatggc

SEQ ID NO: 7870 - DNA, 553 bp, Chlorella sorokiniana
  Clone ID: LIB3602-073-Q1-K1-D3
ggagtccgtatttacagtctgtgcatggctgcactagctcaactgtccatctagctctgccgtatgtcattcgggatgcaatcagtgctgtacaagcggtgcaggggaacagcttggcggtctggtgaacggcggcggcggccttcagcctgcaggcgtggcctcaggcgcctcccagccttcaccgggcggggcaggggtgccgcagccgttgcggccgcaggtggtctcgcaaaagttgccctccaccatccaggactggtcgcacttgccgaagtccttctgctgctggcaggtgtagcgatcatcgggagggacgtcggtgcagggaggcacctgtccctccgcaggagcaggcgcaggagtgggcgaggcctccggagcgacaggcgcagcagggcccgcttccgggccgggcacagcgggggcaggggccgggctctctggcacagcagcagtgagcgtaggcgcggcctcttccactggagctgcagccggcacagccgctgcaggcgccgctggggccgcggcagcggaggggcctggggcgcgg

SEQ ID NO: 7871 - DNA, 439 bp, Chlorella sorokiniana
  Clone ID: LIB3602-073-Q1-K1-D4
cccagcgccgcccacttttgctgtacacctccctcccctgccagacggcgtgccaggccgatgcctgcagctgtccatgcaggcctgtagcttgctctccccgctcccatctccccgttgtcgtccccggctcccagccgcctttgcactcatgcagccagcctgaaggctggcccagtgtaaccagtttcctgtcaaaaaaaaaaaaaaaaaaaaaaaaaaaaaaaaaaaaaaaaaaaaaaaaaaaaaaaaaaaaaaaaaaaaaaaaaaaaaaaaaaaaaaaaaaaaaaaaaaaaaaaaaaaaaaaaaaaaaaaaaaaaaaaaaaaaaaaagggggggcgccttttctaaaggaccaaatttaactaccgggtgtttgaaagttaaaattttttttaaagggccccaaaaaaaaaataaagggcccgctgtttaaaaa

SEQ ID NO: 7872 - DNA, 367 bp, Chlorella sorokiniana
  unsure (1)..(367): unsure at all n locations; Clone ID: LIB3602-073-Q1-K1-D5
gtcgacccagcgttcgtgtgnacgaggcgcgtggcggctccgcctacggcgccggcacgctggcaggccctacgggcgcccgccagcccagcaaggtggagctggactatgcgcagcaccagggcaagcacttcgccggcgtggccaagaagctggcggcctgaaaacttgattttgtgcgaactggcggcagcaccgctgcatcctgccccacgccctgccagacacagcagtgtgaagcagcggcgtgcaggagcaccccatatgacctctgcaagcccagatgatatccgcagcgaccagcatttgattgttcccctttctgaagtgtctgactgtatcaaccgcatgtaaacaagcgatcggc

SEQ ID NO: 7873 - DNA, 566 bp, Chlorella sorokiniana
  Clone ID: LIB3602-073-Q1-K1-D6
tgcaggactggccgccctacctgtccaacctcatcttcgagctgtggcggcggcccagcggccagcagtacgtcaaggtgctgtacaacaaagaggagctaccgctcacggagctatgcggcacccccgcctgcgacctgcagctgttcaaggagaaggtgttgggagcctacctgctcacgcgcgaccagcaccaaaaggaatgcctgctgcatttcctgcacgacaagccggcgggcgagcacacagagacggaggaggtggcggtgggcagctcgttccaagacagcgcagcaggcgcagcaggcgcagcgggcacagcgggtgcggcaggcgcggcgagcacggcggccgccagtggtggcagcagcagcagcagcagcagcgccggcgctggcggagagagcagcagtggcggcaaagctgcacaggcatgagcgttgtgagcggtgcggcttggaactggctgtgttgatgcagcgggccctgtgcgctttccgctgtgcatgcctctgtgcatgcaagcaagctccaggcagcatgttttggtgtacatttaatgatgc

SEQ ID NO: 7874 - DNA, 523 bp, Chlorella sorokiniana
  Clone ID: LIB3602-073-Q1-K1-D7
gcgtggtggtgtttgcatggggatgcagtaatgtacacatgacgagacgcgtgagaggaaaagggccagcatgtttgcagctgggcgcagcgggtgtgggtggcactgcggaaggcggtgtgggcttgagagcggatgcggtttctggttcgtctcggatggtaagacataagtagcggatcgggctcgaggaaaagggcggctgcctagtgcgcctgttcaagatctgggctgagagggatggatagtatatacgcccatatatgggcagtggaaacggaaatcgctggggccttgcaaggcgatcgaatcaaactctggctgcaaaactggtctgttgctgcatatggcgagcgatgcagcatgcatgcatcccccgccgctgcgggctgtgctctgtggctctgctggaaaagctgggtgtggcagcggctcacacattctgttgactggctggctgtggttcgccaggtgagggcgcaaaaagccacggcctgggttttatttaattgcctgttggggc

SEQ ID NO: 7875 - DNA, 582 bp, Chlorella sorokiniana
  Clone ID: LIB3602-073-Q1-K1-E1
ggggcggcagtgccggctgtacgagctgaacaacggcaagcgcattaccgttcggggcgcctctaagctgctggccaacacgatgttctcgtaccgcggcatggggctctccatgggcaccatggtggctggctgggacgaggcgggccctgggctgtactatgttgacagcgacggccagcgcaccaagggcaagctgttcagcgtaggctctggcagcctgtacgcctacggcgtgctggacgagggctaccgctgggacctgagtgtggaggatgccattgagctgggcctgcgctctatctaccacgccaccttccgcgacgcggcctcgggcggcacggtgtcggtgtaccacgtgacccaggacggctggaccaaggtgcggggcgaggacgtgggagagctgcacttccgctactacccccagccagaccagcacccatgcaacctggccgaccccctggccgtctgagcgctgtggcacacacctgcgtagccccttgcactgcgattgccaccccacgccttgggtttgcaaggcagcatggcatgggctgcactctgccctgcactgtgagc

SEQ ID NO: 7876 - DNA, 557 bp, Chlorella sorokiniana
  unsure (1)..(557): unsure at all n locations; Clone ID: LIB3602-073-Q1-K1-E10
agcgccgcagnaggtaaagacaaagagccggcgggccagggctaccgcgcgcgtacgcgccacatgttcagccgcggcttcaggcagaagggcttcatcccgctgtccacctacctgaccaactacaagctgggtgactatgtggacatcaaggtcaacgccgcggtgcacaagggcatgccccacaagttctaccacggcaagactggctgcgtgtggaatgtgaccaagcgcgccgtgggcgtggagctgctcaagcaggtcaacgggcggtacatcaagaagcgcatccacgtgcgcatcgagcacgtgacccccagccgctgccacgaggagttcctgcgccgctgcaaggagaacgacgcggcgcggcacgcggccaaggtggagggcaagccgctgccggtgctcaagcgccagcccaagggcccccgcaccgaggccatcatgctggagaacgtgaagatggagaccatcacggccatcccctacgatatcctcaaggagggcgtgctctgagcgtgatcggcggcgacgttccgttgattgcggctgca

SEQ ID NO: 7877 - DNA, 580 bp, Chlorella sorokiniana
  Clone ID: LIB3602-073-Q1-K1-E12
gcgttcgggcaactacctgcaggccatcctggctgccttccagatgtggagcagaaggccgagcagatgcagtgcggtggcgccaaggactgcgcttaagcgcagggttccacaaccgggcggcaagtgtgcagcagcaggcgcgcgagcgtcgctgagctgcccgctgtgccgcccagcacctgtgtcagcgctgtgcctggcggctgcgcatcggccgccaacggccggcccagtgcagttcgaacttgcaaactgaacccatcgatgcggcgcatgtgtgtgccttcaacgccaccatcacccaccaccacccaacgccaccatcacccaacccctcattcgcaccatcccttcactacccaccccatcaccagctgcatgcgccacactcagcaattcaacgcatcccacttttcatcctaggcgcgctctccctgctctccctgccttgatccgtccccatgccaaactcaagcgccttttcaagccaaccctacccacactttccaagcaaacccaaatcttctgaagcgaaagaacagttttctcccctcctttcattccagtaccggtgcct

SEQ ID NO: 7878 - DNA, 552 bp, Chlorella sorokiniana
  Clone ID: LIB3602-073-Q1-K1-E2
ggccgccctttttttttttttttttttgttttttttttttttttttttttttttttttttttttttttttttttttttttttggtgcggggcgggcacagggaaagggaaggatgggcaggggaacgagcccgggcaggggaaaggggcagggggcgggaacgagggggggggggggggggggaaggaacgggaagggaagaaaacggcccggcaaacatacggggaaaggagaaacaaaaccatgcctaaaaaaaaagggcaagagcccaggaaaggcaaaacaacaccatttggtaaaaacaaaagcccaaaaaaaaccaccccccaagccaagggcccggccctcaccgaaaagaaaaccacccaaatttggttaaaaaaaaaagcccacgaccccagggaagcaaaaactttattccggggccaaacggcccccccgacctgaaagtgaagggccccttaaaaaaaggaacccaaagccaaagtcccttaaggcaagggagcggtaagcgtgaaaagcacaccaggcgcggggagggccccttaaaaa

SEQ ID NO: 7879 - DNA, 568 bp, Chlorella sorokiniana
  Clone ID: LIB3602-073-Q1-K1-E3
cccccccctttttttttttttttttttttttttttttttttttttttttcggattggctgtgtttcatgcccaaaatcggtcattatggggatggctgcaattcaaagctggatggaggaaaaaaaaacatggtgcccttgggtaaggcttgacatgggccgaagtccagcaggatgggagtacggcaatggagggagaggaggatgggaggaggcattggaaggaaagatggtggccacagcatcatagcatggtctagcagagccagcacatgctggagttttcctggcaggcctcaactagggggcaggatgctatgggccccgactggcgccttgcacacagcagcagcagcagcagtccttcacgagctgccgccgcctgctgcctcgaagcaaagccgggcgccctcagccgcgctggcgcccttggcaaacacgtcagggtcgcaccacacggagcgtggatagtaagggcccatcgccgcctccgcgtcctcggggctgctgttgtcgggcacctgcgtcacgcactctttgaagcccgcggagcacagcatgttgcggt

SEQ ID NO: 7880 - DNA, 568 bp, Chlorella sorokiniana
  unsure (1)..(568): unsure at all n locations; Clone ID: LIB3602-073-Q1-K1-E6
cggcccggnatgcgacatctggnacctcggnatggttctctacattctgctgtcgggcatgccgcccttctggggagacgacgagaaggccatcttcacgtccatcctgcgcggcaacctggactttgccaccccgccctggccctccatctcccagccggcaaaggacctggtgcgcacaatcctcagctttgacattaagcagcgcgccaccgcggaccagatcctgcagcacccctggctgcgggagcatggcgtggcgcccgacaagccgctggacagcgtggtcatttcgcgcctgcgcaactttgcgggcatgaccaagctgcgcaaggcggccatcctagcagcagcgcagcacctcagctacgaggagattcatggcctcaaggagctgttcaagagctttgaccgcaacggcgacggccgcatcacactggatgagctgcgagagggcctgacccgccacaacaagctggctgactcagagattgagcagatcctgaaggacatagacgtggacggaaatggcgtgatcgattacgaggagttcctggcatccacggtc

SEQ ID NO: 7881 - DNA, 583 bp, Chlorella sorokiniana
  Clone ID: LIB3602-073-Q1-K1-E7
gggcaccgacttgaagaaaactgcaaacaaagcggtggtcttcgttgcaccgggcgacgcatgcagcggcgccgtgtccatctccaagtgacgctggatctgtgctacaaagcagcggtgacggagcccctcttcctctccctgaacaatgtcgacgccaacaacaagccgaccggttatggcacggcggacctgaagcgcaccaacttcaccgtgacggacctctcagcgtgcaccacgcccacttccaccttctaccgcactttcgacttctcctaccagctggcgccctgcaccaagtacgcgctcagtgtgggtacttactcttcaactacccaggtcaattggggccgcctcgatgtcacgccaaccccctcgagctattacgtggcgttgtggtatacaagcaacgggggctccagctggagtgattcctcgagcgtgaaaaatccaatgcgtatcgagttcgtctgcgcatcatgaccgctgctgctcgccacgtatccattgttcacatacccgggatcttttgatctgccctttatacccacacacctgcttcagcccgcccgcagcttgtctg

SEQ ID NO: 7882 - DNA, 575 bp, Chlorella sorokiniana
  unsure (1)..(575): unsure at all n locations; Clone ID: LIB3602-073-Q1-K1-E8
aaaaaaaaaaaaaaaaaaaaaaagaggggggggaaaaaaaaaaaaaaaaaaaaaaaaaaaaaaaaaaaaaaaaaaaaaaaaaaaaaaaaaaaaaaaaaaaaaaaaaaaaaaaaaaaaaaaaaaaaaaaaaaaaaaaaaaaaaaaaaaaaaaaaaaaaggggggngggcgttttgggggaaaccaatttggggggggggggggtgcaaaaaaaaaaattttttttttgggggccccaaaataaaaaaaagggggcggggtttaaaaacgggggggggggaaaaacccgggggttccccaatttaatggctgggggaaaaaccccctttttcgcggggggggtaaaagggaaaggggcccaaagggtggccctttcaaaaagtgggcccccctgaaggggaaaggggacccccccttgggggggccttaaaggggggggggggggggggtcccccgcgggggggccctttattttgggggggccttaggccccgttttttggggtttttcccctttttttttccccaggttgggggggtttccccggaaggtttaaaaaggggggccccctttgggg

SEQ ID NO: 7883 - DNA, 221 bp, Chlorella sorokiniana
  unsure (1)..(221): unsure at all n locations; Clone ID: LIB3602-073-Q1-K1-E9
aaaaaaaanaagggggggggggggggggaaaaaaaaaaaaannaagggagggggaagaagnaaaggaaaaaaaaaaaaaaaaggggggggcccctcccggacgggcaaaaaacatcaccccgggggggggaaccgccccaaccccaaggaaaaaaccggggaggggcgcccaaaaacccccacggaaaaaaggggggggggggggggtttttccccccccc

SEQ ID NO: 7884 - DNA, 497 bp, Chlorella sorokiniana
  Clone ID: LIB3602-073-Q1-K1-F1
cagcacgcgtttgacattgtcaacctgctgaccgaccagaacccggtccaggtgctcgtggacgccatcatcaacggcggcccgcgtgaggatgccacccgcattggcagcgccggtgtggtgcgccgccaggctgtggatgtgtcgccgctgcgccgcgtgaaccaggccatctggctgatcaccaccggcgcgcgcgagagcgcgttccgcaacatcaagaccattgcggagtgcctggcggacgagctgatcaacgcggccaagggcagctccaacagctacgccatcaagaagaaggacgagatcgagcgcgtggccaaggccaaccggtaaacggctgttgcgcacccaccaaaacagcagcccgccacagccggcacccctgggcaggatgccagaccgccagtgcagcagcacggtgtggttcagctgctgttatcgtggcaggctttccaattaggcgcgggtgttaggattgtgtaacacagcgcacc

SEQ ID NO: 7885 - DNA, 159 bp, Chlorella sorokiniana
  Clone ID: LIB3602-073-Q1-K1-F10
gttgcccgtccttacacaccggcggcatcaccagggcaaaaggcatggcaaggaagaatgggaagtgctgctctcagaacaaaacagattcaatgctgccgggacagaggggggttctgctgcgcgggcgccgccgccgccatgcaattcgcctagcaa

SEQ ID NO: 7886 - DNA, 556 bp, Chlorella sorokiniana
  Clone ID: LIB3602-073-Q1-K1-F11
cccgggtcgacccagcgttcgcggccgcgtgggcggccgcgtgggcgccgacggcaccgctacattctgcttcttctctccgcgcttcttctccttgccttcgtgcgacactgtccagctgctccctgtaactcaattcactagaaaaaaaaaaaaaaaaaaaaaaaaaaaaaaaaaaaaaaaaaaaaaaaaaaaaaaaaaaaaaaaaaaaaaaaaaaaaaaaaaaaaaaaaaaaaaaaaaaaaaaaaaaaaaaaaaaaaaaaaaaaaaaggggggaggccgttttaaaagaaccaaagtttacttccccggccttgcaacgtaaaattttttttttggggcccccaaaataaaatccacgggccgggttttaaaaacgtgggaacgggaaaaccccgggggtacccaaattaaatcccttggaaaaaaatccccttttccccagtgggggaaaaaccaaaaaggccccccccgatcccctttccaaaaattggcccaccctaaagggaaaagggaaccccccctttaggggccaataaaccccgggggggggggg

SEQ ID NO: 7887 - DNA, 563 bp, Chlorella sorokiniana
  Clone ID: LIB3602-073-Q1-K1-F12
ctccccatcgcccgctcaggcctgggtgcgcggcaagggcggcatgattgtgggcgacctgcccccctacgaggccttccccatcggtggcaccaactccgtgcgcggctacagcgagggcggcgtaggctcagggcgcaactatgtggcggggtctgcggagctgcggataccgctggtgtcccccatcgaggccactatctttggagactggggctcagacctggacagcggcggcacggtgacgggcgacccagcgggggcgcgcggcaagccgggcagcgggtatggctacggcgcaggggtgcggatagacacgtccatcgggccgctgcggctcgagtatgccatgaacgaccggcagcagacgcgcttccacctgggcatcggcacggctggctagatgctgcggcagcggtgacggcagcatcatcagagtagcagcacacaagcggaaaagtcgcgtagccgctggctctgttgcagttgtttacatcagttgtgcacagcgctgaccactctgccagtgttcgttggatactctctgtctgcacatttcgttg

SEQ ID NO: 7888 - DNA, 589 bp, Chlorella sorokiniana
  unsure (1)..(589): unsure at all n locations; Clone ID: LIB3602-073-Q1-K1-F2
agaggcggnacccagctggctctcccgcgaccgcctcgaggagatgggcttctccaaaatgctcatggacattgacatgaaggaggctgccgccgccggcctgctgggcaagcccctgaccgccaagacgtggaggagatgctgggcaacctgggcctgcccgccgagtttgccacccactcccagatccgcggcctgtcgggcggccagaaggtgaagctggtgctgggtgccgccatgtggcagcagccccacatcctggtgctggatgagcccaccaactacctggaccgcgagtccctgggcgccatggcctccgccatcaaggagtacggcggcggtgtggtgattgtgtcgcatcaccacgagtttgtgaaccaggtgtgccaggagaagtggaccgtgggcggcggcaagctggaggtgaccggccagtccgcggccgctctggaggccgccaagctggagtggaagcgccaggaggagaccaccgacgccttcggcaacaccatcaagatcaaggcccccaagaaggagctgtcgcgcaaggagaaanaaggccaaggccaaggccaacgccgnccgccgc

SEQ ID NO: 7889 - DNA, 500 bp, Chlorella sorokiniana
  unsure (1)..(500): unsure at all n locations; Clone ID: LIB3602-073-Q1-K1-F3
gtggcgctccacccgggggnagtgatgacagatgtggtgcgcagcctgccgggaccgctgcagcgcgcctaccgcctgctgctccaggccatcctgctcactccgcagcaaggcgcgcggtgcagcgtgtacagcgccaccagccccgagctggaccgccccaagatgcagggctgctactacctcgactccaactgcgcccccatcccgcccagcagggaggctcgggatgcgcagctggcggcctggctgtggcagtggagcgccacggcggtgggcctgcagcctgcggatgacctgctgccctgcaagccggggcagtgatcccaccaaggcttgaagcacagggacgcaccttgagtatattaaggtgatggcttcagcatttgtttgaccacacagctttctgcaatacccatacacttgcgattcaccacttagaatgtcatgtgttgcatgtcgacatgatgccaccgattctggctgccgtcttgtgatcg

SEQ ID NO: 7890 - DNA, 432 bp, Chlorella sorokiniana
  Clone ID: LIB3602-073-Q1-K1-F4
tccgtataaaaaaaaaaaaaaaaaaaaaatgtgaggggaaaaaaaaaaaaaaaaaaaaaaaaaaaaaaagaaaaaaaaaaaaaaaaaaaaaatataaaaaaaaaaaaaaaaaaaaaaaattaaaatttttaaaaattaaaaaaatatttatttaatactcccccttattttttaaaattaattaggggggcgctttttttgggggggccctttttttttccctggttttgggggattttttttttttttttgggccccctttttttttttttggggggctttttttttttccggtttttgtggggaaacccccgggggttcccccttttttttttttttgggccttttctctttttttatcgggggtggggttttagggggggggcccccctctttttcctttttcccagtttgtggcccttttttgggggg

SEQ ID NO: 7891 - DNA, 505 bp, Chlorella sorokiniana
  unsure (1)..(505): unsure at all n locations; Clone ID: LIB3602-073-Q1-K1-F5
ctaccgctggttctttgtggccggcgagcgcgaggccatcaccaagnaggtgtccaaggtggccaacaagatcggcctggacctgtgagcagggccagcgtgctgctgcagtccccgcctagatgctgctgggttgccaaccccgcagcctatctgagcgcccccggcagcaaggagctgccaggtggcacgaaaccgatgatgcgattgatagcactgctgcatgtgtgaatgaacttagcgggcgtggcgccggcgctgtacctgtaccctccctccccactatgcccgccctcggctgctacttgtcctctcctgcccctacctgacgtgcaccctgcctgcaccctctgctccctccgtctcgacttagaattgttctgatgttctccaatgccctgcccctttagtttgcttttcccggttagtggtttgtccagagtgatgtcccttgctgacgtgctgccggcctggccgcagccttgtgatagatagtgacccanaa

SEQ ID NO: 7892 - DNA, 581 bp, Chlorella sorokiniana
  Clone ID: LIB3602-073-Q1-K1-F6
gtcgacccagcgtccggggctgacagagcgccaccatgcggcagctcatttcttctcggaccctcgtcatccccgatgaggtgtctatcgaggtcaaggcgcggcgggttcgcgtgaagggccctcgcggcacgctgcagcgcgacttcaagcacctggctgtggacatgttcctgactgaggaggagggcaagaaggtgctcaaggtggactgccactttggcaagcgcaagagcctggcgtccatccgcacctgcacctcgcacgtgcagaacatgatcaccggcgtgaccaagggctacgagtacaagatgcgcctggtgtacgcccatttccccatcaacatcaacatcgagaacaagggcggcaaggtggagatccgcaacttcctgggcgagaagattgtgcgcgtggtggacatgctgccgggcgtgacctgcgagcgcagcgccgccgtcaaggacgagctgatcctgaccggcaacgacatcgagctggtgtcccgcagcagcgcgctgatccaccagaagtgcctggtgaagaagaaggacatccgcaagttcctggacggcatctacctc

SEQ ID NO: 7893 - DNA, 548 bp, Chlorella sorokiniana
  unsure (1)..(548): unsure at all n locations; Clone ID: LIB3602-073-Q1-K1-F7
cttccgactaagtctgagactgtcgatttttgcacccgcggcggcgctgggccgcttgccttgcgcccctgccaaccaagcacgcctgtgcagcacccgcccgtgacgcgagcaggggcctctgagaggcccctttctgtctcgccgctccgctctccagctgtgttcaatctgtcgcaagttctgccgtcccgcctcacccctgccgaccgtcctgttgtggcctaacgctgtaccaagtctctgctgaccgccgtcccctccggccgtgccccagcgcccctgctcacctcccctcttgagactgctcctccgtgcttgcggcgaatgggctcctgtagattagacagcccccatgcgtacccaccactgtgccctcttttcctgtactctcgccggccgcggcgcgcacacacatgctcgctcgaaaacccaacgaagccgcccgcccgccatacacacgcactgctgtatcactgatgcacccaccgtgtgagccctttttcccatgcctgtgctcaccccatgtaacccagatagagctaana

SEQ ID NO: 7894 - DNA, 258 bp, Chlorella sorokiniana
  Clone ID: LIB3602-073-Q1-K1-F8
taaaaaaaaaaaaaaaaaaaaaaaaaaaaaaaaaaaaaaaaaaaaaaaaaaagggcgggcggttcgcgaacctaaaaaccggtgcccgcacgggtgaagtgggctggttgccgtctgcttgctgcccaacccgcgcgggggcagaaaagatatacagcgtgtaaaactcgcggccccctccagcacccattgctgctcgccttttttgcttctgatcacttgctttgtcagccgccattgtaacctcgacgcgcgtgc

SEQ ID NO: 7895 - DNA, 417 bp, Chlorella sorokiniana
  Clone ID: LIB3602-073-Q1-K1-G1
tcgtccttgcttcccaatgccttgcagtgcaagcacatggacaaggaggtggccaagatgaggacggagggcacagcggcggtgaacaacgtgatcaacgccatgtggaccaagttcggcaccgccgcgcgggcactgacaatgaagcagtggcgcgcccaagtgcgcagcgcggggcggcgcttcatggcgcagcagaagaagaaagcagccgagggggaggcgcacatcgcgccgcgggcagtgcagaaggcgcagaaggaggaggagcgcaagcgcaagcgcaagggagagaagattgtgtctgtgaagaagctgacgaaggcgcgttgaggcggcggtggcagcggtgcagggccaccatgcgcaggcgggcgctcccaagagcctccgcctttctcacattgcatagattgt

SEQ ID NO: 7896 - DNA, 290 bp, Chlorella sorokiniana
  unsure (1)..(290): unsure at all n locations; Clone ID: LIB3602-073-Q1-K1-G10
gcaagtgcgagtgaggcggcacccttgctgcctggacagcactcgtagcccagtcctccacttgcgcgccgccaagccccagcagcccctacaagccaccaactccgatcggcatggcatgcctgctagcgtttcatcccttctcaagttgcctccaacctgtgttgccgctcatttgtgctctctctgagtgaagggtataccactgttttccttcccccgtccaccctgcctgctcgtacctgcgtctgcaccaagagttgaacttacattctgaagagacctcgnng

SEQ ID NO: 7897 - DNA, 585 bp, Chlorella sorokiniana
  unsure (1)..(585): unsure at all n locations; Clone ID: LIB3602-073-Q1-K1-G11
agnagtggctgagaacttccccatgttgcggacgccctggtcgcgggcaactacaccgccctgctcggcgccctggagctgaccggcctgactgatgccttcggccccgacttcgagggcaccatctttgcccccagcgacaacggctttgagtccctgactgagctggtcacctcccttggcctggcctcttccctggaggaccccgccatcgtcgccgaggtcctgaagtaccacgtgctgaacaccaccgtgaaggccgctgacctcgaggagggcctgaccgtggagaccctggccggcgtgcccctgaccatcatcaagaagaacggcggctgggctgttgaggacgtgaacggccgctctgccaagatcaacaagcccgacatcgctgctggcaaggccatcatccatggcatcaacggcgtgctgctgcccattgagctgcccggcgccggcaacgccaccgagcccgccacccccgaggagactgagaccaccgcccctgagggcactgaggtggctgcccccaccggcgctgcatccggcctgatggcctccgccgctgccgtcgccgcctccctg

SEQ ID NO: 7898 - DNA, 565 bp, Chlorella sorokiniana
  Clone ID: LIB3602-073-Q1-K1-G12
ctcggcccacaccttacggacgcaaagcggacgagcaacatggggcggcggccggcgcggtgctaccgccagatcaagggcaagccctaccccaagtcgcgcttctgccgcggcgtgcccgaccccaagatccgcatttatgatgtgggcgccaagaaggcgggcgtggacttcttccctcactgcgtccacctggtcagctgggagaaggagaacatctcgtccgaggcgctggaggcggcccgcatcgcggccaacaagtacatggtgaagaacgcgggcaaggacgccttccacctgcgcgtccgtgtgcaccccttccacgtgctgcgcatcaacaagatgctttcgtgcgccggcgcagacaggctgcagacaggcatgcgcggtgcgttcggcaagccatttggtgtgtgcgcgcgcgtgggcatcggtcagatcctgctgtccatccgctgcaaggacacgcacgctgcggtggcggaggaggccctccgtcgtgccaagttcaagttccccgggcgccagaagatcgtggctagcaggaactggggcttcactccct

SEQ ID NO: 7899 - DNA, 571 bp, Chlorella sorokiniana
  Clone ID: LIB3602-073-Q1-K1-G2
ggtgaagtacgcgaaggagtggcggagccgaagccgccaaggcccgcgggtccgacctgcgcgtccacttcaagaacacgcgtgaggccgccttcgctctgcgcaacatggacctgaccaaggccaaggcgtacatgcaggcggtgattgaccacaagcgctgcgtgcctttcctgcgctacaacggcggcgtgggccgcacctcccaggccaagaacgagggcaactcgattggccagggccggtggcccaagaagtcggccgagttcctgctgggcctgctgaccaacgcggagagcaacgccgagagcaagggcctggacgtggatgcgctgtacgtgagccacatccaggtcaacaaggcgcagaagggccgccgccggacttaccgcgcgcacggccgcatcaacgcctacatgtccagcccctgccacattgagctgatcctggcggagcgcgggcaggcggtgaaggccgaggcggaggacaagcgccgcaagctgagcaagaaggagctggccaagaagctgcgcagcggcaccaccagcaagagcagctaggcggccgctct

SEQ ID NO: 7900 - DNA, 587 bp, Chlorella sorokiniana
  unsure (1)..(587): unsure at all n locations; Clone ID: LIB3602-073-Q1-K1-G3
gtcgacccagcgttcgggnacagctgattggccagcagccggtgtttggcaaggcgcgctacaccgtgcgccagtggaccattcgccgtaacgagaagatctcggcccacgtgaccgtgcgcggcgagaaggcgatgcagctgctggaggcgggcctgaaggtgaaggagtacgagctcatccgccgcaacttctccgactcgggcaactttggctttggcatcaacgagcacatcgacctgggcatcaagtacgacccctccaccggcatctacggcatggacttctacgtggtgctggagcgccccggctaccgcgtggcgcgccgccgcaagcagctggccaaggtgggcgtgcagcaccgcgtgacgaaggaggacgcaattaagtggttccagcagaagttcgagggtgtggtgctcaacaaggcccacgccgcctaagcggcaggacggccaccgcctcggcgcgccggcacctctcagacgacaggcagacagcacaccccctgcaccacggcgctgcgctgcactgccccgctggcttgttgctgcccatcggatgtaatagcggacaagtgacaaaaa

SEQ ID NO: 7901 - DNA, 402 bp, Chlorella sorokiniana
  Clone ID: LIB3602-073-Q1-K1-G4
gccgtggcagcagggctggctcaagcgcttgccaacccagcagggcgtgctgcaattgcagctcgcctggcagagctcgcacctgcaatggcagcccggccggcggcggcgccgccgccggcggcacctgcccccaccccggcagtggcaaccgcagcgctgtcgcagctggcgcctgcgctgctgagcagcctcctgcagcagcgcgggcagccttcggcgcagggccagcagcagcagcagcagcagcagccgggggcatgatggtcattggcaaatgggcccccatgcgcatctcacagcagcaaccccgagcacccatgtacagattttggagcccactccacgccctgcctgcaacagtgcttgcggaaggctgatgccatgcccaacagtgcatgt

SEQ ID NO: 7902 - DNA, 587 bp, Chlorella sorokiniana
  unsure (1)..(587): unsure at all n locations; Clone ID: LIB3602-073-Q1-K1-G5
gcggtaccggcgctgctgcgcagcggcgtgctngagcatatacatcgagaggcggaggggctgtcggcgcgcatgcacgatgcgggcttcactcgcaacatcaaggtgaaagtgagcgtgggcgaggtgagcaaggtgacggagcggagcaaggtggcgctgctgcaccggcgggaccccgtgttcaacgagggcatggagctgcttgtagatgcggagaccgccgcctgccaagacgagcaggtggaggtggaagtgttcattgcgcacaactggcgccgtgattccttcaagggccgcgtgctcatccccctgcaagaggtggtgcgcaagcggcgcatgcgcggcagctggccgctgcaggatgcagagggcgggcacctcaccatggagctgagctgggctgccagtgccagcgcctatggcggagcccagtgacggcggtgggtcacactggaggcacctccggaggcagcccagacacccggctgcaggcagcctcgccgcctggctgccagcgtgcggcgtgctcccaagccgcagcccctctggcggtagcatcagcacgcacaggaatctcaccctgc

SEQ ID NO: 7903 - DNA, 572 bp, Chlorella sorokiniana
  unsure (1)..(572): unsure at all n locations; Clone ID: LIB3602-073-Q1-K1-G6
cngggtgtgcgcatgatcagcgccgaggcgcccgtcctgtttgcccgcgcctgcgagttcttcattcaggagctgacgctgcgcagctgggccgcggctcaggagtacaagcggcgcaccattcagcgcagcgacgtggccacagcaatcacgcgcacagacgtgtttgacttcctcattgacattgtgccgcgggaggaggccaatgaaccgcccggcactgacggcgcagccgccgcggcacagctggtgggcgtgcctcccccgccggtgccaatgcctggcggtggtgcgccgcagatgggcatgctgtcaccagcccagcagcagcagcagcagcagccgcagcagcagcagtttcagggagaggggaagcagcagcagcagcagcagcagcagcagcagcagcagcagcagcagcagggccagagggacgggcagcagatggcgctgcagtggccgccgccgccgcagccgttcccacccggcggtggccagcagtttggcttcccgcccatgcaaccgtttggcatgcctccctttggcgcattccccatgcacacacagccggg

SEQ ID NO: 7904 - DNA, 403 bp, Chlorella sorokiniana
  Clone ID: LIB3602-073-Q1-K1-G7
ggcgagaatgtcgatctgtacatcccccgcagtgctcgtggaccaacaagctgatcacggccaaggaccacggcagcgtgcagatcaacattggccacctggacgagagcggcgtgtacaccaactcgttctccaccttcgcgctctgcggccaggtccgcgtcaagggcgaggctgacagcgctctggaccatctgtgggccaagaagcgggctgagatcggccagtgaagcgctgctgagttctagccgccagccggctgggctacacagctgccagccggcggtgggccagccagccttgggtcggccagtgatgcgctgcgaagcaaagtgctgagcgggcgggcgctccggcgcgccgccgccagccacgcagtgcaagctgtaacgcgcctccttgc

SEQ ID NO: 7905 - DNA, 510 bp, Chlorella sorokiniana
  Clone ID: LIB3602-073-Q1-K1-G8
cccgggtcgacccagcgttcgtacggaacaccactgccaaaaacgcgggtgtgtcgctgcctgtaggtccactggcaacctagccatttgcagcggaatgcagacgtgcccctgacagccgcagcgccagcagcaggcgaggcaacccccgcggcccagacgatgcagcaggaggcggaggaggagcgcgaaatcatgaaaagccaagacttggctgagctggctcgcaagggcagcctgggctttgagcagctggagcaaatgactggcggcagccgcgtgccagcggtggcactgctggctcgcaagtcagcgggcgcggcggcagctgccagcagcagcgcacggccggcagactgaggcgcccctggcttgcctctctgtatctgtaacgtgtgtacttgtagcttcctcctgcaaatacgcccagttaaaaaaaaaaaaaaacactcaaaataaaaaaaaaaaaaaaaaaaaagaagtgggtttttataaaaaaataaaagaaaa

SEQ ID NO: 7906 - DNA, 581 bp, Chlorella sorokiniana
  Clone ID: LIB3602-073-Q1-K1-G9
cgacacggctgctgcatgccaccgctgctggttggatgcgtcacacctgcaccgcatccccctttattctccatccacgccccctttcccgtacttttggtactttgctttctgtatccactgcttttcccaccctggctggctgactccggggggtctgtccattgcagacatgcagactgtaacacgaaactggaaaaaaaaaaaaaaaaaaaaaaaaaaaaaaaaaaaaaaaaaaaaaaaaaaaaaaaaaaaaaaaaaaaaaaaaaaaaaaaaaaaaaaaaaaaaaaaaaaaaaaaaaaaaaaaaaaaaaaaaaaaaggggggggcccctttttaaaaaaaccaaatttacttccccggtcttggaaaaaaaaaattttttttttggggccccaaaattaaattaaagggcccggttttaaaaaccgtgggaagggaaaaaccctggggttccccaaattaaatcctttggaaaaaaacccctttttcccaggtggggtaaaaaaaaaaaggcccccaccaatccccctttcaaaaaatttcccccccttaaagggaaatgggaccccccctttaagg

SEQ ID NO: 7907 - DNA, 609 bp, Chlorella sorokiniana
  unsure (1)..(609): unsure at all n locations; Clone ID: LIB3602-073-Q1-K1-H1
gtcgacccagcgtccgccgcgaactggntctgccccaggcgtgcgcgacggcctggcccaggcccgcgagaacctggacgtggccaaggcccgcatcaaggaggctgagaagcgcatcgacgccgacctggacgcctacatcgccaaggcgtactggactgagggccgcaacgagctgcgccgccaggtgggcaccctgcgcttcgacctgaacgcggtggccgacaccctgcccaaggccgccaagaaggaggcgcaggccgccaagaacgagttcctggccgccgtggaggcgctggacctccagctgcgcaagaagaacggggacaaggccgccgctgccctggctgacaccaaggccaagctggacgccgtgatcgccaagctggcgtaagcacccgccagccaggcggctggccggtaccacccggacggccgccgcggcaccccgcagcagcccccttgccagctggcgccccacgcgccggcgcaacgttttgactccctctcgcaccctggtggggtttgtccaccggcggggcccccgcgccccagcccgcagcagctgcagcagcattcctctgctctacaccagtcccgctagttccc

SEQ ID NO: 7908 - DNA, 594 bp, Chlorella sorokiniana
  unsure (1)..(594): unsure at all n locations; Clone ID: LIB3602-073-Q1-K1-H10
gtcccataccaacaggnagctgtccaggcagcagtttgtcttcgggccgcacaccctgcaggtggtgtgccggaggctgcctgaggaagtggcacgtgtgacgcagacgctgcagcttgatgtggaggagctgtttgcaaacctgctggactgggacacacccaagccagcgcccaaagccgcgcagctggcgggggcacagccagcagtgcagcagcagcagcaagagcagcagcaaggggagcagcagcaaggcacggcagccagcagcgagctactgccggcggcagtggactcgaaaaagctgtgcggcaatgtggagtctgaccagcccgacctgattggcctggatgtctggccggcctccattgcgctgtgcagctacctggcagcccatgccagcctggtggcaggcgcagcggtgtgcgagctgggtgcaggcatgggccttcctggcctgctgtgcgccaagctgggggctcgccacgtgctgctgaccgattacgagccagtggtggtggcccagatacagcagaatgcagagcagaatgcagtggcagctcgctgcgcctgcctggcgctcgactggtttga

SEQ ID NO: 7909 - DNA, 632 bp, Chlorella sorokiniana
  unsure (1)..(632): unsure at all n locations; Clone ID: LIB3602-073-Q1-K1-H11
cccggtcgacccagcgtccggctgcggcggcggcggcagcaggnagcggcagcggcgtgtcagcggcacggctctcagcgctgctgcagcagcgcagcgtggcgctggctgcagcggcggcaggggatgggccggtggcggtgccccttcaagaggacccagccctctggccagagtggggcgacgcaaatgcaagttccgcagctgccgcctcgcctgctggggcagcagcagccaagcaggcagcggctcacgctcacaggcagcagcagcgcgcctgggaggcagagcgcaacgcggcgctggggctgccgccggcgccgccgcaggcggacgacccagctgcctacatcggccgcctcgacccgctctcaggccggctgctgtcctgggagcacccggtcacctacgcagcggccgacggcagctgcggcacagcagagctgcagccgcggtcccagcttcccatcggcatggcagaagagggctggcagtcggcgtatgcctgtgccgcgccgattggggggcagccgtggaagcgagtacgagtggcttgagggggcagcaccttgatgcactgagcgtgttgaattctaggctgctgcattcccgcaactctgcgctgtgcattg

SEQ ID NO: 7910 - DNA, 581 bp, Chlorella sorokiniana
  Clone ID: LIB3602-073-Q1-K1-H12
gtcgacccagcgttcgccaactgcgcgccttctacgacaagcgcgtgtcgcaggaggtggacggcgaggccctgggcgaggagttcaagggctacgtcttcaagacatgggcggccaggacaagcagggcttccccatgaagcagggcgtgctgaccaacggccgcgtgcaggtgctgatgtcgcccggcgaccagtgcttccgcggctacggccgccgcaacggcgagcgccgccgcaagtcggtgcgcggctgcatcgtgtcccaggacctgtccgtgctcaacctggtgatcgtgaagaagggcgagcaggagctgccgggcctgaccgacgaggagaagccccgccagcgcggccccaagcgcgcgtccaagatccgcaagatgttcaacctgaccaaggatgacgacgtgcgccactacgtgaagatctacggcaagaaggtggagaagaacggcaagaccaccatcaagtgccccaagatccagcgcctggtgacgccccaggtgctgcagcgcaagcgccggcgggccgccatcaagaaggagcgcatctcgcgcaagaagaccgaggccgccg

SEQ ID NO: 7911 - DNA, 522 bp, Chlorella sorokiniana
  unsure (1)..(522): unsure at all n locations; Clone ID: LIB3602-073-Q1-K1-H2
ccgggtcgcccaccgtcggcatgccaagtgtgtgaccgggtgacggtgggcgagcaaggggaggtggagtcagacggccacaaggtcacgctgatggctgtgatggtcactcaattccccatgcgactgtcggtctatgccgagcaattctcagacgtggcggcgcacaaggtcagcagcagtggcggcggcggtggccagcggcgatgacgcgcctgtgggctgcaccaagtgattatgcacttttttcatgacgttgtcatcgtgaccaataacctatccattcacaatctgagctggaacaccgcaactgttgctgctcaagttacantgaaaaaaaaaaaaaaaaaaaaaaaaaaaaaaaaaaaaaaaaaaaaaaaaaaaaaaaaaaaaaaaaaaaaaaaaaaaaaaaaaaaaaaaaaaaaaaaaaaaaaaaaaaaaaaaaaggggggggccgtttttaaaggatccaattttacttccccttgcttgcaagttaaaagtttttttatggggccccca

SEQ ID NO: 7912 - DNA, 551 bp, Chlorella sorokiniana
  unsure (1)..(551): unsure at all n locations; Clone ID: LIB3602-073-Q1-K1-H3
gtcgacccagcgttcgccggnacccgtaacccaatcgagcccccgctcttgcacagccctcggtagcagcaagacaaggcaggccgctggcggcgggtgacttatcaagcccgccgcagcaacccctgcacaggacagaatggttttgcagcacctgctgtttgcggcccacgccgctgcccatattctgctgcccctgccagttctctctctcgcgcccccctgcatgcacaaacctggctggccgctcgcgcaccgtgcctccgtcccccgcgcttttctggtgccgcccggcgagtgcgctttttgacagtggtgtggtggagctccggcccccaccggttctgcgctttgattaacctaacgtgcccgcccccgggcactctgataccaagatccccatgcacgctcccagcctccctacacatccttttccgcacctacccaccccttgcattctttctctgagcagcagcgcgcgcctgatgcgccgtccagcccagctgaacgcgcgcgtcggtggcgagcgccgtgtgtgaatatgcatgtag

SEQ ID NO: 7913 - DNA, 592 bp, Chlorella sorokiniana
  unsure (1)..(592): unsure at all n locations; Clone ID: LIB3602-073-Q1-K1-H4
gtggccacccagnaccgggccctgcagcgcgcgtgcatggctgttccgggcggcgcggtgctgtttgccagcgtcaacggcgtgcacctggagacgcccagcgagctgcagaagcaggcggccaagcaggaggagaagcggcacatggcccccagcgaaacagagctgaagagcggcgcgctggccgaggtggcggcggcgcagcaggagcagcgcgcgcggccgcagctgcgccgcaagaaagcaaaggggcccaacccgctgtcggttcagaagccgaaaaaggctaagaaggcggcagcggggactggcggtgccagcggcggcggcggcggtggcggtgagcccaagcagcagaagcagcagcaggcagcggcagctggtggagagggcggcgagcagcctgctcagaagaagaagcggcagcggcggcgcggcaagggcgctgcggcgggcggcgctggtggcggcgctggtagcggcagcgattgagttgcagcgtggtggtcagcctgctgcgtccattgcgccaactgttctggcttgaaattcacaggtgtttgctctgttgcaatggataaagcgcacaaaa

SEQ ID NO: 7914 - DNA, 607 bp, Chlorella sorokiniana
  Clone ID: LIB3602-073-Q1-K1-H5
gcagtttgtgcaggtggagccagacggctcggatgcctggcggctggacccagtggtggaggcgctgaaggagggagcggtgggcatcatccccacagacagcaacctggcgtttgtgtgcgacctgggcaaccgcggcgcggtggagaagctgctgaccatcaagcgcagcaagggcagccagcgcatgtccatcctgtgccgcaacctgcaggacgtggacacgtacacgctggggtggccacccagccgcgcccccggccagcccgacatgttcaagctcgtgcgccgcgtcctgccaggcccgtacaccttcatcctgctggcatccaaggaaatgcccaaggcagtgacaaacgtggacaaggggcgcagcaagaagcggcacgaggtgggcgtgcgcctgcccggcgacccagtggcgctggccatcctgcagcagctggaccgcccgctgctgtgcaccactgcggggggcgagggcgcggaggacgacggcccgctggcgcccgatgccgcggtgctgatggaccggtacggcccccaggggctggactttgtggtggatgcgggcccccgcccagccgagggcagcaccgtcatcgac

SEQ ID NO: 7915 - DNA, 552 bp, Chlorella sorokiniana
  unsure (1)..(552): unsure at all n locations; Clone ID: LIB3602-073-Q1-K1-H8
cggccgcgtgggtggctccgctcaaaacggcttgatcaagctggctgtgcggctgggctttgtctgaggcgctctggagcatttcaaggcactgccggctgggcacacttgagcagtggcctgacacatgttgcagctgtcagaactgtttgcgtttgcttcttcacgctgacttgctagtattgtacggcactgtataacacgcagcanaaaaaaaaaaaaaaaaaaaaaaaaaaaaaaaaaaaaaaaaaaaaaaaaaaaaaaaaaaaaaaaaaaaaaaaaaaaaaaaaaaaaaaaaaaaaaaaaaaaaaaaaaaaaaaaaaaaaaaaaaggggggggccctttttaaaggaccaaattttacttccccgtgcttgcaagttaaaagtttttttttggggcccccaaaataaaattaatgggccgggttttaaaaacgtgggaattggaaaaaccttgggtttaccaaattaaatcgctttgaaaaaaatccccttttccccagttgggtaaataccaaaaaggccccacccattcgcctttccaaaaatt

SEQ ID NO: 7916 - DNA, 589 bp, Chlorella sorokiniana
  Clone ID: LIB3602-073-Q1-K1-H9
gcgttcggcggccccggcatcttcatggccacccacttcaaccgcgtgtactgcggcaagtgccacctgacgtacgtgtacgacaaggagggccagaccgcctaagcgccccgctcccccctgcggatgcacgcttagcagcagcacacgcggcgggtgcgcccggcatgccggcacaccagccacggagcggcggggcgtccctggcagcggcgcagcgcctgcaagcccttctgttgtgttctgtgccgctgtaatacccctgctgcaaaaaaaaaaaaaaaaaaaaaaaaaaaaaaaaaaaaaaaaaaaaaaaaaaaaaaaaaaaaaaaaaaaaaaaaaaaaaaaaaaaaaaaaaaaaaaaaaaaaaaaaaaaaaaaaaaaaggggggggcccgttttaaaaaaaccaaatttaacttccccgggattgcaaaggaaaaattttttttttggggcccccaaaaataaaattaatgggccgggttttaaaaacgtggtgaatgggaaaaaaccttgggttacccaaattaaatccctttgaaaaaaatccccttttcccaagttgggtaaaaacaaaaaagcccccc

SEQ ID NO: 7917 - DNA, 497 bp, Chlorella sorokiniana
  Clone ID: LIB3602-074-Q1-K1-A1
ccccgcgtccgccaactccaagccatgtggctgatggcctaccgcctctccaagctctatgaggcgggcaagatgacccatgagcaggcgtccctggtcaaggcgtggaacacgctgcgcggccgcgaggtggtggctctgggccgcgagctgctgggcggcaacggcatcctgtccgagttcctggtggccaaggcctttgccgacatggaggcgtactacagctacgagggcacgtatgaggtcaacgcgctggtggcaggccgcggtgttacgggcatttctgccatcaagcccccgcgctcgggcaaggtgcaggtgcaggcctgaggtctgactggctgctcagtagcaaggaggcatgcagttggcgtgctgctcagcaagtgcccgcctgccgccaggctggctgcgcagcactggctctgtactctagtcaaggaggccaggatggagtgccttacatcgcgcatgcagcggcaatcaaaagttttgat

SEQ ID NO: 7918 - DNA, 487 bp, Chlorella sorokiniana
  Clone ID: LIB3602-074-Q1-K1-A10
ggcatatcgacctggcaccgctggatgcactctattgaaggcgacatacaacggccctgtcggcgttgtcggcctagtgagatgccttcatacagcccttctgatgcgccaagcgccgccactttgaaccttggactgcacgttgcttctaattaaagctggatcacacattgcctgtccgtgaaaggcgtggcgagaccacgctgctcttgatattgttctggctttgaatagctgggatatgtgacggctgttgctgttcgctatcattaaccagcaatgatttactacacttgccttttgctgttcgacgaccaccttggagtactatgtctgctggccaccttttcagtaaaccatcttcaagaactgcctccctagtctgtccactctctccccctctctctctgtacagtgcctgtttgaagtttgattacacacgctgttgcacagcagcacgtgtcaagcaatgtaacacacacgtcag

SEQ ID NO: 7919 - DNA, 579 bp, Chlorella sorokiniana
  Clone ID: LIB3602-074-Q1-K1-A11
ctatcttcatgtgctcaccgcgccctcctccgtccccggcaccgcggtggccgactttgtcatcttcccgccccgcatggacggtggccggagcacaccttccgcccgccctactaccaccgcaacctgatgtcggagttcatgggcctggtgcgggggcagtacgacgccaaggcagacggattcctgccgggcggcgccagcctgcacctgtgcatgacgccgcacgggccggacaccaagacgtttgaagcggcgactgcccctgaggcagagcacattggccacctgcccaaggacacgctggccttcatgtttgagacgcactacacgccgcgcatcacgccgcacgccgtggccgcctccaacatcgaccgcaactactaccagtgctggctgggcctgaagagccacttcgaccccacctggacccccgaaaaggcggcgcccggcggcaagccagccacgctgccagctgcgccgcccgccggagccaaggcggcagcaggtgggggagcagaagggcgcgcagcagaacggcagcagcccgcctgctctggcggcgactgcccgagcctc

SEQ ID NO: 7920 - DNA, 335 bp, Chlorella sorokiniana
  Clone ID: LIB3602-074-Q1-K1-A12
ggccaccgaagcgcagtctgcaagccgccccgacctgaagcgcgccggccagccccgcgcctctgctctgtccaaggcatccgcaaggccaaggccaccgccgccagccagtatatgggtgctgcctgcgggcgtgcgccccccgcgccagcccacatgtaatgctcgttgtcccccccggactgaacaatacaaaaaatctgaagcagatgacaaaacaaatcaaaaacgctagcagaaagcaaacgaagaaaaacacaaaaaaataaatgtggggtgccctgcatagaggacccaaccttagtaactcgaggctgcgacataataaatttttt

SEQ ID NO: 7921 - DNA, 651 bp, Chlorella sorokiniana
  unsure (1)..(651): unsure at all n locations; Clone ID: LIB3602-074-Q1-K1-A2
cccgggtcgnacccacgcccgtccgtacagaaaaacaaaaataacaaaaaacaatagcggtagaaggaaacagaaaataacaaaataaaaacagagaaaaaaagaaaacacaaacagaatgaaaagaacaaaaatggaacacatccctaatgccaacaaactccaccctgaaacagcaacagcctgctcggtcggacaagtgcatccgtgaagtcctgggcgatgcactcgcctgggggggggagcagggtccggccagcatgtggagggacctgctgcgcaaggcggcggctgaggccggccccggcaacatcgtgggcgtgtacgctggcggcccgccgccgctcatgaccgctgtgcacctggctgtggcccgcctgaacggcggcgcctgcagcggcggcgcagagggcgcctacctggagcttcacaaggaagcactggagctctaaaattgaaaagagaggagagctgcagcattgatgctgcctcatgcagcactttctgtgccggtacaggacataagcctgcacacctgtccggccgtgcccgccggtgcatggcagcacatcaggtgcagcgtggccggctggacatccataccagcctgggcagcgcccatgccagcctgagcagcatgccgttaccacc

SEQ ID NO: 7922 - DNA, 608 bp, Chlorella sorokiniana
  Clone ID: LIB3602-074-Q1-K1-A3
gtcgacccacgctccggcaggagtggctgggcgttgtgaagcaggagctgctgaccgcccaggacgagctggccaaggtgaagcaggcggcgcgctccgacgtgcgccagctgcagctggagctggtcagcagccgcggggagtcggagcagcgtgcgcgcgacctggctgccgccgaggccgagattgcggatctgcggcgccagctggaggcgcagcagcaggcagcagccagcgccgctgcagatgccgcccctaagccagccgccaagcgcggccgcaagaaggcaaacgggacggggcccgcaaccgcagtggaggttgagcacatcaccgccagccaggcggcggacgcagcggtggcggcggcgcaggcggacgctgcggcggcgcagcagcgtgcgattgagattcgcgccgaggccgcgatgctggtggaaaccgtggaggaccgcgcctatgcggctgtgatggaggcggagggcaaggccaagactgctgagcgcgaggccgagcgcctgcgggccaagctgcgcgccctgagcagccgggatgaggcctgagcgccgcccgcttctgcaccgacgcttgcagcaataatgttcaat

SEQ ID NO: 7923 - DNA, 139 bp, Chlorella sorokiniana
  Clone ID: LIB3602-074-Q1-K1-A4
taaaaaaaaaaaaaaaaaaaaaaaaaaaaaaaaaaaaaaaaaaaaaaaaaaaaaaaaaaaaaaaaaaaaaaaaaaaaaaaaaaaaaaaaaaaaaaaaaaaaaaaaaaaaaggggcgggccgttcttaaggaacccaact

SEQ ID NO: 7924 - DNA, 414 bp, Chlorella sorokiniana
  unsure (1)..(414): unsure at all n locations; Clone ID: LIB3602-074-Q1-K1-A5
gcagnatgcggtgctggtcggcaccatcaccgacgacgtgcggctgtttgaggtgcccaagctgcgcgtgtgcgcgctgcgcgtcaccgagaccgctcgcgcccgntcctcaagctggcggcgagatcatgaccttcgatcagctggcgctggtggcgcccaccggcagcaactgcgtgctgctgcgcggccccaagaacagccgcgaggccgtcaagcacttcggccccgcacccggtgtgcccggctcccacgccaagccgtacgtgcgcagcaagggccgcaagtttgagcgcgcccgcggccgccggaagagcaagggctacaaggcgtaagcgcccccacgcctcagcggccggcgggcggcggcggccgtggatgcgctgccgcagcgccgccggcacagttgacggc

SEQ ID NO: 7925 - DNA, 556 bp, Chlorella sorokiniana
  unsure (1)..(556): unsure at all n locations; Clone ID: LIB3602-074-Q1-K1-A6
gcgttcgcacctgtcatgctcccgtcttccgccactcagccccgcccatctccctgcagcgctatttgctgtccatgcacagtcccctacgatactaccgctttctttcgttcgcctactacgctccgttttccccgtctgcttgcgctcctgttcccccgaacagcatccagctcaaacgaacgaatccccatggcactgccatatctccccccatctcacctggttgcaagcagccgcggcgcgcggcgcggctggctccccacccccgcctgccgcccgcccccagcccctacccatgctactacggctgctgcacgcactactggggcgccacccctgtcaccccttcacttggcgccccgccccccccatttgtcctcgcccttcaatcctcaagaccctagcccaccctgtcttgctgcactgcttacttactaatcgatctctaagggggccagggcctcaggccgcagcgctcaaacctccccagctgcctccctgccccacgtctctaagggtgtaactaagcgtttacanaaaaaaaaaaannaaa

SEQ ID NO: 7926 - DNA, 584 bp, Chlorella sorokiniana
  unsure (1)..(584): unsure at all n locations; Clone ID: LIB3602-074-Q1-K1-A7
cggnatgacgctcatgacatgcagcctgtcctcacagtgctagcggctgtcaaggaggctgcagccagcggcatgaagttgcgagcgattgtgtgcgagagccggccactgtgtgaaggcgtgtcgctggcagcgcagtgggcagaggcgggtgtggaagtgacgctgatcacagatgcgcaggcggcgctgtttttggggcaggccgaccttgtgcttgtgggagcagatgccatcacagaggcggcggcggtgaacaaggcaggcacccacctgctggcattagcggcacatgcagcaggggtgcccgtctatgtagcggcagacacctccaagctgtctccaaagcccctggtgtccattgcattccccggcgagcagcaggaggagcagcaggaagagcccgcagcagaagaagttacggcggcttggggcaggccgctgcctgcaggcgtgcgtgtgcggaacctgtactttgagcccacgcccctcagcctgctgactgctgttgtgactgaagaggggcggttggagccagcagacatcactgcggcggtgcaggcacgaaagcagcagtaccgcac

SEQ ID NO: 7927 - DNA, 508 bp, Chlorella sorokiniana
  unsure (1)..(508): unsure at all n locations; Clone ID: LIB3602-074-Q1-K1-A8
gcgttctttgctttagcgccngaagcgacaatgtggcatgagcattcggcatggccacagcggcagcagcggtggcgggcctccaagcgcccgcagcggcgggcgaagaggggccagcggtggcgcagcagtgggtgccgcctccctcgtggcagcatgtatttggctctgcctctgctgtgtactgacaatcctggtggaaattaaatgtaaatcatggagaatcaaaaaaaaaaaaaaaaaaaaaaaaaaaaaaaaataatataaaaaaaaaaaaaaaaaaaaaaaaaaaaaaaaaaaaaaaaaaaaaaaaaataaaaaaataaaaaaaaaaaaaagggggcgggcctttttaggggttcaaattttacttccctttgattgaaaggatttattttttttttggggccccttaatttaatttaattggccgtgtttttaaaacgttgtgattggaaaaaccttgcgtttcccaattttattcgctttgaaaaaaatccctttttcc

SEQ ID NO: 7928 - DNA, 593 bp, Chlorella sorokiniana
  Clone ID: LIB3602-074-Q1-K1-A9
tccgcccagcgtccgcgaagcggggggcgcggtggactgccgcatcttcaaggaccgccacccctccaccatcagcatgagcgtgctggtcatagttgagatgttcaacgccctcaacgcgctgtcagagaactgcagcctgctggcgctgccgccgtggagcaatccctggctgctggccgccattgcggtgtctgtgctgctgcacctgctgatcctctatgtgcctcccctggcagccatgttcagcgtggtggcgctcagctgggctgagtggcgcatggtgctgctgctgtcggcgccggtggtgctggtggacgaagcactcaagctggtcactcggcggttcatgatgacgccggaggcgcgagccgccatgggcagccgcctgctgcactggctgccagtgcgcctgcggcacaagggccgcgtgctcagctcggagctgaccagcattataactggcgatagccggggcagcggcggcggcggcggcggcggcggcggcgcatacgagcgcaagttagagcaggactcgctgctttcagggcgcagcctgcggccctcgtagcagcgtgcagcaactggaaata

SEQ ID NO: 7929 - DNA, 559 bp, Chlorella sorokiniana
  Clone ID: LIB3602-074-Q1-K1-B1
cgccgcccggcatcctggcccccgccttccacgagtacgtcacccgcttcatcgacagcagctctgcgccgcccgccgctgcggcgccgcctgccgaggaggacgaggaggcggggggcaaggtgtgcctgcagcgcaacctgcctgccggcgataagctggcggctgcggcggagagcgtgtacgacggcgtgcagatggtcaacggcctggagtgcaagctgtgcaacatgcagcagaagatcaagaagattgcctatgtgctgggcaccgaggacttcttccaccgccggcggaaggccaaggccagcgcagacaaggcgggccgctccgccaagtttgcggcgttcatcgccaagcatgctgcgcccgctgcgcccgctgccgccgcccccgccgcccccgtggctgtcgcgtgagcggcgcacagccgtagcgcagcgtgctgagtgtcatgtgttagtcagcgaggcagctgggcggcaggggcgcagtgctgcgccgcaccttagtgctctgcctgtctgcatttttgagcctgctttctctcttgcatttt

SEQ ID NO: 7930 - DNA, 139 bp, Chlorella sorokiniana
  Clone ID: LIB3602-074-Q1-K1-B10
gggcgcgtgcttgcgaactttttaaactctttcttatcgtgtctctctagagttcatttacacttggtccgtgggtgttccaacgtctacaactggggaaacccctggttgtggggggggttactgggccttgctcccg

SEQ ID NO: 7931 - DNA, 60 bp, Chlorella sorokiniana
  Clone ID: LIB3602-074-Q1-K1-B12
tcgtgtattccggcctgcttctctattgtacatcgcagctgcttgtaaatccggcctggt

SEQ ID NO: 7932 - DNA, 567 bp, Chlorella sorokiniana
  unsure (1)..(567): unsure at all n locations; Clone ID: LIB3602-074-Q1-K1-B2
tatggntccagaagtccgctcgggcgagtttctcgcggaggaggagctcaaggcgctgtgcgaccttgtgaaggaggtgctggtggaggagtccaacgtgcaaccagttagcagccccgtcaccgtttgcggagacattcacggccagtttcacgatctgctcaagctctttgaaacaggcggccaggtgcccagcaccaactacatttttatgggcgactttgtggaccgcggctacaacagcctggaggttttcacgctgctgatgctgctcaaagcggcacatcctgcgcacgtcacgctgctgcgaggcaaccatgaaagccggcagatcacacaggtgtatggcttctatgacgagtgccagcgcaagtatggcaatgcaaacgcatggaggtactgcactgaggtgtttgactacctcacgatatcggctgttgttgatggcagtgtgctgtgcgtgcacggcggcctgtctccagatgtgcgcacgctggaccaagtgcgcatgattgaccgcgtatgcgagatcccgcacgagggaccgttttgtgacttgatgtggtc

SEQ ID NO: 7933 - DNA, 466 bp, Chlorella sorokiniana
  unsure (1)..(466): unsure at all n locations; Clone ID: LIB3602-074-Q1-K1-B3
acagccggtcaccaggtgcagcgcctcacctatcgccggcgtcacagctacgccaccaagtccaacaagcagcggatcctgcggacccctggcggcaagctggtgtaccagctggccaagaagaagacctcccaccccacctgccccatctccggccagcggctcaatgggctgcccgcggtgcgccccaacagcctgcaccgcgtgaacaagagcaagaagacggtgcaccgcgcgtacggcggccacctggcggcgggcgtggtcaaggagcgcatcgtgcgcgccttcctggtggaggagcagaagatcgtgaagaaggtgctgaagctgcaggctgccaaggaggctgcgcaggccaaggccgcggcggcaggcagcaagggcaagaagaagtccaagaagtgagcggcgcacgcgagcggacagttgcgccccatgctcccgctgtaatgcaccctcgntg

SEQ ID NO: 7934 - DNA, 524 bp, Chlorella sorokiniana
  unsure (1)..(524): unsure at all n locations; Clone ID: LIB3602-074-Q1-K1-B4
ggtanagacagcggctctgcaaccatggcggagtccgtccagactttcggccgcaagaagaatgcggtggctgtggcctatgtgaagcgcggcaagggcgagatccgcctcaacggcgccccgctggagctggtgcagcccgagacgctgcgctggaaggcgtttgagccggtgctgctgctgggcaagcagcgcttctccaacgtggacatccgcatccgcgtcaagggcggcggccaggtgtcccagatctacgccatccgccaggccatctccaagggcattgtggccttctaccagaagtacgtggatgagcagagcaagaacgagatcaaggacatcctgctgacctacgaccgcacgctgctggtggccgaccctcgccgctgcgagcccaagaagttcggtggccacggtgcccgcgcgcggtttcagaaatcttacaggtgaaggctgccccgtgggacggttgggcgcctctggaggcttcttctgcgccgctggcgtggcggcagcggcgtctg

SEQ ID NO: 7935 - DNA, 590 bp, Chlorella sorokiniana
  Clone ID: LIB3602-074-Q1-K1-B5
gcccgccgcacgagcgctgctgctggtgcctgagggacccaacacggaggccacgctgcgcaacaacatcaatgtgtgcatcctgtacatggcggcttggatcggcggcaccggctgcgtgccgctccacaacctcatggaggacgcggccaccgctgagatctctcgcgcgcaggtgtggcagtgggtgcggtacggtgccaagctggactgcggcaagacggtcacggcggagatggtgcggcaggtgattgaggaagaggtggaggcgctgcagaagcagctgggcaccgagaagtttgctgcgggcgagtacctggacgccgccttcctcaccaagctcatgtgctgcggccgcgagctgcatgacttcctcaccctgcctgcccaggacatcatcattgccatgggcaagtgatggcctttggtcagttgaggaccccactgctggaatcaccaccgctggcctggcggcagacaggcgctgcgcgccaaccgatgcggcgacggcgctgctgccgcgctgcgggagggcggcgctgcccccagccaaccttgatgacaagagactctgttgctgcggccgctct

SEQ ID NO: 7936 - DNA, 550 bp, Chlorella sorokiniana
  unsure (1)..(550): unsure at all n locations; Clone ID: LIB3602-074-Q1-K1-B6
gtcgacccagcgtccggctctagaatcacaatctgccgccttggtcctgttgcgctcgtaccatcagtggctgattcagggccttgctcaacctcagcctattgatgctcaccgactggacagtgttccttgacaatggactgggtacggcggccattcggtgcacctgctgtctcaccctgacttgtggaggagctgaagctttttgatggaagcactccgctcctcaacggtggctctaatgcaggcattgatgtgaccaccaccaaggtaggatcagcaccgagctacgcgcagaaacggcggcgctggcaaagcgtgagggcgcagcacaggcaggaggcaaaggcgcaacacaccgctaccaggacataggattgcgggagtagagattacaggtaataccagcggcagcatgtatgcacccaattggaagagcatcaagcttgtatttgtacaataagcagcacgtgttttgcggccgtctgtgtggccttatgtgagcacggctggttgcccctgtacagttgtaatagctagggatgcanaa

SEQ ID NO: 7937 - DNA, 488 bp, Chlorella sorokiniana
  unsure (1)..(488): unsure at all n locations; Clone ID: LIB3602-074-Q1-K1-B7
tgaccctggcancgccacagttgtggaacaggggctggagagcatgcagagcggcggcggcctgcacaccggcctcagcgccgaggccaccgcctttgtgccgagcgtgcacagcagcagcagcatggacaagcacgctgctgtggccgctgctgcgcctgctgagcccgctgcggaggaccagccgcagcaggagtgagcggcctaggaagggcggcggtgcggcctgagcgggggctaagcccctcggatcagagccgccgccctgcaatggcagcagcagcgcggcacgccggctgcctgctgcacccatgagagtgatacagacaaattggatccagcccggcgattgattcccgctctgtcttgagctacaacattcccagtcttgcttgtttttcccgctgtcgtttccctttgctgattagcccggctagtgacctgctcggtcgtgctgagattctgtaacgctaggcagaccccnnana

SEQ ID NO: 7938 - DNA, 601 bp, Chlorella sorokiniana
  unsure (1)..(601): unsure at all n locations; Clone ID: LIB3602-074-Q1-K1-B8
cggccgcgtggggtgcccgaccccagnatccgcatttatgatgtgggcgccaagaaggcgggcgtggacttcttccctcactgcgtccacctggtcagctgggagaaggagaacatctcgtccgaggcgctggaggcggcccgcatcgcggccaacaagtacatggtgaagaacgcgggcaaggacgccttccacctgcgcgtccgtgtgcaccccttccacgtgctgcgcatcaacaagatgctttcgtgcgccggcgcagacaggctgcagacaggcatgcgcggtgcgttcggcaagccatttggtgtgtgcgcgcgcgtgggcatcggtcagatcctgctgtccatccgctgcaaggacacgcacgctgcggtggcggaggaggccctccgtcgtgccaagttcaagttccccgggcgccagaagatcgtggctagcaggaactggggcttcactccctacctgcgcgacgattacttggagtggaagcgtgagggccgccttgtgaacgacggtgtgaatgccaagctgcttggcaaccacggcccgctggacgcacgggagcccggccagattttcgagggtcctgcccgtctgt

SEQ ID NO: 7939 - DNA, 110 bp, Chlorella sorokiniana
  Clone ID: LIB3602-074-Q1-K1-B9
taaaaaaaaaaaaaaaaaaaaaaaaaaaaaagaaaaaaaaaaaataaaaaaaaacaaaataaaaaaaacaaaacatacaaaaaacataaactattaaataatgtaacaca

SEQ ID NO: 7940 - DNA, 486 bp, Chlorella sorokiniana
  unsure (1)..(486): unsure at all n locations; Clone ID: LIB3602-074-Q1-K1-C1
ctggnagcctgggnagacgatgtggcggtggcacgcagccaaggccagttttttcagtcgctctaccagaccaaggcaaagcggccagtggggctgagcagcgagcagctgcaggagcggacgcagaaggtggtgcagccggcgcggtctgagatgagcagccgcctgcgctactacctgtttgccttcttggcatttgtgctggccaccgaggtggtggtcgacctgcaatcagacgcgccctcagcgctccaagacgtgatctacacgctactggtgatcgccctgggagtgacggccttcaacgagcgcaggtcgctgccttgaagtgccagcactcggctgctgggcgtgccacaacccgccgctggtggcaccgcctgctgcagccgtgtggcggctccctcctgtgcactgaaccagtcaatcaattgcatacctgtcacaccttgtatttgaatcctctgagaagagtccgagtggtca

SEQ ID NO: 7941 - DNA, 267 bp, Chlorella sorokiniana
  Clone ID: LIB3602-074-Q1-K1-C10
ccgcccacgccgtccgtataagcccgaggcgcgcaaggcctcccgcgaggcggcgctgcgtgagatcaaggagcgcgccaagaaggccaaggccgacaaggcggtgcagaaggcgcaggccaaggcctcgggcgccggcaaggctgtcaagaacatgcctaagggcgcgggcaagggcggcgccaagagcaccggccgctaagccagcggcaatgcagcgggcgtagcggcctgctgggccgctgccgttgtaacgcacttcctcgg

SEQ ID NO: 7942 - DNA, 440 bp, Chlorella sorokiniana
  unsure (1)..(440): unsure at all n locations; Clone ID: LIB3602-074-Q1-K1-C11
cgttngagaggaggtggaggcggccagcgtgggcaagggcagcgtggcggtgggggaggtggccgacaacatcgaggccgacctggtggtgctgtccaccgcggcaatccacgagaagcacgtggacggcaacctgctggcagaatttgtcccctgccccgtgctgctactgccttgagcggccaacatggcgtaaagaatacggtggcgggctgtggcgcgtgtactcgcagcagcgagcgcggcagccagctttatgtgtattttagtccttcagttttcatgaccatcaacgtgatgagatcaatgtgtatcatcaagcaataacccgggcatgcacgtagagctggccggcttgctgctattccagtttgtaagtttgaacccttaaaaaaaaaaaaaaaaaaaaaaaaaaaaaaaaaaaaaagannaaaaaatat

SEQ ID NO: 7943 - DNA, 316 bp, Chlorella sorokiniana
  Clone ID: LIB3602-074-Q1-K1-C12
cgactttgtgaccgccacgcacctgcaggtcagcctgaccaccagcgattgggacgagtgcgccgcttggctgacggcgctgaagcggctgatcaaggcacggcagacgatgggctgatcttgcattgcagatggcgtgtcagcagcgctgacccgcggaatggagaccgtgagttgcccagccctgcaagcagctagccgtccagcggatcagaacggcgtggaagctgatgggctgggtggtccagtggcagcctggttgtggtgcgtgcagtcctgcacacttgtctgccccgctgtgtaacctaccgttgac

SEQ ID NO: 7944 - DNA, 602 bp, Chlorella sorokiniana
  Clone ID: LIB3602-074-Q1-K1-C2
gcccgcccgcagccgctgggctgccatggacgacagcagtgaggacgagggtggtgcggcagcggcccgcaagcgcaagaagctgggtggggccggcggcagcagcggcggtcttggtgtggacgattggcgggagctgctggccagtggcaagcaggccctggcaggcaagaccccgggctccgccccgcgcggcatcctcagcaggggcagcggcggcagcaacggcaacggcagcggcagggccagtgcgggcaagaagcgcgtgcgctggccagacgaggccgcaggcgcgggggaggaagaggagcaggggttccgcatcggcggcggcggcgagcgcgcaaaggcgggtctggaggtggtgcacgtgctgcatgggctgggccctcccgcccaactggacgacggcagcgcgggcgtggctccccaccccaccggcacctttgctgcggcagcaaaggcggagcactcgagcgaagcagacatgttcaagcgcctgctgctcagccgtggcggcccccattgaggcgtgtgcaactccatggccttccagaggctgcagaatcccagccaggtgctggctagctggctggcgccgc

SEQ ID NO: 7945 - DNA, 418 bp, Chlorella sorokiniana
  unsure (1)..(418): unsure at all n locations; Clone ID: LIB3602-074-Q1-K1-C3
cggccgcgtgggcggncgcgtgggatgggggagtcggcattaagtaaagaagtctggcctgaaactctttacgccgcacgcctgcgcccgagcctgcagattttggccaacgaaattgaccaccaccatttcctctgaatgcctagccggccgcagctctgcccgtcgatggccggctgaactgcctgctcctgccccaatgttacgcttagccctcaaagccctcgttggaatcatccagtcttgcacatgcccctccactttactgattctaatccatgtctgtcagccaaccagccttgcactgcttgctgcccttgcctgtccggggctgctggcagtgttgacaggtgccagctactggggctgcacagccaggctgaacctctcaggataatttgtaactacttcttgctgc

SEQ ID NO: 7946 - DNA, 604 bp, Chlorella sorokiniana
  unsure (1)..(604): unsure at all n locations; Clone ID: LIB3602-074-Q1-K1-C4
gccagcgccctccatccgcggtacgatggcggacccatttggtgcgctgagcgggcctccctgaatgaggacttgttccctcaggcagccttctccaagaaagccctacgtcctttgtcgctcatacatactccccgcgcacgcagcggcctcagccttgcatcccgccactgctgcccctgtaccaacaccacaataacctcaccaacagcgcccacgcgccctctgcatgacccccaggcttgaacccaactctactgcctctgtctctgataacctgccgtcccgccccacccccgtgccggcccttgcccagtactgcccgtctgcccttgcttgccagtccattcatgttgtccaaccgtcatgtgtgcgcatgcctgcacagcccgacatacaaatgcgttacctctgtctgtgacctccttgcttgcaacaacatgtttgtccacctaacccctttgtgcattgcttagcccacctttgtttgcagcccctgcttgcttagccccacctcctcttgccttttgccctgtgccgnctgcctgcgccttgcatgccgcacagttgccatgcccaaaggtatttgtaacatgctccgtcc

SEQ ID NO: 7947 - DNA, 573 bp, Chlorella sorokiniana
  Clone ID: LIB3602-074-Q1-K1-C5
ctgccgctcatcctgctgctgcgcaacgcgcctgaatacgcgctgaccggcaaggaggtgaccagcatcctcatgcagcggctggtgtaggtggacggcaaggtgcgcactgaccgcacctaccccgtgggcttcatggacgtcgtggacatccccaagactgacgagcacttccgcgtggtgtacgacgccaagggccgctttgtggtgcaccgcatcaccaaggaggaggcatcctataagctctgcaaggtgaggcgcctggcattcggcaagggcggcatcccccacatcggcacccacgacggccgcaccgtgcgctaccccgaccccgagatcaaggtgaacgacacggtgatgctggacctggagactggcaagatcaaggacttcatcaagttcgatgtgggcaacctggccattgccaccggcggccacaacaacggccgtgtgggcaccattgtgcacaaggagaagcacaagggctccttcgacattgtgcacatcaaggacgcggccggccacacctttgccacccgcgtgaacaacgtgtttgtgattggcaagggcgac

SEQ ID NO: 7948 - DNA, 366 bp, Chlorella sorokiniana
  Clone ID: LIB3602-074-Q1-K1-C6
tccttaaaaaaaaaaaaaaaaaaaaaaaaaaaaagaaaaaaaaaaaaaaaaaaaaaaaaaaaaaaaaaaaaaaaaaaaaaaaaaaaaaaaaaaaaaaaaaaaaaggggcggccgcttttggggttccctattttgcgttccccgttgtttgcccccgtttttgttttttttttgagggtccccttaaattgatttggggggggggggggcttttacacctgtgttaacttggggaaacccctgcgggttcacccatttttttcccccttgcggcctttcccccttttgcccccgctgttttaatgtgccaaagggcccgcccctttcccctttccaaacagtttcccagcctgttgggcaattgga

SEQ ID NO: 7949 - DNA, 551 bp, Chlorella sorokiniana
  unsure (1)..(551): unsure at all n locations; Clone ID: LIB3602-074-Q1-K1-C7
gcttgtgcacagtgggcgctggncaacctgagtgacgaggcgtaccttcgtcgtgtcatcatgccacttgagacgctgctcaccaactacaagcgggttgtggtgaaggacagcgcggtgaatgcgctatgctacggtgccaagctgatgattccaggactgctacgctacgaaaatggcatcgagctggacgaggaagtggtgctgatgaccaccaagggagaggcgattgccgtgggtattgcgcagatgacaaccagcattatggctacttgcgatcatggttgtgttgcaaaggtcaagcgagtcatcatggagcgtgacacttacccgcgcaggtggggccttggccccatggctcagaagaaaaaacagctggtggctgctgggaaactggacaagtatggccgccccaccgaggccactcccaaggaatatttgcgggcgcttgggcaggatggaggcccacaaagcacagcagcaggagctgcggcgngaggtggcacagtcgggcaacatacaacagacgcggcggcccatgaaggcaatga

SEQ ID NO: 7950 - DNA, 415 bp, Chlorella sorokiniana
  Clone ID: LIB3602-074-Q1-K1-C8
ttttttttttttttttttttttttttttttttttttttttttttttttttttttttttttttttttttttttttttttttttttttttttttttttttttttttttttttttttttttttttttttttttttttttttttttttttaagggggggggggggtgaaaaaaaaaaaaaaaaaaaaaaaaaattttttaaaaaaaggggagggggcgttttaaaaaaaaaaaaaaaaaaaacggggggaaaaaaaaaaaaatttttttaaagggggaaaaaaaaaaaaaaaaaggggggggggttttaaaaaagggggggggaaaaaaaatgggggaaacaaaaaaaaatggggtgggaaaaaaacccctttttgcaggggggggaaaaaaaaaaaagaccccaaaaaaggcctcttc

SEQ ID NO: 7951 - DNA, 587 bp, Chlorella sorokiniana
  unsure (1)..(587): unsure at all n locations; Clone ID: LIB3602-074-Q1-K1-C9
acctgnacgaccgcatctgccaggactatgtgcgcctgctcaagtacggcgactcgctctaccgctgcaagcagctcaagcgcgccgcgctgggccgcatgtgcacgctcatgaagcggcagggcccctcactcgcctacctggagcaggtgcggcagcacatgagccgcctgccgtcgatcgaccccaacacgcgcacgctgctggtgtgtggctaccccaacgtgggcaagtcgtccttcatgaacaaggtcacgcgggcggacgtggaggtgcagccctacgctttcaccaccaagtcgctgtatgtcgggcacaccgactacaagtacctgcgctggcaggtcatcgacacccccggcatcctggaccggccgctggaggagcgcaacacgattgagatgcagtccatcactgcgctggcccacctgcgcgccgcggtgctgtacgtcatcgacatctcggagcagtgcggcttcaccatcaagcagcaggccacgctgttccactccatcaagccgctgttcgccaacaagcccgtgctgatcgtggccaacaagacggatgtggtgcagctggagcagctg

SEQ ID NO: 7952 - DNA, 434 bp, Chlorella sorokiniana
  unsure (1)..(434): unsure at all n locations; Clone ID: LIB3602-074-Q1-K1-D1
gtgccgcccaatgcgagnacgccgcctctcacccctgatcctgcatacacgtctttacaaaaaacaaaaagctgccttacttcgtttctcgccctttttccccgcgctgctagctaggagcccgcccgtcgttccttgagcccgcatttgcagcccacagctaatgcatatctgccctgccatgctgcagcccggtagtctgctccgctcctagctcggcccccatgctggctggctgggtggtgcggccgncanccgnccgccccagccccagccccagctcgctctttgccctcgnctccgnttcttctttgcgcccctttaccccctgacctctccttgcctgtttgccctcgctcctggcngggctcctgctctcctctgcttcgccctcgcccttcgctgctgttcctccttcctcnctgctttggcgc

SEQ ID NO: 7953 - DNA, 247 bp, Chlorella sorokiniana
  Clone ID: LIB3602-074-Q1-K1-D10
ggagtcgcttggcacgcttgtgggcaatacgctgggccaccgggcaggccgacaggccagactgtgcagcgctttgccaccgttgccttgcgccctagcagccgccagtgcagacccgcctcccaacgattgctcttggctggctgccgcttgaatagtaaagcccattctacctcccttggacccatggaatcatgctcaagaccactctgttcaaaactttttaaaagtgtaatacaggaagctg

SEQ ID NO: 7954 - DNA, 201 bp, Chlorella sorokiniana
  Clone ID: LIB3602-074-Q1-K1-D11
tccgtgcgaacaaatgctgagcgggcgggcgctccggcgcgccgccgccagccacgcagtgcaagctgtaacgcgcctccttgcaaaaaaaaaaaaaaaaaaaaaaaaaaaaaaaaaaaaaaaaaaaaaaaaaaaaaaaaaaaaaaaaaaaaaaaaaaaaaaaaaaaaaaaaaaaaaaaaaaaggggcggggcgttttaaa

SEQ ID NO: 7955 - DNA, 592 bp, Chlorella sorokiniana
  unsure (1)..(592): unsure at all n locations; Clone ID: LIB3602-074-Q1-K1-D2
ggggactggccgcagnanatgacaagctggtggcgctgcggcagcgggcgggcatccaggccaactccaagctggagatcctggccgccgagaaggacatgtacgtggcccgcatcaacggcaacgtgacagtgaagcttggtccccgctatgacatgggcaacctggtgccccgcaaggaggacggctgggcgatggccgcctctggaaaggactttgcagtgtgggagaagaagtgaggtgggcagccgctcagggctgctgcggtgcggcatgcacgcattgggtgcatgtgctgctgccattttcgctgccgtcagccacagctgtgtgttggaccttcgtgcccctcccttcttgctgctgcctctgctgctgcatgacgcatctccttgcctgctacccgtcttcgatgcaaccttcctagctactgttttttcgcacggctgcacccacgaccttgcccatctggcttgcgcccacctcgtttttgcgcctaccttttcccccggactgcacaccgctcggaccgtcttctgtgtatcactgccggtgctgttggcacactgttntgcctgcacatgctgcatgc

SEQ ID NO: 7956 - DNA, 561 bp, Chlorella sorokiniana
  Clone ID: LIB3602-074-Q1-K1-D4
aaaaaaaaaaaaaaaaaaaaaaagaggggaaaaaaaaaaaaaaaaaaaaaaaaaaaaaaaaaaaaaaaagagagagaacaaatataaaggatccaaaaattgggggcgcgtgcttgacgaagaaatgggggtgtccttttttgtggcgccaaatttatttccttggccgtggtgtcacattgttttgtggggggggggcctttttttcacccacttgggggggtttgtgcagttccccctttggtaagccggggtggtcgcccccctggttcccccggtgggcctttccccctgttgcgccggctggttggtctttggggacgcgccctgttggcggttcttttaagggggccccttttggtggttgctttgtagcgcgccctgttcggtggcctcccccctggggggcggttgctttttctttcttcctttcctttttcctttctttggtcttttttccctgttttgttttattttgggggtttttttttcgggccctttttttgggtggtttcccccttcgtggtgggttctcccctaggaggggtttgtttttttggg

SEQ ID NO: 7957 - DNA, 424 bp, Chlorella sorokiniana
  Clone ID: LIB3602-074-Q1-K1-D5
agcgtccgactgtaccagagctctactcaggtgaagggtaacgtgtacaagaacaagcgcgtgctcatggaggccatccacaagcagaagcggagaagatccgcgagaagaacattgcggaccagctggaggcgcggcgcgccaagaacaaggcggcgcgcgagcgcaaggcggcccgccgcgaggagcgcttcgcgcagggcgtgaccgccgccaccgagagccagaagtaagcggctccgtctcggcggcagcagccgcggcggcgggcgacgcagtgtgctccccccgccgccgcgcgttgttcttgcagcttgcaggctgggcggccggccgcggggcagccccgcccaggactctgtgtatcgttagcgccagcggggcagccggcgccggcgcccggtgtgtaagaccacacgtgcaa

SEQ ID NO: 7958 - DNA, 518 bp, Chlorella sorokiniana
  unsure (1)..(518): unsure at all n locations; Clone ID: LIB3602-074-Q1-K1-D7
agccagcgggcacaccggntacctcgcagcccacctcgccagccaaagcagccgccgacaggcagccgttcctgccgcccagcccctttggaggcgacctgcggctgcggcatgtgcagtccatgccgccgcacccgcctgggccgcccgccgctggcccaccgccgcagccgtttgacgcgcctgctgagacgcgcagtgcgccgcatgagcgtgagctgcaggcggcgctgggcagcggcggcgcacacatgcctgctgagctggacccttactgctcccgattcatgtctgggctggtgggcgaccaggaagaggcggggtgaaagctggggcggtacgaccccgccttgtgttgccttgtgttccccctgttctccttgcactctgtcgcatcctttttacgcagccatgcactcaaccaaccgttttgaatgcaactctattcattctgttgctctcttcatcacaccctgtcctgctcaggctactgtttgactactgtaagtgtgcagtcc

SEQ ID NO: 7959 - DNA, 474 bp, Chlorella sorokiniana
  unsure (1)..(474): unsure at all n locations; Clone ID: LIB3602-074-Q1-K1-D8
tctagttctagnacgcgagcggcctggcccggcctcgcgcgcggtacgatgcctgccgagggctcgccgcccattttgcatgactccctaggctgctggccagccacgcgcccccaagctgcacctgttttccctgtttcctgcccatctgtgtaccccttcagcccccctgccgacccgttttttcctgcccccatcctcacccaacccacaagccacgcggcccacaaacgcatttggttgcaccgccaccctctcagctgcccttcagagtaccatctgaaagctaagcataacgccaagccactgctcgctcctttcggatcgcccatttggttggttgtcggcccctcttccaatcggccccgcctcgacttgatcctcatcacgtccgcttttgtctgcactcctcaggggcgtgccaattgtgcgcgccgccgttgtatcctgccaactgtaacattaatgactacc

SEQ ID NO: 7960 - DNA, 443 bp, Chlorella sorokiniana
  Clone ID: LIB3602-074-Q1-K1-E1
gtcgccgcctgtctgctcagctggtgtgggagcttgtgaagaagaacaatgcgttcatccgcaagtcggtgaaccacaccgtgttctccgccgagcccggcaacgtggccaacaagcacagctacaagtacagcggcctggccaaccgcggcgccaccgtggatgtggccgccgccgagggcgccgtggtgatcagcaagagcagcaagaagggcaagctggccggcagcgtgtgcaagaagaacgcgcgccgcaccaactttgccgcggccgccgaggcgcagtctgcaggccgccccgacctgaagcgcgccgcccaggcccgcgcctctgctctgtccaagggcatccgcaaggccaaggccaccgccgccagccagtagatgggtgctgcctgcgggcgtgcgccccccgcgccagcccacatgtaatgctcgttggcc

SEQ ID NO: 7961 - DNA, 297 bp, Chlorella sorokiniana
  Clone ID: LIB3602-074-Q1-K1-E10
ggtctacctgttcagggcctggttttcatgtacttctacgtgcgcctggcctacatcttcacctccttcatgcgcggctacaacctggcgcgcaagaagggcgacaagaagaagggcgcagaggccagcggcagcggcgcgagcagcagcaaggcggcgggaacacgcaagaagaagtgaacgcctctcaggcctccacaaacagctgggtgacagttgaatgagcggtgaactcaaccctttctgacaatcaatcgatgggatgcccgggcaggggctgtgtaatgaatccccggc

SEQ ID NO: 7962 - DNA, 575 bp, Chlorella sorokiniana
  unsure (1)..(575): unsure at all n locations; Clone ID: LIB3602-074-Q1-K1-E12
cagcgtgccgcgcaacaccaagctgggcggactggacgccgtgctctccaagagggcgccnagcgagacaccaagaactttgtgggcctgctgtcggccaacaaccgtctggtggagctgggcaagattgtgtccaagtttgaggagattgcggcggagcagcgcggcgaggtcaaggcgatggtcaccaccgccgagggcctgagcgcggaggagatcgaggagatcaagaatggcctgaagccgctgctgaagcccgggcagaagctgaccctggaggaggtggtggacccctccatcatcggcggcgtcatcctgtccctgggcgaccggtacgtggacatgagcatcctggcgcgcgtgaagaagctccagcagattgtgcgcgacgccgtctaagcgtcccccctgctgcccactgcgcgcctcgtgcgccgccgcatcggcggcgagcgcgctagcagctgccgctgtgtgaccacagctgagctgcagccactgccatttgtaccgtctgtctaggtggcactctctcgcttcatgttgtgctgcaacttccttcactgctccacgct

SEQ ID NO: 7963 - DNA, 455 bp, Chlorella sorokiniana
  Clone ID: LIB3602-074-Q1-K1-E2
tacccaccactggcccgctgaggttcccctgccggcagccggccagtaggcaacacagcggctcgctcaatggcgaaccagtctgtacggaagctgctgcgcgttgtggaaatgaaaatcccatgcatgcatgcatacacagcgccaagctaggaagtgtgaacccttcctcaaacccaagccgattcttccctctattttcttcctcttcacccagccatcaccttgcatttcgttcgctgcccaccagcgttctccgttcatgcaccgattttttcccgtacttcatcagcccatcctcatacgatcgccataccaagttgattcactgcaccaggcagcaccgccccaacctcacagcgcgtcagttgcctccctccttttcatttcaggctgtgccgaatttgcaccattacattgatcgattgcatcaaccagtgcaagattcaggcagt

SEQ ID NO: 7964 - DNA, 450 bp, Chlorella sorokiniana
  Clone ID: LIB3602-074-Q1-K1-E3
ttttttttttttttttttttttttttttttttttttttttttttttttttttttttttttttttttttttttttttttttttttttttttttttttttttggttggggggggggtgggggggggggggggggaagcgaagggggggggggggggggggaggagaggggaaggggagggggggggggagaaaagagggggggaagggggggaaaaaaaaaaaaagggggggggggaaggaaagagggggagagggacagaaaaaaaagcagaaagttgttgggggggaactaaaaaaggttaaaaatcttttgtggagggggcggtttttttgggggcagggagagaaagtgcggggggcgacgttgaaaagccaaaggttggggggcgaaaaaaaaaaaataagggggggggacgtaaaatcacaattatttgaatgtagagggggggtt

SEQ ID NO: 7965 - DNA, 519 bp, Chlorella sorokiniana
  unsure (1)..(519): unsure at all n locations; Clone ID: LIB3602-074-Q1-K1-E4
gcctgcgcgtcagcggcgccaatccagcagcccggnaggcatcaacagcaacacaagcagcggtggcagcactggcaatggcggcggcagaaatgcaagccagggtgcaagcctggggctggcggtcagtggggtggagctcagcggtcacagcgtgcgcgctgaggtggatggccagcagctgcgtgcggcctggtgcctgggcagccatggagaggaggaggtgttggacctgtggctgggcgggcggcagtaccagttcaggcgcccgctggtgcgcaagtggcggcgcagcggcgcggcggcgcagcaggcgggtgcagtcgtcactcccatgccgggccgcatcgtcaaggtgtttgtgtctgccaatgcgtcggtgcaagagggcgacccgctggtggtggtcgaggcaatgaagatggagcacacagtgcgcgcgccctgctccggcactgtcgcagagctgcacagctttgtggatgcacaggtggaggatggccacgtgctggcagtggt

SEQ ID NO: 7966 - DNA, 609 bp, Chlorella sorokiniana
  Clone ID: LIB3602-074-Q1-K1-E5
cggaacccagacgccatcatgcgggccctggtcgcgatcctcctgcttgtgctggtcgtcggagcgctggccaggaagtacgaagaccctgtgaccagctgcatcaagaggtcgaagtgcgcgtccaagaagttcaagccggtctgcgctcgcaacgccgccactcaggacacctggggaggtttccccaacgattgctacaggaagtgcgccaatgccgcccatgactttggtgtggattgggtgaagggccactactaccgcgtgcccaagtactgcaagaccaagtggctggcctaccccgtggagtgctccacttgctccggctactactaggcaactagctgagcaaggcagggcagcctgaaacaggctcccatgtgccgacgctgctggcggcatgaggcacagcaccaagaaaggcagctttcaagggcggcgttgtgctggagcaggcatggccgccagtctggagcgccagctacagcacgttgccgcgctcgatggccctgccaaccagcctcgacgcacagctgaagcgctgcaacacacccgtgacaaaccgtgcaacagcagccacacactgcgttgcttgaaccccctttccgt

SEQ ID NO: 7967 - DNA, 571 bp, Chlorella sorokiniana
  unsure (1)..(571): unsure at all n locations; Clone ID: LIB3602-074-Q1-K1-E6
ngnactctcagtgcggcacaatgagtcctcgggcagcaagcagctggtgcagacgtgcaagtgggccttcctcatgtttagcggcacctttgtcaccgagctgaacgtgcacgaggacgcctcgcagcgcaagctcaccttttcgctcatccaatcggccttcatgaaagaatttgtggggagctggcacgtgcagccggcggccgagggcggcctgaccgaggtgcggcaccggctgtcagtgcggcctagcctggcgcctccccagaagattggtgacatcaccaagaaggtgttcaagaagcaggtggagggcattttggaggacttggctattgagctcgaacggtgaccgcatttgtgatgccaagcgcttgcttggactcctagtcggccgaggcacagcttgcagcggcaacccgtgcattgcagccgggtcgcctgaacagcttcttctgcacccaggcccatgccagcctgttgctgagcccctcaacacacccctgtcccctgtatgctgcgctacccgttgcaccattcccgccgncgcacctgcctgcattgtgcagcg

SEQ ID NO: 7968 - DNA, 390 bp, Chlorella sorokiniana
  unsure (1)..(390): unsure at all n locations; Clone ID: LIB3602-074-Q1-K1-E7
gnaaactatgtacaatgccgagnagcgcggcaagaagcaggtgctgctgcgcccctcctccaggtgctgatcaagttcctctcgctcatgatgaagcacggctacatcggcgagtttgagtttgtggacaaccaccgctcgggcaagattgtggtggagctgaacggccgcctgaacaagtgcggcgcgatctcgccccgctacgacattgcggccaaggacattgaggcgtgggtgggccgcctgctgccctcccgccagttcggccacatcatcctgaccacctcccagggcatcatgngaccacgaggaggccaggcgngaagaaggtgggaggcaaggtcctcggcttcttctactgagcggccttgttggatgcgccgcagcagc

SEQ ID NO: 7969 - DNA, 418 bp, Chlorella sorokiniana
  Clone ID: LIB3602-074-Q1-K1-E8
gtgcaaaaaaaaaaaaaaaaaaaaaaaaaaaaaaaaaaaaaaaaaaaaaaaaaaggacggggggtctcgatgtatcaggaatccacgttcacctaccctgcgcatgcgaaagtcattagcttttttgtagcgaaactctaatttaatggcactggcctttacatctacaacgactgtgactggccaagaccgtggccgagaccaaactgtattcgccttgaaccacatttcccctttgctgcagctggtcgtaatagaggaacgaggcccgatacgcgatttgcccatccccaacagctatgcctcaactctgaatgtgggaacgggcacctcgccctgtagcgttaacattcaagcgcgtgtgggttgtgtacggctcacgcgtcaaccgtgtaccagttacacatgtgccagtagc

SEQ ID NO: 7970 - DNA, 504 bp, Chlorella sorokiniana
  Clone ID: LIB3602-074-Q1-K1-E9
gcgttcgctcagcgtccgcccagcgtccggggactgcagggcgggaggccaccgctgctgcaagccggcatgtagcgtagactacagagcaccacgcacggaaagaagcacgagctgtgggccaacctgtcagtgcaggttcagttccaggtggacggccccgcaggcaaggtgatcaatgtcctggcccacctggctgaggacaaaatcgaggcgctctgagcagcggcggcggcatgcaggagctagctgttgcgtggctgagcatcagctatgggacgcaatagcccgccacggcacatcgtttgcccgtggaaccgcaccctgcttgcaaatggggttgctgcacatttcatcttttgacccctaaacgcacgccatatgatgagttctgctcaggcctacccccaattttttaacagcactcctcactgaaccctgctttggccctgatgcgtgttgatggacgcacgctagtatacgagagtgtaagattgacgatgt

SEQ ID NO: 7971 - DNA, 567 bp, Chlorella sorokiniana
  unsure (1)..(567): unsure at all n locations; Clone ID: LIB3602-074-Q1-K1-F10
cagnagtcttcctctggcgccagccagtggtacggccccgaccgccccagttcctgggcccctacagcacgaacttcgtgcccagctacctgaccggcgagttccccggtgactacggctgggatacctctggcctgtcggccgaccccgccaccttcgctcgctaccgcgagatcgaggtcatccatgcccgctgggccatgctcggcgccctgggctgcgtcgtgcccgagctgctggacggcaccaaccacattgcctggttcaaggccggcgccgagatcttcggcgacgacggcatccagtacctgggcatccccggcctgatcaacgccaagtccatcgtggcgaccctgatcgtgcaggtggtgctcatgtcgtatgttgagggctaccgcgtcaacggcggcccggccggcaccggcctggacgctgtctaccccggcggcaacttcgaccccctgggcctggctgacgaccccgacaccctggctgagctgaaggtgaaggagatcaagaacggccgccttgccatgctgtccatgttcggcttcttcatccaggcca

SEQ ID NO: 7972 - DNA, 591 bp, Chlorella sorokiniana
  Clone ID: LIB3602-074-Q1-K1-F11
ctgcactttggcgcaggccccgggctcatcgagaatcgtgaggcgttcgtgggcgctagcaggcttgtagagcagcagcagcggtggcggcagcgatgaacaagctgatctttgccgactcggcgggccccgccttccagcggatttacaacaacagccactttgcgctggcggccctgctgcccgcctcgctcgtgtcgccgcaggacggcaccattgccaaggtggcggacgtgggcctggcggcgaccatcactgtgcacaaccacatcgcgctcaactacgtcatttctgactacgtgccgcgggcgctccaggtgcctgttcggggcggcgtgctggcgctcagcgcgctgacggctgtggggctgacgaagctggcgctgtccggccctggcatcggcggcgcagtgaaggagctttggaagaagaagtgaaggcggcacaactggctgctgcacacgtggcaaacttggctgctgccatggccagccacacgaagcttcttagttagtgccaaacacgtccgcccacatgcaacccatgaaatgaaccaacaatgccagcggcagctgcccggatggcgggtca

SEQ ID NO: 7973 - DNA, 595 bp, Chlorella sorokiniana
  Clone ID: LIB3602-074-Q1-K1-F12
ccgggtcgaccccgcgtccgctagttctagaatcgcgacggccgccctttttttttttttttttttttttttttttttttttttttttttttttttttttttttttttttttttttttttttttttttttttttttttttttttttttttttttaaacaacccctttgttacaaataaagcccgggccccagatgggggggggggcccaaaagaggccctgtccagggggcccttaaaaaggggtctggatccctgggacggggggggaaggggggggccaaacaaaaaggaggggtttggaaaaattttttcatggaaacaccccttttgtaaaacccgggtaaaggggggacatggagggagggggggaaggaaaaatttcccgggggaacccgaaaaaaagggggcgggggaaaaaagggtcccggtaagggggccccaggtggtccaacggcgaacccccctttgggggggcaaattttggggatggggaagatggtccatggggggccttaaccgggtaaaggggggaaaaggggtggaaaaatttttggcggaggaaaagtaaatggatgggtgccaaggggatgggtt

SEQ ID NO: 7974 - DNA, 632 bp, Chlorella sorokiniana
  unsure (1)..(632): unsure at all n locations; Clone ID: LIB3602-074-Q1-K1-F2
cccacgccgtccgtcgcacaggnnccaacccatgnctgnttgcgtggcggcgccgcnntgcctcttcgcccccggccctcccccccgccctaaaagggcccgcccaagcgccgnnncaccgccatctgctgcnncacgccacgtgcnntctcagccacnntgctgctcaagnncggttggcaagggcgtnnggccaggcgaaatgctggcttgcgtgacgggccgcgcctgcaagccccgtngctgcggtnncatgccgcgacgctcgnngtgctgcattcggcccacgccccctaagggaaagccatgcagcgntgcggncccaagccagccgcccagctgccagcatgacagcagcagccagcagacggcaccccggctgggagcagccactctcagctggtcagcctcccatcagcctcctttcagctcagggcggtttgccccctgccgctctcgtggcgtcgctgacgcgccctgcacccggccgcgcgcaccgctgcgccgctgccgccgctcccccttgctcgctctgcagatgtgaaggacatcaagctggtcattaactatgacatgccctcttgtgcggaagactacgtgcaccgcatcggccgcacgggccgtgcgggcgc

SEQ ID NO: 7975 - DNA, 573 bp, Chlorella sorokiniana
  Clone ID: LIB3602-074-Q1-K1-F3
cgcgcactttgccctgggcagcgatggcagcgcctcggaggcttttgatctccgtcgacaacagcgacgcttcagaagctgcagtgaaatgggtcatggccaacctgtaccaagaaggcgacgaggtgcacctggtgcacgtgatcccccggctgcagctggctgccacctacggcgcgccgcccgtcgacttcctgccgttccaggaccccgcagcctatgaacagctcataaagaccgcagaagactttattgccaagcgggcgctcacacacgtgggcaacatcacgccgcagcccgtggtgcacatcgtcaagtacgagatcgacaccgactcgattggcaacgtggtgtgcaagaaggccgaggagctggaggcggcggtgactgtgctggcgcggcacagcaagtcaaagctgcaagagttctttttggggtctgttagcaacttctgcgtgcaccactgcaagcgcccggtgctggtgcacagcggctgaacggctgagtagcggggcagggccacccacattgcttgtgccgggagcacagcggctgaacggctgagcagcaggc

SEQ ID NO: 7976 - DNA, 571 bp, Chlorella sorokiniana
  unsure (1)..(571): unsure at all n locations; Clone ID: LIB3602-074-Q1-K1-F4
gcagnagcagcattacccacaacgaggggggctggcaggggcccgtttccatcaccctcccacctgtgcctcccctactcatttgtgcagcaagtttgattacattatgaaggtcgccgagcgcccgtgcaagcgaaactcccgcccaatcatccagggcgtcaccaacgcagagctgccgtttgcggaggttggcactcaaatgaagcctggcggggacacattcaacgtgattctaaagaacgatttccgcttaaagggcgcccgcagcgtgcgctggcgcgtgcaagtgccacgccgccaaaaccgcggggcgacggcgcccatgtttgttgggctgatggatgacagcacatacttctcggcatgcactcccgacgacaccttcacaaaggtcgaatgcaacttcaacgccagcctggcgctgcccggcacggcctgctttgccagggattgctggggctcatatgacttcaagggcagctcctccgacgacatgaacctggttgtggcgtacacgcgctcaacgatctacctgggtgcaccctgggtgatcaacgccaccgaaacg

SEQ ID NO: 7977 - DNA, 440 bp, Chlorella sorokiniana
  Clone ID: LIB3602-074-Q1-K1-F5
taaaaaaaaaaaaaaaaaacataaaaaaagaaaaaaaaaaaaaaaaataaaaaaaaaaaaaaaaaaaaaaaaaaaaaaaaaaaggaataaacgggctgggggcttctataggttccaggcttgcgtacccatgccttgcaccggtacttgcttttatcttgcggtgcctttactccgttccactgggctggggggtggctccggggagcaccgtggacttccttggctttaccttccttagtgtccttgccccctttctccttttgggtggttggtgaacaagcgtgggcggcccccccctttcgcccttccacacagttgcactgcctgatgggggattggatctcacgctgtccggaccctttaagctgtccgtgttcggcggcttcccccagctaactggttccatttcttagtgccctacgtcccgcccctttggc

SEQ ID NO: 7978 - DNA, 501 bp, Chlorella sorokiniana
  Clone ID: LIB3602-074-Q1-K1-F6
ggggccggtgcagctcaaggaggagttcatggcgatggaacaccatctggaaggccaaccaggaccgccagggcgcgaagtccaagctgacgggggcgcagggcacgcccgagggcatggacaagatgattgtggggggaggcttcaaatcttccaaaaccaaacacctgcaggagattggctaaataagaggcatcccctcattgtggggtgactgggccacccccattgacttggattctaacaagggaaccaacaagttgtcacacggggagttggtggaaacggccacttggttgccgaagggccccatgaccattggaaggacctgaggggcctccacccccgcacaagggcctttatgacgtgctgaaacgcatattccgcataaaagaccccgcctttgccggaatggcaccccggaagatcttcgtcaccaggaggcgccccatgaggcagcactgaaaatgcctgccaggaagctcgggatggtgtgctgcc

SEQ ID NO: 7979 - DNA, 587 bp, Chlorella sorokiniana
  unsure (1)..(587): unsure at all n locations; Clone ID: LIB3602-074-Q1-K1-F8
cggtggcgtgcctgcggcanaagaggtgggcgacaccgccaagcagctcaacaacctgctgtcctgcgagacggcggtgcccagcggcaaggcgcaggagtggaaggagaaggatgagatcgccgacctgttctccgcctacgtctccaaggaggctgcgcgggagaagcaggacgcggtgcagcgcatcctgggcctggccgacgccgaggcggagggcctgcgccgcatcgtgcaggagggcggctggaagctggcggcggaggagcagcaggagactgccttcttctgaggcggccaactacctgcttaatatgaggcagcctccagctacctgtgaggcagccgctgcccgcctttgccaagtgcactgactgcttggacagcaaccagagcagctgccggggtgccctgcccagcccctacagggtggtgcaaagccagcactcagagcgccgcattcggcgccactcgccgccccagcggcttgcttgcctttcataccggggccggcccgcgccattgcgcgccgccgccccgctgcccctgcccgattttattgccttcttttcgccccgccgctcgct

SEQ ID NO: 7980 - DNA, 572 bp, Chlorella sorokiniana
  Clone ID: LIB3602-074-Q1-K1-F9
gcctaccgctttgtcacgctggttgatgttctgtacgagcaccgcgtgcgcttcctgtgctcggccgaggccatgccgttcgagctgtttgagaacatccagaccaaccaggaagcgagagaggcccgaggcgcaaccggcgcggcacactcgtatgccgacagcggcggcgcctctgaggtgcggcgggcatgccgccaaagatcttctcctctttctagacgctgtagagccgttcgagcagtgtgcggtgcaatgccttgctcgcgtggcgacggttgcttgcctgtgcaatgcagtgatctgccttccgcattgatgcacatctttgcaggtggttgacgacaactcgggctttgccaaggaccgcatcaggagagctgcacttgtttacagtctctgactcggttgagagaacaatttgcacatttctttgcaggtggttgacgacaacctggggtttgccaaggaccgaaccatcagccggctgacggagatgcagagcgaggagtatctgcgggcacacgccaaggcgcacgccccagagctgctgctggcgctgggcgaaccgc

SEQ ID NO: 7981 - DNA, 512 bp, Chlorella sorokiniana
  Clone ID: LIB3602-074-Q1-K1-G10
cacggcaggctccctgaaggagtgggagtgcccgtcaagctgctgcacgaggcgaccggccacatctgcacggtggagctgaagagcggcgagatctaccgcggcgagctgcacgatgcggaggacaactggaacgtgcagctcacaaacgtgcaggcgacggcgcgcgacggcaaggtgtcccacatggagcacatcttcatccgcggcagccgcgtgcggtacgtgattgtgcccgacatgctgaagaacgcgcccatgttcaagcggattgaccccaagatgaagatgaagaatgtggcgctgggtgtgggcggccgcgggcgggctgtggcagaccgggcaaaccggcaagttgggcgcatgtgaggcggcccagccctcacgttgctcccctagcacccctagactttgcttgcgctcgcctctgcttcgctcccctcccttgcccctctgacgctccccacagattgcactgaccggttcggtacatgtaacacacgacacgctga

SEQ ID NO: 7982 - DNA, 622 bp, Chlorella sorokiniana
  Clone ID: LIB3602-074-Q1-K1-G11
cccggtcgacccagcgttcttttggcggcgacctgccggccaagcgcgacatgcgccgctttgtgaagtggcccaagtacgtgcgcatccagcggcagcggcgtgtgctgaaccagcgcctgaaggtgccccctgccctcaaccgcttcacccgcacgctggacaagaacatggccgagagcctgttcaagctgctgatgaagtaccggcccgaggacaaggcggccaagaaggagcggctgctgaaggaggcggaggcgcgcgaggctggccaggaggttgagaagaagaagcctgtggtggtcaagtacggcatcaaccacatcacgcagctggtggagagcggcaaggcgcagtgcgtggtgattgcgcacgacgtggaccccattgagattgtggtgtggctgcccgcgctgtgcaagaagatgggcgtgccctactgcatcgtcaagggcaaggcgcggctgggcaccgtggtgcacaagaagacggccaccgcgctggcgctgacggcggtgaagaacgaggaccagcgcgagttcgccaagctggtcgagtccttcaagaccatgtacaacgacggcccccgcgtcagctggggcggcggcatcatgggccccaa

SEQ ID NO: 7983 - DNA, 310 bp, Chlorella sorokiniana
  unsure (1)..(310): unsure at all n locations; Clone ID: LIB3602-074-Q1-K1-G12
cccggtcgacccagcgtccgccccaaccgnatgtcacctgtggtgcacgtcaaaacccaatgcgctagctgctgactgtggggtgcgggcgcatagcccgctgcccgagagagctccccctcccctgaccaaacgtgaccatgcatcctttccctggcatcctttcccccccttcttttcctggcgtgtcgcccaaccgttgcccgggccgcccattctgcggctcgtggcccattcagctgctgctgcggcctgatcgcaccccatctctggcattccgggtctgtatttgctgtaagcaatatgttac

SEQ ID NO: 7984 - DNA, 97 bp, Chlorella sorokiniana
  Clone ID: LIB3602-074-Q1-K1-G2
cggccgcgtgggctgcaacccgtacatggcttgcgcagccagcgtgcatgtatccatacggcggcatttacaatacagggtgtaagaccgcttattg

SEQ ID NO: 7985 - DNA, 586 bp, Chlorella sorokiniana
  unsure (1)..(586): unsure at all n locations; Clone ID: LIB3602-074-Q1-K1-G3
gtcgacccagcgttcgcccgctgnttgggtggaccagcaccgccgacccgctggagacgtggcgcgccagctgtacttccccaccaaggaggacgccatcgcttttgcggagaagaacgggttcacatacgaggtgcaggagtaccacaacccctcgggccagcggccaaagcgcttcctgggctatggagacaacttctccgtgaagcgcaagggcctgcccaccggcggcctgcggtcggagcagaagaagtgaggcggcttcggcgttcgctgggctggccgcacagcagccctgcgtctacaccgccccttgcggacagggcatgtgtgaccccgcgccagctcaactgcctttgcttgcatgcaccccgactgcttccgctgtgctagttccctcgctcccgctgcgcgcgcggtgcacgccatggcatggcaggcctgaggcccgcccctggtgcgcgctgcgcatgctgcgtttgttacatgttggcaccactggggcgcatctgagcgccgctgtgcttcaagcccgccgccgggtatcaatgtggcgcggcgtttggctgtaagaatcaaatgcaaa

SEQ ID NO: 7986 - DNA, 547 bp, Chlorella sorokiniana
  unsure (1)..(547): unsure at all n locations; Clone ID: LIB3602-074-Q1-K1-G4
tacatccccacgtgttcgacccctcgttggcgccgcccggcaagcacctcatccacgcctacacagccggcaatgagccttatgagctgtgggagggcgtgaagcgcggcacatcagagtatgctgccctaaaggaggagcggtcgcagtgcctgtgggctgccttgngaaaaaatcagccccgatgtgcggattcgagctgaactggcgctcgtgggcactcccttgacgcacgagcgtttcctgcggcggtacaagggcacctatggccccgcaatctcggcagcagacagcagcttcccaggccccggcacgcccctgcccggcctgctgcgctgcggcgacagctgcgctcccggcattggtgtgccagcggcagctgccagcggcatgattgcagccaacacactcgctccggtgtggagccactggcagctgctggacgctctgnggctgtagcgaggactggaggggtggcgcgctgttttaacagctgacgtgaaagccgccgcccgtgccgtggttgatttgacttgacgttctgttt

SEQ ID NO: 7987 - DNA, 472 bp, Chlorella sorokiniana
  Clone ID: LIB3602-074-Q1-K1-G5
tatacagccggtcaccatggtgcagcgcctcacctaccgccggcgtcacagctacgccaccaagtccaacaagcagcggatcctgcggacccctggcggcaagctggtgtaccagctggccaagaagaagacctcccaccccacctgccccatctccggccagcggctcaatgggctgcccgcggtgcgccccaacagcctgcaccgcgtgaacaagagcaagaagacggtgcaccgcgcgtacggcggccacctggcggcgggcgtggtcaaggagcgcatcgtgcgcgccttcctggtggaggagcagaagatcgtgaagaaggtgctgaagctgcaggctgccaaggaggctgcgcaggccaaggccgcggcggcaggcagcaagggcaagaagaagtccaagaagtgagcggcgcacgcgagcggacagttgcgccccatgctcccgctgtaatgcaccctcgatgaa

SEQ ID NO: 7988 - DNA, 571 bp, Chlorella sorokiniana
  Clone ID: LIB3602-074-Q1-K1-G6
cagcttgggctggtctggctcacactggctaaacaggccagttgccagccagtttgtgcccctccatgtgccgccaagcaagtcggcaccacaatcaaccatacgcgcaggtttgcctgcaagtcagacctgtcgcccgagcagatcagccttccgccgggcggctggctggccagcttgcagcggctggaggtgccttatgagatagtggcagcacagcatgtgcagaggcagctggaggctgctgatcagctggaggagctggttgttgacggcctgccactgccaccgtcaggccccctgccggcggcgcttgcattcatcccctgggcggctggccggccgcggtatgcagcggctgacaatcgtgcttacggcgcgctggcgccccggggagcgcagtcagctgcagcggtctgagagcagcagcccatcaggggagcagagcgactcccagtttgctctggagcagcaagtgttggcagccatgtgcgcccttactgccgctgcactgcaagcgcaagcgcgccggcccgggctggcggttcaactcacacgcattgacgagctg

SEQ ID NO: 7989 - DNA, 586 bp, Chlorella sorokiniana
  Clone ID: LIB3602-074-Q1-K1-G7
cgcgaagcggcgcgcgacgcctaccgccgcaacaacggcggcgccagcgtgaaccacatgccggacgtgaacctgcacgacctggaggtgtcccaggcgctgaagaagtgcggtccgcagtggatgccgcgatgaagctggccggcgacggcgtgtactccctggtgactgtggccttcatccccggctggggcaagcacagccccacgggtgagggcaagatcctgcccgccatccaggacctgctggacagcctgggcattgatttcgagatgccgaacgccggcaagatccaggccctgttccctgcggacgcatactaaactaggctgaacggctcaccgacaaagcgtgagcccgagccgtgcgtcccgggcgcaggccggcgggcggcttgaatagcacccgcccgccggatggcagcctggccaccagcttttttgctgccctgtctttctgctccgagctgctttgcttcctgctccgacaagccagctgcacccctcctgccccttttcttgccttgcgcctgttctttacatgcatcctggggctctttgcctcccttgcacctggatacacaccc

SEQ ID NO: 7990 - DNA, 622 bp, Chlorella sorokiniana
  Clone ID: LIB3602-074-Q1-K1-G8
accccggtcgacccagcgtccgtacagccacaactagcgaggcgcgggtgcccagcagcaagcgccggggcgcgggctcggcggcagcaggggacgcatcagagggcgcagcagccggcagcggcaagagcggcaagagcagcaagaaggagagcaagcggcgaaagaaggcggaggcggcaggggagggtgcgggggagccggcggcggcggcggacgcccagcagcagcagcagggggaggcgcaagcggagggccagccagccaagaagcagcggatagtgattgagccggcggtggcgcagagcgggccggtctatccattcgtgcccaccccagccaccggctggtggggcgagaagcggtttgtctctgtcggctgcctcgagggcctggacaagacggcggccgaggcggcgcggcggcgcatgacgttcaacgaagacgaccaggccgccatctacaaccgggcgcaggccaagaagacgcagggcaaagtggggctgggccagggcactggcactgtcaaggtcggcggcgtgaagtgggagggcaagaaggtgacttttgaggagccagagggcggcgctgaagccgaggcagcagaggaagcagcagcagc

SEQ ID NO: 7991 - DNA, 587 bp, Chlorella sorokiniana
  Clone ID: LIB3602-074-Q1-K1-G9
tcgtaaaaaaaaaaaaaaaaaaaaaaaaaaaaaaaaaaaaaaaaaaaaaaaaaaaaaaaaaaaaaaaaaaaaaaaaaaaaaaaaaaaaaaaaaaaaaaaaaaaaaaaaaaaaaaaaaaaaataaaaaaaaaaataaaataaaaaaagggggggccccttttttgggggcccctttttttcctccccgctggttgggggggtgggctttttttttttgggtccccttttttttttttcctggtgcctttttttaacaccttgtcctttgggaaaccccctgggtttcccccttttagcccttttgggaaaaccccctttttcccggggtgggttttttgggaaagggcccccccccgtttccttttcccaaaattggccctctttttttggggtttggggccccctcttttggcctcttttttagcctggggggggtgtttttttcccttcgttggctttttttttttggcgggctctttggcgccccctttttggtttctttccctttctttctcgccggtttccctttttttccccggggactttttaaggggggcctttttttggggcccccttttagggttttt

SEQ ID NO: 7992 - DNA, 559 bp, Chlorella sorokiniana
  unsure (1)..(559): unsure at all n locations; Clone ID: LIB3602-074-Q1-K1-H1
tgccaccccaggttgacacagcagcgcggcagccatggcgtccaagcgtaagggtggcgtgggcggcaacaagttccgcatgaccctgggtctgcccgtggccgcggtgatgaactgcgccgacaacagcggcgccaagaacctgtacatcatctcggtgcacggctggggcgcgcgcctgaaccgcctgcccgccgccgcccccggcgacatggtcatggcgaccgtgaagaagggcaagcccgacctgcgcaagaaggtcatgcccgcgattgtggtgcggcagcgcaaggcgttccggcggaaggacggcacctacatctactttgaggacaacgcgggcgtgattgtcaacaccaagggcgagatgaagggctccgcgatcaccggccccgtggccaaggagtgcgccgacctctggccccgtgtggcggcagcagccaacaccattgtgtagagcggcggccgtccggctgggcgtcgcggcagcgcggaccacactgcagtacccaccgnctgccgngctcccggcgcagcatgctgttatgcacatccagcg

SEQ ID NO: 7993 - DNA, 384 bp, Chlorella sorokiniana
  Clone ID: LIB3602-074-Q1-K1-H10
cgccattcattcctgcctgagtgagggcctcaccccccaatccccgccatcccaccccactttgaacacctcatggttgcatcacccgccacccactcaccttgccccttgctgcgcccctcttcacccgttgatcaccccttgccaacctgccctacccctgctgtacccgtatgtattagttctctgaatacgttccccacttcatttgttccactgttttgagctgccgctaataagtgcaccccaacacgctgtgccggctctttcctggccaatttgcgaacgccagctgccggctgctggtgtcgatgcacccagctccatgcatgctgctgtgacaaaacacgtgctagaacttttcacgtgtaactgaatatgaag

SEQ ID NO: 7994 - DNA, 588 bp, Chlorella sorokiniana
  unsure (1)..(588): unsure at all n locations; Clone ID: LIB3602-074-Q1-K1-H11
cgcttcagnagcagctgccgcccaacagcaacactcttcgagccctcctcacacagccggcgccatggcccgcaccaagcagactgcccgcaagtccacgggcggcaaggcgccccgcaagcagctggccaccaaggccgcacgcaagtccgcccccaccaccggcggcgtgaagaagccccaccgctaccgccccggtaccgtggcgctgcgcgagatccgcaagtaccagaagtctacggagctgctgatccgcaagctgcccttccagcgcctggtgcgcgagatcgcccaggacttcaagaccgacctgcgcttccagagctccgcggtgctggcgctgcaggaggccgccgaggcctacctggtgggcctgtttgaggacaccaacctgtgcgccatccacgctaagcgcgtgaccatcatgcccaaggacatccagctggctcggcgcatccgcggcgagcgcgcgtaagctgcgcgtgcgcctcctgcgcatggcatcaacacggcctcgcagcggctgggcaggtctgcctggaggcgcagtgccagctcgctggcccacagcaccctctcaggctcctg

SEQ ID NO: 7995 - DNA, 289 bp, Chlorella sorokiniana
  Clone ID: LIB3602-074-Q1-K1-H2
tcgcccgttttcgctgccgcccgcggcagccaaccgtcactgcaaatcagatccggtcggtcaatattctgctgccccctcctcgctccctccagtgcctgttgtttttgcccctcgtgccaaccgacagtgtagcgcccacacatgcagcagccaccggtgcagcagacatctgtgcacacccttgctgcagctttttttcctgtaacatcaacacccaaaaaaaaaaaaaaccaaaatgaatgaaaaaaaatataaaaaaaaaaaaaaaaagggaggccagataaaa

SEQ ID NO: 7996 - DNA, 572 bp, Chlorella sorokiniana
  unsure (1)..(572): unsure at all n locations; Clone ID: LIB3602-074-Q1-K1-H3
cgctactacagcgccgtgatgtcgctgngacagtcgctgacgcacgacacggaccctgaagaggaggcttcccaccgcggccaggagcgctgctgagcaccctgcccttgtggtgctgctgccgggcagcctgccctgtgcggccgctgctgctgagcggcccaccatttcagcccctgctggcaagaatcatcgtcccatgcctgtcacaaagccccgctggcgcgatcaacgccctacttacttatggaccgccgcggggcgccccaacgctcaacacccccttgagaagatgccaaagatgagataatgttgacccacccacaatgatgctgtacagttgccctttttgcaaaacgaaccttttccgccacgctgcctggcccggcctcgcgcgcggtacgatgcctgccgagggctcgccgcccattttgcatgactccctaggctgctggccagccacgcgcccccaagctgcacctgttttccctgtttcctgcccatctgtgtaccccttcagcccccctgccgacccgttttttcctgcccccatcctcacccaacccacaagc

SEQ ID NO: 7997 - DNA, 440 bp, Chlorella sorokiniana
  Clone ID: LIB3602-074-Q1-K1-H4
ggtccactctgccttacatgtgtacacacaagtggatgggggggtcgctcaaactcttgaagaccagggaaggatatggtgcccaacgagcagggtgggcagcccgaggggggcaagcacaaccctggggcctgcctcaatctattgcaaattgggttgcatcaaatgctagcgggggtaccaccagcccgcggatggaggggcggcccccttctgtgggggcacagcgctgccaaggaggctgagcagggaagctgatacagtgagctggaggggggaggagtgtggtacccccccttgcaaaggggcgaggggaaaacgggatggaataaaggtagcgggcaaagcctaaacaatcagcaccaatgggtccaattcattcattgaaaaactgcacacagggacacgtgggccggccgcggggccggccaagctggcag

SEQ ID NO: 7998 - DNA, 296 bp, Chlorella sorokiniana
  Clone ID: LIB3602-074-Q1-K1-H5
gcgttcggcgggccacccgcagccggccagcaaacacagcacagcatgcccttgtccttgtacctctccgcccgccccagctggactgctggatttgacccataaaccaatgcctacctgttctcaatttatcactgccgctcagctgcttgtttgtgccaatgcttcatttgctgctgcaacccactgcaacttgctgactgatgtttgacttttgacccgccagccctgatcgctgtcagctcaacaacccagctcatcccctgtacatcacaaggccgtgtaagcgctgctgt

SEQ ID NO: 7999 - DNA, 565 bp, Chlorella sorokiniana
  Clone ID: LIB3602-074-Q1-K1-H6
acgccttgccggcagcgggcggtggcggtgacagcgggcctgctggttatgttcaacagtgcaaggtgcaagcggaggtggcggcggtcgggcagtacgacgaagcgggcaccaaggccggcgattgacaagtacattgctgacaacccggtggtggtgttcagctggagcggatggcccttctgcaagcgcgccaaggcggaacctggatgccacgggcgccaagtacaccgcccttgagctggaccagatggccgacggtaatgcgctgcgggctgagctggccaagaataccgttcggtccagtgtgcccaacatatggattgccggcaagaatgtgggcggctgcaacgacggccccggcgtggccacgctgcaggacaagggcgagctggtgccgatgctgaaggccgccggcgcgctctgatgcagcagcaggctgaaacgcaagctgttgcctggtgccctgccggctgctgtttgtcatgcacgagctatcagattgaacttgacgactgctggtacactggtcgttgtttgatgtgcactttgcaaccaagcggtc

SEQ ID NO: 8000 - DNA, 568 bp, Chlorella sorokiniana
  Clone ID: LIB3602-074-Q1-K1-H7
gtttgagccccactccctgctatcccgtccctgtcttgctcacacctgtagttacgcttgcaccctgcgcccacccgcctgccagcgttgcttgatcatgcgcacgccttccgacccccgctgcgtgcacacccaagtgccgccggggcgtccagcttaccccaccgtagtaccctcgcctcctctgcggtagaccagacatttctctctcccccctatgcccctaggcagccgtgttttatcacgaattatgccgtgtgaggagatgtgcggcaggtggtgtgccgctgtttgctgctgcgtttcacgtttttaattctgggccctcggtgttctgagcgatccacgttttctgagccttgcctgcatgcccacctgccaccattctcaccgcctgacttgcaccccgtcactgccaagcctcgctcgcggtcattagccactccgccgtcacaccctcaccctgctacttccatgcccctgcatctgcctgctgtagacccgcacgctgcggcgctccccctgcatgcttttcctgttgccgttgtaacacgtgacgactcacttt

SEQ ID NO: 8001 - DNA, 474 bp, Chlorella sorokiniana
  Clone ID: LIB3602-074-Q1-K1-H8
gcccgtggctcgaggagcatagaactgcgcctacaacactggagacctacatcctggacatcatctacgagcacatgtggggcacgcgcttgaacctgctggccgacgtcaagcgcggggacatggtcatgggcaccgtcaacaagggcaagcccgacctgggcaagaaggtcatgcccgcgattgtggagcagaagctcaaggacttccggaagaaggactgcttctacatgctactttgatgacaacacggtcttgattagcatacaccaaggcgagatgaagggctcctgctatcaccggcccagacgccataggatgcgcccacctctggccccgtgtggcggcagcagccaacaccattgtgtagagcggcggccgtccggctgggcgtcgcggcagcgcggaccacactgtagtacccaccgcctgccgtgctcccggcgcagcatgctgtaatgcacatccagcgaa

SEQ ID NO: 8002 - DNA, 57 bp, Chlorella sorokiniana
  unsure (1)..(57): unsure at all n locations; Clone ID: LIB3602-096-Q6-K1-D3
tttttttnttatttttttnttttttttttttnttttttttttttttttttttttttt

SEQ ID NO: 8003 - DNA, 62 bp, Chlorella sorokiniana
  unsure (1)..(62): unsure at all n locations; Clone ID: LIB3602-096-Q6-K1-G3
tttttttttttttttttttttttttnntttttttttttttttttnttttttttttttttttt

SEQ ID NO: 8004 - DNA, 54 bp, Chlorella sorokiniana
  unsure (1)..(54): unsure at all n locations; Clone ID: LIB3602-097-Q6-K1-D3
tttttttttttttttttttttttttttttttntttttttttttattttcttttt

SEQ ID NO: 8005 - DNA, 53 bp, Chlorella sorokiniana
  Clone ID: LIB3602-097-Q6-K1-F2
tttttttttttttttttttttttttttttttttttttttttttttttattttt

SEQ ID NO: 8006 - DNA, 63 bp, Chlorella sorokiniana
  unsure (1)..(63): unsure at all n locations; Clone ID: LIB3602-097-Q6-K1-G8
tttttttttgtttttttttttttttttttttcttttttttnttcttttttttttttttttttt

SEQ ID NO: 8007 - DNA, 63 bp, Chlorella sorokiniana
  unsure (1)..(63): unsure at all n locations; Clone ID: LIB3602-098-Q6-K1-C3
tttttttttttttttttttttttttttttttttttttttttttttttttttattntttttttt

SEQ ID NO: 8008 - DNA, 52 bp, Chlorella sorokiniana
  Clone ID: LIB3602-098-Q6-K1-F2
ttttttttttttttttttttttttttttttttttttttttttttttttcttt

SEQ ID NO: 8009 - DNA, 51 bp, Chlorella sorokiniana
  Clone ID: LIB3602-099-Q6-K1-F3
gttttttttttttttttttttttttttttttttttttttttttttcttttt

SEQ ID NO: 8010 - DNA, 64 bp, Chlorella sorokiniana
  unsure (1)..(64): unsure at all n locations; Clone ID: LIB3602-099-Q6-K1-H2
tttttttttttttttttttttttttttttttttttttttttttttnnttttttttctttttttt

SEQ ID NO: 8011 - DNA, 453 bp, Chlorella sorokiniana
  Clone ID: LIB3602-100-Q1-K1-A1
ggggtgacttctgagcaaacaaagccgtatgtggatgtggtcgacaccctgggcgagcccgaattcgacgcagtcctgattgacggcaggttccgtgtggcgtgcgccctcaagatcctgaacttcctgacagagggtccgttgtgatgatccatgactggaagcagcgtaaggacaaatacgagccgccgctgctggagtttacgagatgattgagcaggctgacaagctggctgtgctgcgtcgccgcccagactgggacaaggacgccgcagtggcaaagctggaggagtattatgcagacccagcgtgatggccccgcacctgtgctggagtcagcagcatacacctgtccaataccaaagcacattaccattctgaccccctgcctgtgcctcatgatattcagtggtgcttactccttcttttcacttgacaatgaactgaaaatct

SEQ ID NO: 8012 - DNA, 474 bp, Chlorella sorokiniana
  Clone ID: LIB3602-100-Q1-K1-A10
ccgactgctgccggcctccccgcgaggagcagaagaagcacgctaagagcgcacttgcaggcggcagagaggattgcacaacatgggcgcggtgcgccagtttgtgctgttctttggcggcctgagcgtggcatggtgacgctgaagagcatggaccggctgctgtactcgctggaggagacgcgcgaggagcggctcaaggccaatgagctgcaccatcgggccctgcgggtacaggcagagatgctacgagagcgagaggcgcagcagtagtgaagagtgcttctctttgctcagcaaggctctccactcttctcttgctgccgctcggctgcagccgcgctgaagcgggcgctgccggccccatttctcaacccactccctcacttcttcatgaacattgttcaaccacagctgcttgtactccctgctactttgtgctgcatgtaaaatagagtagcgttccaaataaag

SEQ ID NO: 8013 - DNA, 532 bp, Chlorella sorokiniana
  Clone ID: LIB3602-100-Q1-K1-A11
gcggcggcggcgcactcgctggacaagtcgttcggcccgcgactcaagtactggatggagtactgcgagcagcaccccgaggagctgtgcaaggtggcctcggtgcagaagaaggtggatgaggtcaagaacatcatggtggacaacattgagaaggtgctggagcggggtgagaagatcgagctgctggtggacaagaccgacaacctgcggttccaggcggacaagttccacaagacggggcggcagctgcgcagccgcatgtggtggcagaacatgaagatgaagctgatcgtggtgctcatcctcatcctgattgccgtcatcatcttctgcgccgtctgcttctccggcggcaagcgctgcttctgagccagctgcggcagcgtgcagctcttggctacaccgcggcaagcgctggaaccctctgcgcagcatcaccagcagcagcagcagtgcgggggatggcggcagcccaccccctcaccctttctcttttcccgctaccttctgtttagttccatgtgtgtac

SEQ ID NO: 8014 - DNA, 506 bp, Chlorella sorokiniana
  Clone ID: LIB3602-100-Q1-K1-A12
catccacatcccttcaaaatggcctgcaccatcgccgccgtcgcgcccgtggccgtgcgccccgtggctgccacccccctgaagcaggcccgcaacaccttcgcggcccgcaccgtgagcaatgccaccatcaaaagaccaccgccatgcaggtgtggacccccctgaacaacaagttcttcgagaccttctcgtacctgccccccatgaccgacgcggagatctcccgccaggtggactacatcgtgtccaacggctggaccccctgcctcgagttcgcgggcgctgagtctgcctacaccagcaacgagaactgcgtgcgcatgcagaacaccacctgcctgtactacgacaaccgctactggaccatgtggaagctgcccatgttcggctgcaccgatggcggccaggtgctgcgcgaggtgcaggcgtgccgccgcgccttccctgacgcctacatccgcgtggtgggctttgaccccgtgcgccaggtgcaggtgtctggc

SEQ ID NO: 8015 - DNA, 444 bp, Chlorella sorokiniana
  Clone ID: LIB3602-100-Q1-K1-A2
gttctcgaacccgtgcgcacaaccaccgtctgtgccgcaagcagctgggacgtgctgcagttcagcctgaacctgcgaggcaagcagtacgctgcgctggctgccacggtgcgccacgtcacgcgcacccgctgcaccggcggcgacgtgccacgtcttctggcgctccctgggctttgctccccgcttccagctgctgcgccgcggcagccgcttctgggtgccgctgggcgggcaagaggtggaggtgaccctgtgccacgtgctgcgcctgccgctgtccgcggacgccgccagcggcagcagcgcatctatagatgcggcggcactgcagcgagctgaggatgtgtaccctgggcggctgctggtggaggcaatggtgtgtgcgccagcggatgcagaccctcttgagacggcggcagtagtggggcagctagcggcact

SEQ ID NO: 8016 - DNA, 453 bp, Chlorella sorokiniana
  Clone ID: LIB3602-100-Q1-K1-A3
gacgctccccatgtgcccgctcagggcctgcgtgcgcggcatgggcggcatgatcgcaggcgacctgcccccctacgaggccttccgcatcggtggcaccaactacgtgcgcggctacagcgagggcggcatcgctaggtcgcaactatgtgacgctgtctgcggagctgctgataccgatggtgtcccctatcgacgccactatctctgtagactgcggctcaaacctggacagcggtggctcggtgacggacgacccagccggggcgctcggcaagccgggcaacggctatggttacggcgcatgggtgcggatagacacgtccatcgtgtcgctgctgctcgagcatgccatgaacgaccggcagcagacactcttgcacctgagcataggcacgggtggctagatgctgcggcagcagtgaccgcagcatcatcagagtatcagcacac

SEQ ID NO: 8017 - DNA, 452 bp, Chlorella sorokiniana
  Clone ID: LIB3602-100-Q1-K1-A4
caaaggcaacagcagcggtggtgggagcagccgaggcagtgcacgcggccccgtgcggcaggcaggcggcggcaaggcagcggacaccggcaagctgcgcctcaacaaagccattgcatcggctggtgtggcatccggcgcgctgccgatgagctcgtgtttgagggcaaggtgcaggtcaacggccaggtggtgacggagccgggcaggcaggtggacctgcgcaaagacaaggtgacggtcaacgggcgggagatcagcgcggctgccgtgcagcgcaagttctactttgcccttaacaagccaaagggcttcatctgcagcaacgtgggcctgcaggaggactgcggggagggccgcctggtggtgtccctctttgacgactggattgcgcgctggcagcagcggcaggccgccagggcgcgtgccggcggtggctgcggcaagcctgt

SEQ ID NO: 8018 - DNA, 340 bp, Chlorella sorokiniana
  Clone ID: LIB3602-100-Q1-K1-A5
gcagggggcaaaacaggcaccatgcccaagaagattgaggagattaagaagttcctcctcaccgcccggcggaaggatgcccgctccgtgaagatcaagaagagcggcgacgtgaccaagttcaaggtccgctgcaccgctacctgtacacgctgtgcgtggcggatgctgacaaggccgacaagctgaagcagtcgctgccccccggcctgcacgtccaggagatctgagcggctgccggccggctcagcgcgctggcgggagcagccgcggcgtccccggcagcatcagtgtgatatgccgtgcagcgccgccacccccagtgtaacttgaggcttcg

SEQ ID NO: 8019 - DNA, 394 bp, Chlorella sorokiniana
  Clone ID: LIB3602-100-Q1-K1-A6
attaaaaattttctacaaacaaaatcaacaaaatgatgcccgttccgggtatattaataaaagtggttacgtgaccatcttcaaggcacatgtatcgttgcctgtacacgctgtgcttagcttttgctgacacttcacaacaagctaaatcggtggctccccgcctgtctgtacattcagcaaatatgaacaaatcccgctttgctcagttctctgatttgagcagacgccccgtcctttgcagtatcactaatatatgacacgcatgtcctccacctggaatgctcctttaggcttcttttaaagcgcggaggccttgctggtttcacaaaacatgaccgatacatttgctaactctctaccccccgttcatttttttattttccctaccttt

SEQ ID NO: 8020 - DNA, 421 bp, Chlorella sorokiniana
  Clone ID: LIB3602-100-Q1-K1-A7
cggacgcgtgggcggacgcgtgggctttctttcgtaggcaccctcgcccgcccaggaaatgccccgccccaccccattgataccccgttgcatgtgtgcgctgttccatggccccgtccgtacccaccctacctctcaaaaacccaagttttgtttcccatccgcccctgattcttcccctcagccgcgaagctctgatcgtctggaacctccctttccaacctgccgcccttttcggttgccatttgctggccgttggcacccccccacgccgcgtgccattttgccccgcttcgccctgtttccaattgctgcgtgctacctgctgcgcactcccaagttttccgtgctctgcttttcccctgccaacacgtgacacaggccccacgtgcacagctgcggctatgtgtaaaagcagtgc

SEQ ID NO: 8021 - DNA, 468 bp, Chlorella sorokiniana
  Clone ID: LIB3602-100-Q1-K1-A8
ggctcagcgcaagggtgtggagctcaacgcattcaagctggaggactacggcatcaagtatggctacagcccggtgctgctggcccaccccgacgcgctcagcacccaggcggagaccgtcaaggccttcatggcaccagcgctgagggcttccgctacgcggcggcgcaccctgcggaggcagccaagctgtttgtgcaggccgccaatgcggcgcaccccgacctgaaggagccgctggaggagggcatgtgcgccgacagcatccagtatgtggcgccgcacctgctggctgccgacgggcgctggggcgtgatggaggagcagcgctggtccgccttcctggactggctgtctgacaacggcctgctgaccaccaaggtgcagagccgcacagagcaggacggcgtgaccaccacgctggacggcctgcggcgcggcgacgcgggcgagcccatcccccgcgac

SEQ ID NO: 8022 - DNA, 536 bp, Chlorella sorokiniana
  Clone ID: LIB3602-100-Q1-K1-B1
ccgagaaccccgtaaacccaagtcgagcccccgctcttgcacagccctcggtagcagcaagacaaggcaggccgctggcggcgggtgacttatcaagcccgccgcagcaacccctgcacaggacagaatggtttcagcacctgctgtttgcggcccacgccgctgcccatattctctccccctgccagttctctctctcgcgcccccctgcatgcacaaacctggctggccgctcgcgcaccgtgcctccgtcccccgcgcttttctggtgccgcccggcgagtgcgctttttgacagtggtgtggtggagctccggcccccaccggttctgcgctttgattaacctaacgtgcccgcccccgggcactctgataccaagatccccatgcacgctcccagcctccctacacatccttttccgcacctacccaccccttgcattctttctctgagcagcagcgcgcgcctgatgcgccgttcagcccagctgaacgcgcgcgttggtggcgaacgccgtgtgtgaatatgcatgtag

SEQ ID NO: 8023 - DNA, 487 bp, Chlorella sorokiniana
  Clone ID: LIB3602-100-Q1-K1-B10
atccgggtggccatgggcaagaagctgcgctttgcccaggaggacatcaagatcaacggccactccatcgagtgccgcatcaacgcggaggaccccttcaaaacttcgcccggcccggcggtggggcacctgccgcccggcggcccccacgtgcgcatggactcgcacctctaccctgactacctggtgccccccaactacgactcgctgctgggcaagttgattgtgtggggcgagaaccgcgacgccgccatcaaccgcatgaagcgcgccctcaacgagatggtggtgcacggcgtgcccaccaccgcgcccttccactgcctcatcctggagaacgaggagttcaagaagggcaacgtcgacaccggcttcatccccaagcaccaggagacgctcacggagccccccaagatgaaggacatgagcattgtgtgggaggccggcaagcgcaacgcggcgcgccggaagcacgcgcgcgcgtaag

SEQ ID NO: 8024 - DNA, 495 bp, Chlorella sorokiniana
  unsure (1)..(495): unsure at all n locations; Clone ID: LIB3602-100-Q1-K1-B11
gtctgctgcatatccacccctgctccacccaactgccgcccgctgtgccactacccactacccgcttacagggagctgccatcaacaagtcgctgtcacacctgggcactgtgatcaacaaccttagcgaggggggcaggaggcaggcggccacatcccgtaccgcgattccaagctgacgcgtatcctgcagcccagcctgggaggcaacgccaagaccgtcataatctgcaccgccacggccgcagccgcacatgctgaggagacgaaaaacacgctgcagtttgcctgccgcgccaagaaggtgaagagccgcgccacggtcaacgaggtggaagacaattcggcgctgctgcaccgctaccaggcggagattgcagagctgcgcgcgcggctggcagcagaaggagggtcgcagagcggngaagtggaggagcaagtggcgcagctgcgcgcccagctgctgctcgtggaggaggagaatggcatgctggc

SEQ ID NO: 8025 - DNA, 447 bp, Chlorella sorokiniana
  Clone ID: LIB3602-100-Q1-K1-B12
gcctacaccgccttgcccaggcggctgccgatccactgatagctgtggggcgggtggcgggccgcctgtttgcgggcagtgtggggtccaccacagcggcggccctcatgggcggcctaggggtgctgcgcctcgcatgggcgtcgtcaagtttggcatgcagctcatgctgttcctggcgctgctctactacctgctggcagcacagagcgaccccctgctggcggccgtgggtgtgctgccgctctccgaggcggggcggcagcgcacggcagtggccctcaactgcgcgctgggaggcgtgctcatctcggccgtgaagctgattgccttccacggctgcttctcatggatcaccttcagagccctggctcttcccctcacatacacggcgtcagtggcctcggcagtgtgccccctgctggcctttgtgcccacctatgctgt

SEQ ID NO: 8026 - DNA, 492 bp, Chlorella sorokiniana
  unsure (1)..(492): unsure at all n locations; Clone ID: LIB3602-100-Q1-K1-B2
ctccttgtttcttgccctgcaccagatctccaagcaacgatgcaggctgcccagctccaggctcgcgccacccggcccgccgtggctcgccgcaccaccgtgcgcgtgcaggctcagcaggccgcgccccgcgctcagcccccaagccccagcagtttgctgctggcctggctgccgccttcgctgccgtgaccctggtgctggcgcccgccgccaacgctgctgaggcccgcgcggaagtgaagagcgtggtgtgcgccagcaaccccacctccaagatctgcctcaaggacagcgccaagaactgaggcgtgccagctggactgagcgagcgctgagcccttgctggccgcacctgaggcaggcagccattgctgactgccggggggcaccgggccgccacccgctgcccggcagcatgggcgaggcggcgtgagaaagagaggacttgtgcactgccacacnagtttttggacacctgtgctgaacata

SEQ ID NO: 8027 - DNA, 459 bp, Chlorella sorokiniana
  unsure (1)..(459): unsure at all n locations; Clone ID: LIB3602-100-Q1-K1-B4
gcaagaagtgctctgagggcaagacctgcaagctgaagcgcggcaaggcgcgctgcgtgcggcagaaggaccaggtcaacccctgcgccgccacgctgtgtgccattggcaaccagtgcgttgtcgagggcggaaggccagtgcatcagcgtgtgtgcaagcgtgcgctgcaaggacggcctggagtgccagccggatgagaagggcaaccctcagtgcgtggcgcccgctgccaccaacccctgcgccttcacaacctgcctggttggcaacttctgccaggtcgagaacggccaggccatttgtgtcaccaactgcgcgacggtcaagtgcacggacggcacgcgctgcgagactgacccacagtccggcaatgcggcgtgcgtccctgacggttttgccatgcggcgcatgagctangctgcacaagctgctgctgtggagcagcacacttctgct

SEQ ID NO: 8028 - DNA, 434 bp, Chlorella sorokiniana
  unsure (1)..(434): unsure at all n locations; Clone ID: LIB3602-100-Q1-K1-B5
gctgtctgtaccggagtgtggcatagtctagtctgacacgagctcgagcaccacgtgctcaccgagctcacagatgtgcagcactgagtgctctcaattgactgttgagcgcctgaccgacgtctacctgttagatggcgcacctactgcatactgattgtcacggtttctaccgcccacctgacaccgttctccgaggaaaacgagttcttgaccaccatcgacatcttttcctgaggtctggttggtcttagcagccactatctgagcccacacaggtactgtcattttatcatccagcatagccacacatcncgtgcgcgtgaactaggtgtggcgcacatgtcatgctgcatgcaatctggattgattcctgcactgtgtaaaaatcaagactcatgggcagcactgaggcccggactgtaaacaacagc

SEQ ID NO: 8029 - DNA, 453 bp, Chlorella sorokiniana
  Clone ID: LIB3602-100-Q1-K1-B6
cccacgcgtccggaggcaggcacgtacattcgcacactatgcgtgcacctgggccttctcctgggggtggggggccacatgcaggagctgcggcgtgtgcgcagcggcatcatgggggaaaaggacaacatgaccaccatgcatgatgtgcttgatgcacagtgggcgctggacaacctgagtgacgaggcgtaccttcgtcgtgtcatcatgccacttgagacgctgctcaccaactacaagcgggttgtggtgaaggacagcgcggtgaatgcgctatgctacggtgccaagctgatgattccaggactgctacgctacgaaaatggcatcgagctggacgaggaagtggtgctgatgaccaccaagggagaggcgattgccgtgggtattgcgcagatgacaaccagcattatggctacttgcgatcatgggtgtgttgcaaaggtcaag

SEQ ID NO: 8030 - DNA, 477 bp, Chlorella sorokiniana
  Clone ID: LIB3602-100-Q1-K1-B7
cgctcacgctgttcccgttctttacatatgtgcccacctctggcctgctgggcgagtcgctgcccaaggtcatcttctttgtgcgcatctttgccgacgtgctgggccgcttcctgccccgcctctcctgcctcgcgcgcactcgcccctcactccgctgctcgtctcggccatcaaggctctgggcgtgcccatcatgctgctgtacctcaaaagccccgactggatgcacagcgacgtggcggcagtgatcttcatctgcgtgctgtggctcatgggcggctacatcaacaccatgagcaacatgctggcgccacgcctggcgcccgcacacctgaagagcaacgccgcaggcatgatggcacttgcgtaccaggttgcccactttgtcggcttggcctgcgctacgctgcttgtcttcctcctttacggcaagattggtgtagagtgatggcagccattttgctatgccatccc

SEQ ID NO: 8031 - DNA, 232 bp, Chlorella sorokiniana
  Clone ID: LIB3602-100-Q1-K1-B8
gcgcttgcggacgtcaatatcaattatctcgtgtaaggggaaacatatccactgggggtcgtagaacaaggcaatcactgggagaccctgtcaatgcccaacacagatcgactcgctgaacatcccgcattggattgctgtggctatagcgaacatttcctcaccttgcgcacttcccaacaggaccgcagcctaaatggctaatggaacattccctgtcttgtctcattaa

SEQ ID NO: 8032 - DNA, 572 bp, Chlorella sorokiniana
  unsure (1)..(572): unsure at all n locations; Clone ID: LIB3602-100-Q1-K1-B9
caccaaccacattgcctggttcaaggccggcgccgagatcttcggcgacgacggcatccagtacctgggcatccccggcctgatcaacgccaagtccatcgtggcgaccctgatcgtgcaggtggtgctcatgtcgtatgttgagggctaccgcgtcaacggcggcccggccggcaccggcctggacgctgtctaccccggcggcaacttcgaccccctgggcctggctgacgaccccgacaccctggctgagctgaaggtgaaggagatcaagaacggccgccttgccatgctgtccatgttcggcttcttcatccaggccatcgtgaccggcgagggccccatcaagaacctgaacgaccacctggctgacgcctcggctaacaacttctacgccctgtacgccaagaacctggcgtaagcacttgtcgtacgaacgtacgaggcccgcgcgcgattgtgcgccccttgagaagatcacacgaccctgtcgcaccggactgccgnctgtacgcacccaccatgtgtatgtgctagagcctatgaagttttgtggtagcccttgatactcc

SEQ ID NO: 8033 - DNA, 316 bp, Chlorella sorokiniana
  Clone ID: LIB3602-100-Q1-K1-C1
ggcgcgcgctgctgctgggccccgcggcaaatcgctgaagcagccgtcggctgcatggcacacggctaagaaattcaccacaagacacaaaatttgttttgacttgttgacgtcccgccttgcatgctctcgggcttgttgttttgactctcgactagttgcaactgcgtgtctctccccgcttgacagtgtgttgctttttgtgttgcagctttgcctgtacccaagcagttgcagctgcggtagcgccttccttggccgagctgcctgtcctataatgttttgtgtacattgccatgtgtgatctgaatggtgt

SEQ ID NO: 8034 - DNA, 261 bp, Chlorella sorokiniana
  Clone ID: LIB3602-100-Q1-K1-C10
agcggcagatgggaagacgcgcgcatggttttcataatactagagcagggtggtgaatgtcgttgatgcggtgactgatgagctcattgcggaggactaataagctccgctgcagtgtggtgtaccaccgtcccatgacatagttcgcagtgcgtgcaccacaagttctgtggaatacagtgcgcctggtgagacatgtctggatgagcactctgtgatctaatgcgcgctgtgcactgattccggcatgaagaagattga

SEQ ID NO: 8035 - DNA, 484 bp, Chlorella sorokiniana
  Clone ID: LIB3602-100-Q1-K1-C11
aaataaggagctgaaaaaacggacgactggccatggaaaaacatgctcggcataaagagtgcagggccatgatcacccgaaagggcgggcagtggcgatactatgggttacaaccttgcgtccccctacatgcaccaactttgttttactacgcgcacaaaaactcaatcatctgtcctaagctgacaacgtcgctagtggaaaaaccctggttgaccgaacttaattgtactgcaactcatgccaattgggacagttggcgtattaactaagagactcctacggatattgcttcccaacaattttgcatgctgaaaggctaatggaacgcgccttgtcacgctccaatacaacacatgaacgtggaggatacctgcaaagtgacgtcttaacttgtcagcgccctaggggcaggtaattataataacttaccttcgttccttgccacgttggtgggtttttgctgcaagactttaacctgggg

SEQ ID NO: 8036 - DNA, 215 bp, Chlorella sorokiniana
  Clone ID: LIB3602-100-Q1-K1-C12
gcggaagcggcgtgtgctgaaccagcgcctggaggtgcgggttgccatcaaacgttacacacgcatgcttgccaagaacttggacgtgattctgttcaagttggtgatgatgaatcgacccagtgcacggcgtcaaaactgaacagatgctgaaggacgcggagtgactcgactttgtccaataggttgatatgacaatttctgtagtggtcaag

SEQ ID NO: 8037 - DNA, 387 bp, Chlorella sorokiniana
  unsure (1)..(387): unsure at all n locations; Clone ID: LIB3602-100-Q1-K1-C2
ccaccctgtaccgcaagcagcaccgcaaggacctggaggcgcaggttgcccgcaagaagcggcgcaacgtgaacaaggcggccacccgctccgtggcgggcgccagcctggaggtgatccagaagaagaagagcgagagcccgaggcgcgcaagggcctcccgcgaggcggcgctgcgtgagatcaaggagcgcgccaagaaggccaaggccgacaaggcggtgcagaaggcgcaggccaaggcctcgggcgccggcaaggctgtcaagaacatgcctaagggcgcgggcaagggcggcgccaagagcaccggccgctaagccagcggcaatgcagcgggcgtagcggcctgctgggccgctgccgttgtaacgcacttcctcggng

SEQ ID NO: 8038 - DNA, 460 bp, Chlorella sorokiniana
  Clone ID: LIB3602-100-Q1-K1-C3
gaggcatcggtgcgccaaccactcctatcaacagcaaatcgccaccatgtccgagaaggctgcgatcaaggagggcggcaagaagggcgtggaccttcagggtgtgaacgccatgggcggcgtggtgttcttcaacctgcggtggatgttcccaatggcgacatggcgctgctggagaaggtgatggagggcgccaacgcccccgtggacgaggctgctgaggagcgcaagggtggcgctggcgacctggccaagtgcttcctgtccgcgggcgacaagcagctggccatgttcttccacctgcccaagcagctggcggctgacaagggcgtgaccctgaaggagtgggccgcggcggtgctggcacccgtggagggccaccaggtggttgaggagagcgaggagttcctgaaggtcgtctcgccactggaccaggagaagggccgctttccccttaagc

SEQ ID NO: 8039 - DNA, 466 bp, Chlorella sorokiniana
  Clone ID: LIB3602-100-Q1-K1-C4
aactggacaatgggctgagtctgcgagacaggatacggcttgctggtgtccaactgtgtgatcctgtaccgggtgacgatcaataactcgaccctgttcaaggactgcatgatccaatggagcttgacgatcagctgatggtgccgcatcgagcacaacgcggtgattgccgaagacgtgttgttgaatgacgatgagcaacaacatggtgccatagtgctgcctcacaaagacctaacagagtatgtcatggaaccccatacaatcattatgtgatgcgactggatctgttacaactgcatacctgtcctacctgtctgtgcagtacaactgaaacatgatgtactgaagggtgcccgccgcgcccctgacgagacgcaccaccagccacggctcacccccaataatcactgtgcaatgcccaccctgcccatttttcattctctctccctttgtgcactgcgag

SEQ ID NO: 8040 - DNA, 451 bp, Chlorella sorokiniana
  Clone ID: LIB3602-100-Q1-K1-C5
caccctgtggagcgcgagaagatggaaaagagaagccacggggagtttgacatgtacaagctgctcatgtgcacccatggtggaactggggcctagatgacgatggtggatctgccactgcacatacaagcaccgagcagcaaaagaaaagagtgctgcacatccatgatgaagtgatgctgtccatggtgcgtggtatgacgcatcattgtatactacacccgcatgaagcagctaggttaagttttaagtgattcccaccatcggctaccacttgtagatcaacacgtgctaattcgtggaccacacgatggccgacatcaccttcaagcccgtgaacagagtgcaacggcttgcaaggcacaactgtcgtgcaccgtacactgcgactaatgcccgtgggcacaactactgtgcttccacatcaacgtgaacatgccatacaacgtga

SEQ ID NO: 8041 - DNA, 588 bp, Chlorella sorokiniana
  Clone ID: LIB3602-100-Q1-K1-C6
gaaggccaccttccagctggagatcctgggcgtgaagaagaaccccaacggccaggcctacacggggctgggcgtggtgaccaagggcaccatcattgaggtcaatgtgtcggagctgggcctggtgacccccggggcaaggtggtgtggggcaagtacgcgcaggtcaccaacaaccccgagaacgacggctgcatcaacgcggtcctgctggtgtaaacctcgcaccccgctgccagcagcctgtgccggtggtccgaccgcagcagcagcccagcagcggcggtggttgcaccgccacgctgccatggagcgtgggctgctgctctgccaggttgagagccgcgccgctggttgctgcgcccccttgtagcattattggccctcccccaggccgccctgtagcattgatcttcttcctgccccccatgtcaccagtgcaccacattctgctgcgctgcacccacgcttagcctgcttttcttcctcgctcgccttttctgctaccgttgtagctgccacatttcgttctacctgctctctaccctccgtcccttccctgacgcgccctctggctggacatctgac

SEQ ID NO: 8042 - DNA, 380 bp, Chlorella sorokiniana
  unsure (1)..(380): unsure at all n locations; Clone ID: LIB3602-100-Q1-K1-C7
gcactagcggcgaagtgagcagcctcttccccgaggccgcccctccgcgcccgctgctgtgtgcatgcctgtcggcggatggcgcctcgctggcagcttcaggggaggccgttgtgcttggtgacgatgacatgcgggcagcgagcaggccgggcagccggcgaggggcggccaccagccgctgcgcaagtggtcgccaatacacgtctggcagcggcagagtgcaacgccaccctgagtgtcacttgcatcaaatcgtgaggcgccacattgcaaaacccagacttgaggcagtcggcaattcaggcggtgagcaccccgagcagctgcggtgcagtggtaatcgaatgagggaaaaaaaaaaaaaaancactnnacag

SEQ ID NO: 8043 - DNA, 465 bp, Chlorella sorokiniana
  unsure (1)..(465): unsure at all n locations; Clone ID: LIB3602-100-Q1-K1-C8
gagcattgaggtcaagtttggcatccacccagtggcagggcgcatgcccggccagctcaacgtgctgctggcggaggcgggcgtgccgtatgacgtggtggaggaaatggacgaagtcaacccccagatggagtcttccatgtggctgtggttattggcgccaacgacaccatcaactccgccgccatcgatgaccccaactcggtgattgccggcatgccgttgctggaggtgtggaagaccaatcaggtcatcatcatgaagcgcagtatggcgaccggctatgcgggcgcagacaaccctgtgttttacaagcccaacaccgtcatgctgctgggcgatgccaaggtcatgtgcgacaagctgaagacccagatcttcgagatgctgcacatataagcgccatcctccacactcggagccgagccgcttatggncgttgctgcaaagccggtctgcgagccg

SEQ ID NO: 8044 - DNA, 501 bp, Chlorella sorokiniana
  Clone ID: LIB3602-100-Q1-K1-C9
gcctgtggggtctcaggagcaggatggtgaagttcctgaagcccgggaaggtggacatccttctgtccggccgatatgccggcaagaaggcggtcatcgtgaagaactacgatgatggcaccagcagctcgccctacggacacgcgcttgtgtgcggactgtctaaggagccccggaaggtgatcaagcggacgtccctcaagacccaagcgcgccgctccatcctgaagaccttcatcaaggtggtcaactaccagcacatgatgcccacccgctacacactggaggtggacctcaagggcgtggtgaccgtcgagtgcgtggacaacagcaccaagaaagtggaggccaacaaggaggccaaggcactgctggaggagaagttcatgagcggcaagaaccgtgggatcttcaccaagctccggttatgagggagtttcttggagagcctacgttgcagcagccgtgacgtgacgtgctccttgccccgagacgccatgt

SEQ ID NO: 8045 - DNA, 104 bp, Chlorella sorokiniana
  Clone ID: LIB3602-100-Q1-K1-D1
aaaaaaaaaaaaaaaaaaaaaaaaaaaaaaaaaaaagggggggcgctataaaagaaaacaaaattacatacacgcgcatatgcaaaaaagggagctattgtggg

SEQ ID NO: 8046 - DNA, 539 bp, Chlorella sorokiniana
  Clone ID: LIB3602-100-Q1-K1-D10
gctgactgcagcgcggcaggcccaagcctcgtgcaacgtttcatttgtacagcaaagtcccaccttaagcagcttccctggacacatgctgcccaacgaccgaacccttccctactgcatgcataatgatggatttctttctttcatgagcgcgcatggttgtccatgcaagctgccctgcgccttttccacaccgcccctgcctcccaagtatgtttcgcttgccacctatactcacacctggcctttttactgccttgccgtgacagcagtgcattctgcttgcactcttgtcggcaatcgcacggccgcctctgcccacccttgccctgtacatagtgcaccatttccacctcttctccacaatctgcatcacgcacgcttttgactgcacagcatggcatccggtgatgccttttatgcctgaagaggccggaccgtttgcccaaacagacagtaattcattaggtttgatgcattgtgcccctgttgagggcccggacctaatgcatgcacatttccccgggttataagccttc

SEQ ID NO: 8047 - DNA, 381 bp, Chlorella sorokiniana
  Clone ID: LIB3602-100-Q1-K1-D11
gagagaataaaaaaaaaaaaaaaaaaaaaataaaaaaaaaaaaaaattattaaaaaaaaaatttaaattaagaagattaaatgaaaggtggtaataataacgagggttcttatgaatgatatgtgtatttttttttatgagggcgcatgttttaatgcaactgtctgctcttttcacacagtcatgcctttttttatgttagattgtatctatatccacctgttttaaaatgtattgtggataccgtgattctgaagtactttgtttgaatagaccttttttctaatagtttgcctgtatataggcagcatttgctcttttataatagtgtgtatcacgtatgctttttctgcacactcttgcattcggtattacttttat

SEQ ID NO: 8048 - DNA, 565 bp, Chlorella sorokiniana
  Clone ID: LIB3602-100-Q1-K1-D12
cgctacatgaatgaggagatccgcaagagcaggggctaccgcaacccggagttctttgccaagatggtggagcacctggagattgaccagtacggcacgtccttcgcgccagaggtgttcgaccccaagtcgtgcagccgaggactacctcgacgcgctgcagcgcgagtgggcggccgaggacgagcggcgcaaggcggcacgtgcggcggggcagggccgcgtggagttccacaagtcctcctccaaccccaacctagcgcagccggcgctgaagcccgggctgcagccaggggcggcgcctcaggccactggccagtcgatagcagcagcagcggcacaggcagcagcacgtgcggctgccgctgcggcagcggcacaacagcagcagcagggcggggccaagccggcagcgacttgaacgggagctgcacaaaaccaggcggcggcgcttgcgacggctcaagccaaaacccgtgcagcgcaaatcgcggcgcaactggcggcgcaacggaaagtattgatactgtttgccatggcgtgtgaaaatgacttgtatgacttg

SEQ ID NO: 8049 - DNA, 573 bp, Chlorella sorokiniana
  Clone ID: LIB3602-100-Q1-K1-D2
ggcggcgagtgtagaccacgtcaatgcggcactgctgtgggaccagcagacacgggaccgcttcggctgggtgtggcacaacgtgaccaactttgagccgtacctccgagaagtgggctacgcagccatcccctcgctgctggtggggcgcagcgagcagtgcagcaagcagagcgccacggtggtgctggccagcctgagccacagcgcgagggaggtgttccgcctgattgccgagacgcagatggacccagccggcgagcagggcatcgcgttcccgcgcctgttccagcgctgccgcgagcgcttcctggtgtccaacgagatgctgctgcgctccttcctgaccgagtttcgggaccacgagctgctgcagaccaagcgcgggcaagacggctcagacctgctgctggtgccactgggagaggatgcgctgcgccaggtgctagaggaggtggatgcgatgagctgacccaatcaagtgggtgctgcagaccacacacagatctcgctttggtgccccggtggcatcttctggtacagcctgtactctggcttacagctgcactgttg

SEQ ID NO: 8050 - DNA, 274 bp, Chlorella sorokiniana
  Clone ID: LIB3602-100-Q1-K1-D3
aaaaaaaaaaaaaaaaaaaaaaaaaaaaaaaaaaaaaaaaaagaacagcagggggcgggccgctcttaatctagaaccggtgccgcacggggaagtgggctgctgccgtctgatgatgcccacccgccggcggcagaaagatatacaggggtgtaaactccaggacccctccagcacccattgctgctcgccttttttgcttctgatcactagctttgtcagacggcattgtaacctcgacgcgcgtgcaatagaaaaaaccagaaagcaaggg

SEQ ID NO: 8051 - DNA, 298 bp, Chlorella sorokiniana
  Clone ID: LIB3602-100-Q1-K1-D4
gccgtttggaccgccttttgattgacccctccccctttgattgccaaccctgcctcccctgtaactcgaccgcatgaaaaaaaagggggagtgggatgatgccgaaggaggagggcaaaacgcagacggcaaaaaatgttgggggtgtaaattacaggacccctccaacgccaattgctgttcggcttttttgattttgaacactagcttctagatccggcattggaacgattgacgcaaatcctaaagactgaaaaaacaaggaagttgggcggttgatttacatgatccaacttta

SEQ ID NO: 8052 - DNA, 425 bp, Chlorella sorokiniana
  Clone ID: LIB3602-100-Q1-K1-D5
gtggccgcctttggaggcgcagcagtccagcagcctggcgtaggcggcgcgctggatagcggtggcagcgcttcagtgcagccagtcctgctcgaccccagctcgctgagccgcccagctgttgacgactcactgccgtttcccagggcttgccccgccgacggttgcggctgctccgcgtcgttctcttgatacagtgggagtgagctacctgcatgaatgtgctctgcaccactgcacaaaccaatcctgacacgcttaatatgctctgcccctcaagtacgcccctctgccctcatgtatgcccctctcttcgcaaatgaagcagccccttctgcacatccggtcttctggcatgcaccaatctttgacaacccactgcacagtcttgcgtgcgaatgtgtcagtgtaagctgtacaatgtg

SEQ ID NO: 8053 - DNA, 471 bp, Chlorella sorokiniana
  Clone ID: LIB3602-100-Q1-K1-D6
gttgcaaggagcaatttggggaatcgagttcggctcgaccgaacgcgaaacagccaaccagccaccatgctgatctccaagaagaaccggcgcgaggtgtacaagtacctcttcaaggagggcgtgctgtacgcggagaaggacttcaacctgcccaagcaccccgagattgatgtgcccaacctggaggtcatcaagctcatgcagtccttcaagtccaaggagtatgtgaccgagcgctacgcctggcgccacttccactggttcctgaccgactctggcattgagtacctgcgcgagttcctgaacctgccctccgagatcgtgcccgccaccctcaagaagagcacgcgccccctggagcgcgagggcgcgcgcccgccccgccgcgacggccccccccgccgcttcggcgaccgcgagggctaccgctccgagaaggcgggcgcccccggcgagtaccgccccgag

SEQ ID NO: 8054 - DNA, 584 bp, Chlorella sorokiniana
  Clone ID: LIB3602-100-Q1-K1-D7
gtgaccttcacctcgttcgagctgatcaaccgccagctcaaggtgtgggccgaggcgcccgctgcgccgcccacctcggcgcagcagcggcagcgtgcgcagcaacagcagcagcaggagcagcggcacgcagcgcagcagcacaagcggcagcagcagggcgcggcggcgccggcggagcagcagcagcagcagcagcaggtggggcgtgcagcggtggcgcaccacgctgagtcgagcgcagcggcagcacccgagcggcctgtgggcccgctctttgcggcagccagcagcgcagcggcgggcagcggcgacgctgcgcgcgacccgcggcagctatcagcgcacacccgcaacttggatcagggcggggatccgccggcgcggtgaatatgcgcagtaacgctcccgcctgttgcatttggcccgtctaggcccatctaccccgtctctccccctgcaccccgtgcaaattcctttaccaataactgcacacgggggtggccgcgcctgccggcggtgggcctctgtacctgtgtaatgtaccgggcgcgaaaaagataaaagagcaatttttcaaaaat

SEQ ID NO: 8055 - DNA, 510 bp, Chlorella sorokiniana
  Clone ID: LIB3602-100-Q1-K1-D8
aactggtgctggacaacgtgccggagggaggcaccattgtgatcgtgggtgccggctacatcgcagtggagtttgcaggcattttccgaggcctgggctacaacgtgcacctggttgttcgcggcccggaggtctgcgcggctttgatgacgagtgtcgggcggtggtgcgggagaacatggagaagcggggcatccaggtgcacctgcagaccaaccccaccaagctggagcgcaatgccgagggcggcatcgacttccattactatgataacaaggagcagtcgggcggtattatcaaggcggcccaggtcatgtttgcaaccggacgcgcccccaacagccgcggcactgggctggaggatgcgggtgtcgcgctggatgagaagactcgggcggtgaaggtggatgagtacagccacaccaatgtgccgtccatttgggccatcggcgatgtcaccgaccgcatgaacctgactccagtggcgctgatggagggcaaggcgctggt

SEQ ID NO: 8056 - DNA, 253 bp, Chlorella sorokiniana
  unsure (1)..(253): unsure at all n locations; Clone ID: LIB3602-100-Q1-K1-E1
cgacctggcccccgttgagggtgtcaagtccctgacggcgtacagcgagctgtttgcggctgagctggcgcctgcggcccctgcccttagcgagtgatccacccatttatcagttgcaatcgctcgctgctgcgccgggcggaccgtccaagggcccctcggcatgctgagagatggagagccccccctgcccctcactgtactttgattgctcaatgccattgatgtttgacccatgtaaccgctctcggnt

SEQ ID NO: 8057 - DNA, 152 bp, Chlorella sorokiniana
  Clone ID: LIB3602-100-Q1-K1-E10
ggtgtgtggattttaaatattttctctataaaccattgtacgcttttccataaaacttaatttatagacagttcgcattgttgtatatcacaacatgcaaaaacttgtaacatgctatacgcactcaaattgtgaaaacgactgcaccatgt

SEQ ID NO: 8058 - DNA, 475 bp, Chlorella sorokiniana
  Clone ID: LIB3602-100-Q1-K1-E11
gcgcccaagctgcgcgagaagctgccggcgctgatcgaggcggtgcagcaggcgggccaggtggtggcctgggtgtgcgaccccatgcacggcaacacggaggaggtgtcgggctacaagacgcggcgctacgacaacatccgtgccgaggttgaggccttcttcgatgtgcacgacgagtgcggctccgtgcccggcggcatccacctggagatgaccggcgatgatgtgaccgagtgcatcggcggcggcgcgtgcgtgaacgaggtggacctcagcagccgctaccacacgcactgcgacccgcggctcaacgccgagcaggcgctggagatggccttctacgtggcctcccgcctgcggcagcggcgggagcgcatccagaaggagaaggagcaggcggccaagagcaagggcggcgtgctgctgtactgagctgcgcgctgcacagcgcagcgcagccaccagtgcctcg

SEQ ID NO: 8059 - DNA, 140 bp, Chlorella sorokiniana
  Clone ID: LIB3602-100-Q1-K1-E12
gcggcgcggtgcgcgtacgttgcatttgattccctgccacatctgttccactaacctgccgaaccccattctttttgtgccgcgctgcactgaccagtcgcccagcctgacacggctcggcctgtaagcgccctcagctc

SEQ ID NO: 8060 - DNA, 327 bp, Chlorella sorokiniana
  Clone ID: LIB3602-100-Q1-K1-E2
cttcgacgacgagcaggtcaatgcggtgaccgagtcgcaggtgcagagcgtgtttgggcacacccaagactggcatccaatgagggaagaccagcaaggcccgcatgcagaccacggctacatcctgatgtaccagcgcgtgcagcagcatgcagcgcccggagcagcagtggcagcagcagcagcggctgggcgggcggcaggaggagcggcggcagcggcaggtgcggccagcggccagccaccgccggcggcgcagcagcacctgcagttttaatgtgctgttgagttaaatgcggtctttactgtaacttttcggcactgccc

SEQ ID NO: 8061 - DNA, 385 bp, Chlorella sorokiniana
  unsure (1)..(385): unsure at all n locations; Clone ID: LIB3602-100-Q1-K1-E3
ataaaaaaaaaaaaaaaaaaaaaaaaaaaaaaaaaaaaaaaaaaaaaaaaaaataaaaagaaaaaataaaaaaaaaatgaaaataaaaatgaaagaggggaaaaagaaaaggaaaaagaatgagaaaaggaaaatacataaataagtaaaatgcgtgcagtnnaaggggggggccctttttaggattaaaattttttttccgcgtttttgcaaattataagttttttttttgtggccccaaattaaaattgaggggcggggttttaaaaagcgttttgttggataaaattttggtgtaccaattttttaagtgttggcgtaaattccttttttcggggttggggaaaaaaaaaaaaaggcccttactattttgatttttcaaaaa

SEQ ID NO: 8062 - DNA, 372 bp, Chlorella sorokiniana
  Clone ID: LIB3602-100-Q1-K1-E4
cccttatccgcccaggcagccctgcggagggatgacacatgcattccaggcatcttccacttgactgtcaaaggcaagctttcggtgacgctgacgcaccaccctctgtgtgctgctgctctgcgcgggcgcgcccccgcccgcgtccggcttttccctgtaacttattcgtttgtgcagcgcgcattcgtgcctgccccgctaactgcccccgcggcctccccttgcttttcacaacctgccaaccaatacatcgctcttgcacggtcgattgattgctgtcctcagtagtcgcctccctgtcccccgccttgccgctgtcctgagaagaatgcatcctcgcgcacttgtcgtgtaacccatccaaccgtc

SEQ ID NO: 8063 - DNA, 306 bp, Chlorella sorokiniana
  Clone ID: LIB3602-100-Q1-K1-E5
gcccgggccagcagcagggcagctcgcgctgctctgcgtgccgcgccgtctggtactgcggtacagcctgctcgcacgctgactggcgggcggggcaccgccgcacgtgcaaggcgctggccgcggcgcggcggcggacaaggcagcggcagcagagcagcaggaggcatagagcgccagagtgcgagctggggaccacaaggtggcgcttcctcccaagatgctgtacgcactcaacttgtgtagacgactggtccatgtttctttgcaatgttggacgaagatgtgttgtgagcatgcggaggc

SEQ ID NO: 8064 - DNA, 535 bp, Chlorella sorokiniana
  Clone ID: LIB3602-100-Q1-K1-E6
ctgatgccctctctgcctgcgacagggccatggctcgtgccaaggtcaaacttgtggaccgccaactggcgtgcatgcccatcgacagcccagaagggcgcgactacctgggagcgatgcaggccgccgccaacttgcgtttggcaaccggagtgtggtgatgagctgcgtgcgcaaggcatttactgaggtgtttggcaagagcgcacgcgacctgagcatgcacatggtgtacgatgtggcgcacaacatggccaaggaggaggagcaccagctggacggcaagcgggtgcgtgtgctagtgcatcgcaagggcgccacccgcgcgtttgcgccgcaccaccccatgatcccagagaaataccgggagattgggcagcctgtgctgattggcggcagcatgggcaccgccagctacatcctcaccggcactgagaccgccatgaaggagacattcggcagcacgtgccacggcgcgggccgtgccatgagcaggttgcatgccgtgaagaccatggacagcaagggcgtgctg

SEQ ID NO: 8065 - DNA, 577 bp, Chlorella sorokiniana
  Clone ID: LIB3602-100-Q1-K1-E7
aaaaaaaaaaaaaaaaaaaaaaaaaaaaaaaaaaaaaaagggaaaaaaaataataaagaaaaaaagataaaataaaaaataaaaaaaaaagggggaaataattatatagtggggggtgggtttatttaattggccgtctttttcaaggggggggctgtttaaaatgttgccgttttccattttatttttttttgcggaatatccttttttttgggggttggcatattagataagaggggcggactttatcaacttttggaatttgaaaactttctgttttggcaatgtttattcgctttggaaagggctctttttttgttccctttttgttgttgttaaaaatagtgtgtaccgttttttttttttaaattgttatcgcctcttttatttggttttgttgccttttttttttttgactttttacggtttttgcgttttgtctttacttcgggggctccttttttgtttcacaatggattgttttacgggttcttttatttttaataaattttttttttttggatggcttacggttttttcccctaatatttttttaattgggggttttttttttttg

SEQ ID NO: 8066 - DNA, 77 bp, Chlorella sorokiniana
  Clone ID: LIB3602-100-Q1-K1-E8
aaaaaaaaaaaaaaaaaaagacaaaaaaataaaaaaaaaacaaaataacatacaaaaaaaattaaaaaaaataaaaa

SEQ ID NO: 8067 - DNA, 555 bp, Chlorella sorokiniana
  Clone ID: LIB3602-100-Q1-K1-E9
gcttgggccagatggtgctcaagacccagacctgccgcttcagcggcctcaggatctaccctggcaagggtgtgctgttcatccgcgtggatggccagcaattcctgttcctgaagcagaagtgccgctcgctgtcaaccagcgcaagcggcccgccaagcttgcctggaccaccctgtaccgcaagcagcaccgcaaggacctggaggcgcaggttgcccgcaagaagcggcgcaacgtgaacaaggcggccacccgctccgtggcgggcgccagcctggaggtgatccagaagaagaagagcgagaagcccgaggcgcgcaaggcctcccgcgaggcggcgctgcgtgagatcaaggagcgcgccaagaaggccaaggccgacaaggcggtgcagaaggcgcaggccaaggcctcgggcgccggcaaggctgtcaagaacatgcctaagggcgcgggcaaaggcggcgccaagagcaccggccggtaagccagcggcaatgcagcgggcgtagcggcctgctgggccgctgccgttgtaacgcactttctcgg

SEQ ID NO: 8068 - DNA, 378 bp, Chlorella sorokiniana
  Clone ID: LIB3602-100-Q1-K1-F1
ggctttcaactgaccaaggcagcagcagcttgcctctgtccatgcttagcagcggagatggacagctgctgcctccatgcgaggggactcaacatccgttacagcagcgttgggcgtgtcccggagcagggcgccattgctgcgatgcagccgcagcagcagagcctatctcgcctcccatccttcattcgcctcgatgaagtttccttccccccaatgcttccccaccacgtgttgataagccccgccattttggggcccatcctctgtctctctaccgccgaacgaacctgtgtgcatagcaaaccagcagatccccttcccaagccccaccatttgattcatttgatcgacccttttgtaacagcccagcctggc

SEQ ID NO: 8069 - DNA, 491 bp, Chlorella sorokiniana
  Clone ID: LIB3602-100-Q1-K1-F10
ctttgtgctgatccgcttgcattgcctcttgtcctcactccgcccgcctgtgacacgcccgtcgtgtggctgaccagtgaatgggactgggagcatcgcggctgacacccgaagccatgagcgcggccaagcagtggtggacagcacgatcagcgggaacaaggtggtcatctttagcaagacctactgcccttactgcgtgaagggcaagcgggcgctggagaagttcctgcccaagtccaaaatcaccgcgattgagctggatgggcgcaacgatggagcggcgatccaagactacctgctggagctcacgggcggccgcagcgtgccgcgcgtcttcatcgatggccagttcatcgggggcggcgacgacactgacgcgctggcccgcaacggcaagctggaggtgatgctgcgcaatgccggcgtgctctgagcagcaggaaccaattggcagctgttgatacacaaagcgcactttgcacgggtga

SEQ ID NO: 8070 - DNA, 373 bp, Chlorella sorokiniana
  Clone ID: LIB3602-100-Q1-K1-F12
agccgaagaagcagaagcacaagcacaagaaggtgaagctgcgggtgctcaagttctacaaggtggacgacagcggcaaggtgcagcgcctgcgcaaggtgtgcccccagtgcggccccggcatcttcatggccacccacttcaaccgcgtgtactgcggcaagtgccacctgacgtacgtgtacgacaaggagggccagaccgcctaagcgccccgctcccccctgcggatgcacgcttagcagcagcacacgcggcgggtgcgcccggcatgccggcacaccagccacggagcggcggggcgtccctggcagcggcgcagcgcctgcaagcccttctgttgtgttctgtgccgctgtaatacccctgctgc

SEQ ID NO: 8071 - DNA, 558 bp, Chlorella sorokiniana
  Clone ID: LIB3602-100-Q1-K1-F2
caagagcctcaagtggttcttcatcatctcctgcggcctgctgctcatcattgctgccggactggtggcccagggcgttgtgttcttgacctccgccggtctatttggcaccaccttcccctacgagtaccgccctggtacaacaccatcctgtggaacacctcgggctgctgcgacatgtacaacaaccaattctggtccatgatgcgcgcgctgtttggctacacggaccagcccacgggcctcaacctgatgtactacctgctgtactgggctattgtgctgagcatcacgatctggaagtggtacaccggcaccctcaccgaccgccgccaggcccagattgacgacctcaagtcgtttgcagtccacctgggagagcgcatggacgccgacgccggcctggacaagggcaagcagctcaccagcagcagcagcagcggcggccggctcagcagcgacgtggacctcgagcttggcaagggggaagcagcttttgactccgcggaggcgcaggaaggtgcttaccaggcaccaaacagcgcccctgctgcacct

SEQ ID NO: 8072 - DNA, 449 bp, Chlorella sorokiniana
  Clone ID: LIB3602-100-Q1-K1-F3
ggagggcgagcgggaggactggcgcgccaagatggcggcgcagcgcaaggtggatgtggagacgtttggcggcatgggcgtgtcccggaaccgcaactatcgctacggccggggccggggccgcggctatggccgggccgtggcggcggccgcggcggccgtggtcagcagatgggccagcctgctcagtagccggctgttttttcggccgaggagccgaacagcaatcagctgcagcgtgctgcgcgccagccacccaggatcaaagcaggcccggggcccctggggcttggtgcgcacgccagctgcggctttgaagcgcgaaacatgcggccagccgggcgcgctaagtgagagccgcgcggcgcggcagtcccacgaagcaggcctggggcccagtgactgccagcctcccatgcgcggcgcgccgatctctgtaacagtatggc

SEQ ID NO: 8073 - DNA, 375 bp, Chlorella sorokiniana
  Clone ID: LIB3602-100-Q1-K1-F4
gaagaaaaaaaaaaaaaaaaaaaaaaaaaaaaaaaaagaaaaaaaaaaaaaaaaaaaaaaaaaaaaaaaaaaaaaaaaaaaaaaaaaaaggggaaaaaaaataaaagggggggggtttaaagacatatttaaaaccgaggattagaaaagtaaaatttttaataaggaaggcaaatcaaataatggcgttttgttaaaaggataaaacggaaaaacacttaactgaaccgagttaaacaccattgaacaaaaatcaaattaaaacggaggccccaaaagatagaaactcacgccaattggcattttaaaaaataaaacatacttccattagaattgaaaaagtgcatagtcacgcggtattaaaaattgcaaaaa

SEQ ID NO: 8074 - DNA, 414 bp, Chlorella sorokiniana
  Clone ID: LIB3602-100-Q1-K1-F5
ggagcacgaaggcaaggcgtgcaagaggcatcgctacaagagctcctaggagcagcagaggcggaggcgtacaagaggagcacgaaggcaaggcgtgcaagaggcatcgctacaagagctccccgattggaagtgcaccctcggagcactgccacctgctaacctacgtgaactccccaacgtgaaaacatcgcaacccatgccgtgaccccccgcccctgcctgaccatatgcccgtgatcccctcacgtcttttccctgctgtgacccaagccccaagtttttgtgccccctgccccggatgccctgcccatctgtcgtggtgtcccgacattccggatgcaccccgcccctgatcctcactccccatctgtccatcccccctgcatgccctttgcgctgtaactaattagt

SEQ ID NO: 8075 - DNA, 186 bp, Chlorella sorokiniana
  Clone ID: LIB3602-100-Q1-K1-F6
gcggcgtcccccagatcgctcgtctctctcttcctacctcctgcatgctgcagcaagctatacatggccgttcagccaccgcatccgcgcttttttgcccccctagtgtccttcgtcccctcgcgtgcgtcttactaccgatacctgctgtaccaacaaaacccagccatgtaactgaccgagtgc

SEQ ID NO: 8076 - DNA, 94 bp, Chlorella sorokiniana
  Clone ID: LIB3602-100-Q1-K1-F7
aaaaaaaaaaaaaaaaaaaaaaaaaaaaaaaggacagccgaatataaaagataccaaacttacttacacaatacatgcaacaacataacggggg

SEQ ID NO: 8077 - DNA, 536 bp, Chlorella sorokiniana
  Clone ID: LIB3602-100-Q1-K1-F8
agcgcctggacgacggaagcatgcaggcgctgagccacgcgccgcgcctgcgctccctggccatcaactgctgccccaaggtctcggaccgcggcctgctggccctgacgcgctgtggcacgctacgccacctgtccgccgaccgctgcccgcagctgagcggcactgcgctggccgccctgcagggccgcctgccgctgctgcgcgtggcgcggcctgcaggcgcccgcggcctgctggcccctcagctcgagtactgagcattccggcgcaggctggcgggttgcacagtgccgcctccctgcacccctgcctgttgtacatcgaccacaacccaataaaaaccatccatcaatcaggtcacttatctgttggtccaaactgactgacgccctgtttgatttacataccaacaaacgacgcggcccgcaccgaccgcattttgccagccacactcttttgggcactgccattcccgcatgccttccccactccctgtatccattgcatcccttgcaccgtctgcacgtgtactt

SEQ ID NO: 8078 - DNA, 559 bp, Chlorella sorokiniana
  unsure (1)..(559): unsure at all n locations; Clone ID: LIB3602-100-Q1-K1-F9
cccgccttcagccatgggtaagactcgcggtatgggagctggccgcaagctgcggctgcaccgcaaggacgagcgctgggcggacaaggactacaagaagtcgcacctgggctccgagtggaagaagcccttcgcggcgcttcgcacgccaagggcatcgtgctggagaagatcggcattgaggccaagcagcccaactccgctatccgcaagtgcgcgcgtgtgcagctgatcaagaacggcaagaagattgcggcgttcgtgcccaacgacggctgcctcaacttcatcgaggagaacgacgaggtgctcatcgccggtttcggccgccgcggccacgccgtgggtgatatccccggcgtgcgcttcaaggtggtgaaggtgtccggtgtgtccctgctggcgctcttccgcggcaagaaggagaagccccggaactaaacggcccgcgcccagcagcggcagcagcggcgcgcctcggcaacggggggcgccgngtncggcagcactgcacctggctggcggcggcttgggagggcgtgcaacgcatgcagcgtgc

SEQ ID NO: 8079 - DNA, 299 bp, Chlorella sorokiniana
  Clone ID: LIB3602-100-Q1-K1-G10
gccagcttcagcagcagtgctcctcccccgtctgtccatgaggcctttttcggcgccctgctgttctgtctgtattccttcctctcttgtgcctcgccccctctccccgatatgtatcaggaactgagctgctgatcccaattggttgctttgtggtccggtaacacagcggtagataaaaaaaaaaaaaaaagaaaaaaacaaaaacaacaaaaaacaaaaaaaacaaaaaaacaaaaaaaaaaaacaaaagaaaaaagccaaccacacaaaaataaaatgagggggggcctttttaa

SEQ ID NO: 8080 - DNA, 582 bp, Chlorella sorokiniana
  Clone ID: LIB3602-100-Q1-K1-G11
gcccccggctctgatcacagagtactgcagccagggcagcctgtacgactgcctggccgccggccgcgagcaggcagcagcagcagggcagctgacgtggcggcgccggctggccatggcggttgatgcagctgctgggctgctgtacctgcacaggcggagcatcatccatcgtgacgtgaagagccccaatctgctggtggacgagcactttcgcgtcaaggtggcagacttcaacctgtccaagctgctcgagggggcacggcccgaggccagcctcaccagtgcagcggccaccaaccctatctggctggcccctgaggtgctttcgggcggcagcgcgacggcagccagcgacgtgtacagctttggcctggttttgtttgagctgctgacctggcgcttgccctggacgtttgcccacatgtcacccttcaagattggcgccacagtcaggcatggcgggcgggcggaggtgcccccgcgcgaagcgcttcccgggccttgacacttgccactgggctgggttggacgccttacgtgcagctgatgcgggactgctgggcgcaacgacctggggac

SEQ ID NO: 8081 - DNA, 488 bp, Chlorella sorokiniana
  unsure (1)..(488): unsure at all n locations; Clone ID: LIB3602-100-Q1-K1-G12
acatgaagcaggtcaagttcatgagcttcgtgtttggcggagcagaccaatacaagggccgaagcatgtacgacgcacacgcccatctggtcaagggccacggcctggaccaccgccactttgacaagatcaagcagtaccttggagagacgctgcaggagatgggcgtcaagcaggatgtgatccagcacgccgccggagtggtggagtccacccgcgacgaatttgacttccccaacaactgcgcacccaactgattttcatcaacccaaccccagcctgagcgctcattccatcgattntgagcggggagcgccagttgccgagcgcgcccagngggcccaggagcctgcaaatcgtttgccagcccttgctgcattgaagagccatcagccattttcgcaccaagcccgccgagttgcctggcacttgcatttcattaccgcctgcccgacattacgcttgcccgagttgattgtacctgcatt

SEQ ID NO: 8082 - DNA, 459 bp, Chlorella sorokiniana
  Clone ID: LIB3602-100-Q1-K1-G2
ccagcctcctctctttttcgaacaggctcttgcccgccatccgtcgatccttgcatctgcccgatagtctgccgtttcatctggattcaggacctttttccactacccagattatactcggcacgtgctctacagtgttttacaagctggttccaccgttcctgcaccagccactccactccctgctagcatgtggcccctttgcttaatctcctgccacccacctgcctgcatctggcggtccacctgctcatgcgcgaattgcgccgacatgcacactcaccgctcactgcgacgcagccaattgctgcctgacctcccttaaactctcaccaaccccgcggcacaccctctgcctttaccctgaggggcatacgctcccaacctaataaccgtttggcacaagctgctgaccagcgagctgcacatcaatgctgtagtatgcccttgtaactagat

SEQ ID NO: 8083 - DNA, 585 bp, Chlorella sorokiniana
  Clone ID: LIB3602-100-Q1-K1-G3
ggagaagattactgatgctgaggtgaacgcgggagagatggaggtgcgggacgcgctgcaggccaaggctgagtttttgtgcagcatcggcgaccatgcagcagcggtggaggcgttcaaagcggcggaggccaagactgcgggggtggggcccaagatggacctctgcttttcgcagatcaggctggagctcagccgcggcgacctgcaggcagtgaaggctgagctcgagcgggcaaaggtgttgtgcggcaagggcggcgactgggagcgcaagaacaagctcaaggtgtacgaggcggtgctgcgcatggccagccgccagttcaagcgcgctgctgagctgctgctggacgccatcgccaccttcaccagcggcgagctgatgccgtacgagcgctgcatcttctacaccgtggtgctggcggtggtggccctggaccgccccacgctgaagagcaaggtcatcgactcgcccgaggtgctgtcggtgatcgactcgctggcccacctgcgcccctttgtctcctccctctacgactgccgctacgcagccttcttccaggcgtttgcggggctgacgga

SEQ ID NO: 8084 - DNA, 477 bp, Chlorella sorokiniana
  unsure (1)..(477): unsure at all n locations; Clone ID: LIB3602-100-Q1-K1-G4
gtgcaacctgaacgacgagcccggctacaagtgcggtgacggcatggacgatggttcggccgacagcgacttcctgctcctgcaggaccccgagatggcgctgtactgcggcatcactgacctggatcgccgggtggaggagattctggactgggcttacgatggcgagcggtggggtggcagcggctgcggcattgttgcgtacacagtcagcaagatgtgcgtcggccagggcgcctccgaaggacagtggcgggcgcgcgtccagctctggcccactgacccggatcagtgcaagggcttctgtgtcaagatgcgcggtaccactgattcggtggatgtatacggccgcaccgacacctgctgaagcatcgcacagcgcagcaatgattccagctgtgcagcggcggcttgcgctatgcangaggccagtaagcacgcccagttagcaatctgccctagtgttgttttcccgct

SEQ ID NO: 8085 - DNA, 481 bp, Chlorella sorokiniana
  Clone ID: LIB3602-100-Q1-K1-G5
ggacaacaccacccgccccacgattgggctgagcgtgctggagcagcctgagggcccgcccgatggctttgacgagctggcatccaccccccaggactgggtggcaattccagacgatgcagcgctgttcaaggacctgccttacgaggaggcaggcctggttgcagcgggcccagcgggcgaagcaggcgaagcgccagcgccggcgccagcgcaggacgacagcggcagtgaggaggagctgcttgcggaggcagaggccgaccccgcggcgctggatgccacagatgcagagcagcagcaggcagctgaggagcagcagcggcggtagcctgaggcggccaggaggctggcttgcaagcacactcgcccgcaattgctgctggccaatgctgaacctccatggaagacacagacttcaagctttgattcaaattatgatgaactaattgcacttgctgctgtaactgattctctgctg

SEQ ID NO: 8086 - DNA, 407 bp, Chlorella sorokiniana
  Clone ID: LIB3602-100-Q1-K1-G6
cacaggtcaggcggcggtgtatggcggctggttccgccccagccccaagcccaagacgcaggggcagcagtgaggcggggccggcgcacaacagccctggccacggcggctcgcaagctggcttgccagccccacacggcagggcaggtagcctcgctccatcttggcaccagcccggctggcagcggcacgcgctcaaagcagcacagcaaatgatgaccaggcgggatgccaacctcacagtagcgtgtgtttccagttttgatgctcggtttttggaacccagatttttcccactgctcctctcagcccgactcagcccatctgacttgcacccctgcatgctttctggccctgacccatgctcctcggtccatttcattgacacctagcgacttgttacacgc

SEQ ID NO: 8087 - DNA, 585 bp, Chlorella sorokiniana
  Clone ID: LIB3602-100-Q1-K1-G7
atggagtttgcgctgagcaagaggtgagcgctgcgcgcgctgtggttggtgccagccgctgtgactgtcctgcaccagctgcacgcatgggcgggcgcggtccgaaagactgtgctgcctgccagctgaaggcacggagttgtgcaacctgccgcagtgtgcatgcttgacagcctaacaggccaatatgctcccctacctcgtgcctgcagccgcggcgatgctgcttatctgcgggcgctcaaggaaatgatgcacggcgatatgtgagctcgcagcagcctcgttaggccatttgcacgggaggtatgggtttctttagcccttctgcctactatttgcctcgcgtgctccttgcgatgcgctgcctgtgtgtgccccgtgtcgtgccgtgttttcccccatcccactgtccctgtcccccatcgtcgcactacccttgctgctgcgcattcattcgatctatcgcacccccgccggatgcacgttttgatgtaccatccatctgccggtagcgccctgcactgcaatttcgctttcatttggttggcctgcacatttgccagcccgctgctcgcgcctttt

SEQ ID NO: 8088 - DNA, 497 bp, Chlorella sorokiniana
  Clone ID: LIB3602-100-Q1-K1-G8
tctagatcgcgagcggccgcccgcgatctaggactagttctagatcgcgagcggcctggtcaacacacactactgctacctgcccatgccactcatcatccaggcgccgcggcgggtggaccctaacggcgagctgtggaaccggctgcgctccagctgcgggcagcccaacttcagcaaggcgtgagccgcctcgcgcacaggccgaggagcctgtctgcttgctggcgggacgctgccccactggggctgccccagccgaccgcttgataccgcggcacagtcagcctttttgctgcggtagctgctctagatcgcttctggggacacgtattgctactcatcactgttcactgacctctgcccttgctgtttgatgctgctccccgctcaccttgctacggcttttgctcccgcccagttttttcatgtgtaccaaccagccatgccttatatgtattatccgggtgtttcgcctttgtttgctgctggctgct

SEQ ID NO: 8089 - DNA, 407 bp, Chlorella sorokiniana
  unsure (1)..(407): unsure at all n locations; Clone ID: LIB3602-100-Q1-K1-G9
attgcgctggtctacctcctgcgtgccatcccgcggtggaagcgcgtcacctgcaacggtggcgtgagcacagagagtcgctggggcgccagctctggggatgtggaggcgccaatcgtggtccatgacgcacagctggcggcacatcgaagcagcgcgtccagctcagctcggccagtggtacgaacgatgcctgagtgtggcagagcacggctgactcaatccctactttgcttacaagacacccaagttgacaaacgtgcatgccctgttgagttgcacggaagaataatgattgcaaagctgcctgccaccgctgcacggggcgcgcgctaatgctgctgcgctttgctcagcagctttgctctacattcctcgtcctgcgttcgtgtcatccgatcacanga

SEQ ID NO: 8090 - DNA, 479 bp, Chlorella sorokiniana
  Clone ID: LIB3602-100-Q1-K1-H1
gcggcagccaccatggtcagcaaggcgtgcgtttcgtggctgcaaacggactacagggccatcctcagcgagccagtgctcacagatcaccgcgcacccagcactcaacatcctactgaagtgtcactacgttatgagggcagcacgggaaccgactttgacggcggctgctatcatggcaaggttatctttccggcgcagtacccatacaagccgcccagcatgctgatgctcacgctcaacggccggtttgtagtcaacaccaatctctgcctcagcatgtagtacttgcaccccgagacgtggaacctcatgtggagcgtgagcaccatacttaccggcctactgtccttcatggtcgagacgcatcacaccacgggtgccattagcacctcttctgccgagaagcagaagctggcgcgcgagtcgctggcgtacaacgtgcgcaaccccaccttcaggaagctgttctctgagtg

SEQ ID NO: 8091 - DNA, 188 bp, Chlorella sorokiniana
  Clone ID: LIB3602-100-Q1-K1-H10
cccacgcgtacgcggaagaagcaccgagtgccagcccgatgcgccccaagcacagccccctggccgaaagcctgggtgccagcctatagggaagtcaagattagggcattggcgggagaccgtactcctctaccgtgctgtgcacacaaatgcaacatgcttgacagcccgttaaaacgagcgcagtg

SEQ ID NO: 8092 - DNA, 417 bp, Chlorella sorokiniana
  Clone ID: LIB3602-100-Q1-K1-H11
aaaaaaaaaaaaaaaaaaaaaaaaaaaaaaaaaaaaaaaaaaaaaaaaaagaaaatataaatttaaaaaaaataaaattaaaataaatgggaggaaaaaaaaaatggggggggtttttttaagttaaaatgattagttggggttttttacaacatcatatttttttaatagtgccattaaaaaaaattttattggtcggtttttaaaaactttgtttttggaaaatctttgggtttacaaaattaaatggttttgtagcaaatacatttttagtatgattggttaataaaaaaaaggctgtaatggaacgtttttttaaaaatttgcttagtttaaatgaaaaatggaaccccctttttactggcctttaaactgggggggtatgggtggtttcccttaatttaatttttaaattgg

SEQ ID NO: 8093 - DNA, 251 bp, Chlorella sorokiniana
  unsure (1)..(251): unsure at all n locations; Clone ID: LIB3602-100-Q1-K1-H12
gactcactatagggcgaatnnnnnnnnnntngngacccacgcgtccgattgaacacataaccttttcgcacccaaatgtatgattgactgcgcctttaatacgtccatattttgctggcattcaaacatctgattttgcatcatgcactcgctcatccgccacgcctcaaaaccacttgtcgatgcatctgcatcgaaccaaagcaaatgcatccttgctcgcccatcaagcatgtaacacgatcaccgct

SEQ ID NO: 8094 - DNA, 458 bp, Chlorella sorokiniana
  Clone ID: LIB3602-100-Q1-K1-H2
ggtgtggtaggcgggagcacagtcggtcgtgaaacacgcgcttccccacaatggccggcgagcgtgtgcggctctacgtcacgggccagttcctgggctacaagaggagcaaggccaaccagtacaaccacaccggctggtgaaggttgagggcgtgaacagcaaggaggagaccgagttctacctcggcaagcgcctggcgtacgtgtacaaggcgaagaccgagaagaagggcagcaagtaccgcgtgatctggggcaaggtgacccgcgcccacggcagcgtcggcaccatccgggccaagttccagaagaacctgccccctgcggccatcggcagcaagatccgcgtgatgctgtacccctcccgcgtgtgagggtcggttgcttcccggagcagcagcggtgcggcacggcgcggcggtgacgagtcgtggcagtgcgaccccgctcggcacg

SEQ ID NO: 8095 - DNA, 479 bp, Chlorella sorokiniana
  Clone ID: LIB3602-100-Q1-K1-H4
ccaagatgaaccgcacgattgtggtgcgccgcgactacctgcactacatcaagaagtaccagcggtacgagaagcgccacaccaacatctcggcgcacatctcgccctgcttccgctgccacgagggcgacaccgggtcatcggccagtgccggcccctgtccaagacggtgcgcttcaacgtgctgcgcgtcatccccgcgggctctggcgccaagaagggcttcggctccttctaagcaggctggactaagggcctcttgccttgctggctgaagccctcgacagcagcagcagcagccccagcacggcatgcaagcgctgcagacgccctgctgccctgagtaagcgccgccatgtgccggcggtggcagcagcaccgcccgccttgcatacacctggcccctaggatgccggccacggtgcgcccagtagtcgccagacggcggggtgcagcgcatgtaaccgtgtgcatgaaaa

SEQ ID NO: 8096 - DNA, 431 bp, Chlorella sorokiniana
  unsure (1)..(431): unsure at all n locations; Clone ID: LIB3602-100-Q1-K1-H6
attgatcatagatcgcgggcggccgctcgcgttnatttttttttttttttttttttttttttttgggcagcgccttacataagggcaggacagagagagcttcaactgttggtgaggacaggcgcaaaatcaggggcaggacagctgagccagcaggcgtcggaaaggaacaaacaggggacagtatgaaaacatgcggctgtgtgaggggcggccgggaggacagctggcgctgcaaacccgccccttgactgccgaacacgagaggattggttttggtgttgcgcccggctgcccaagcagggcccgttggggtcacttcctgccctgcccgagtgccctccgggctacttgatagaaggagggccttccgcttcaagggttctcttcctgctccgccttggtcagctcaatcgcctcctcctccgtca

SEQ ID NO: 8097 - DNA, 527 bp, Chlorella sorokiniana
  Clone ID: LIB3602-100-Q1-K1-H7
gagcggggccgggagatgctggatgcagtgcggccgcggctggaggtgacaccggcaatgagcagcggcagccggcgctcctttgtcatgcagaccgtgctggctgacgacgaggccaagctgggcaaggcgcccaagcctgccccccgctggctgggtaatgcgctggcctgggtgctgggcctggtggggccaaagggcctggagtttgcaaagtactccatcgattaccactacctgcgcaatttcatccacgtgtcgcggcactggggccccacgcgcgccgcgcagcatgtgcccgagtttgcgcgccgcattgttgccgagtacgaccagcagggggcggtgagcgctcgcgcggcgctcaaggggcccatgcccggcggcaagcaacgctgatgccgtgtggcaggcatgcctggcctgtccattgccagctgcttcagttgagattactgcaacaactcagctttctttctgaaagatctcttgcgtgcagcttcagtctgctgatttcatgttcccac

SEQ ID NO: 8098 - DNA, 467 bp, Chlorella sorokiniana
  unsure (1)..(467): unsure at all n locations; Clone ID: LIB3602-100-Q1-K1-H8
ggcccgcgggtccgacctgcgcgtccacttcaagaacacgcgtgaggccgccttcgctctgcgcaacatggacctgaccaaggccaaggcgtacatgcaggcggtgattgaccacaagcgctgcgtgcctttctggctacaacggcggcgtgggccgcacctcccaggccaagaacgagggcaactcgattggccagggccggtggcccaagaagtcggccgagttcctgctgggcctgctgaccaacgcggagagcaacgccgagagcaagggcctggacgtggatgcgctgtacgtgagccacatccaggtcaacaaggcgcagaagggccgccgccggacttaccgcgcgcacggtcgcatcaacgcctacatgtccagcccctgccacattgagctgatcctggcggagcgcgggcaggcggtgaaggccgangcggatgacaagcgccgcaagctgagcaag

SEQ ID NO: 8099 - DNA, 73 bp, Chlorella sorokiniana
  Clone ID: LIB3602-100-Q1-K1-H9
cggacgcgtgggaaaaaaaaaaaaaaaaaaaaaaaaaaaaaaaaaaaaaaaaaaaaaaatatgcggggggggg

SEQ ID NO: 8100 - DNA, 405 bp, Chlorella sorokiniana
  unsure (1)..(405): unsure at all n locations; Clone ID: LIB3602-101-Q1-K1-A1
ggcccctaaagagcagaagtcgaaaggagcgaaagcccctgcccnccgccaactccannangggcaagaagaagaaatggtccaagggcgggctgaaggagaaggtgaacaacctggtcctcttcgacaaggccacctatgagaagctgctcactgaggtgcccaagtacaagatgatcactccctcggtgctgtccgaccgcctgcggatcaacggcagcctggcgcgcgccgacatcaaggagctgctgggcaaggggctgattaaggaggtggccaagagccgcgcgcagaagatttacacccgcacgacggcagccgccagctaagcagccacccagcagtttggcagcatgctagtgcactcgttgtgcttgccaatctggtaacaggtccctcgcanna

SEQ ID NO: 8101 - DNA, 334 bp, Chlorella sorokiniana
  Clone ID: LIB3602-101-Q1-K1-A10
ctagaacacacctaccgcgtcgcaccatctgattgtgatggtgcgcccctgtaccaaagcatactgcagcgattgtgctgcctgctgagcgacgtttcaagttgactgtattgcgtgtgcgcgatttgataccacagtctctccctcgtgctcctcccgactttcaaaggcttctttatgcatcggtacattcatcggcgcagcttttttccagctgtttcaatgtttatgccacttttgtgtgtcttcttgtaagtatgccgtgcaaaaaaaaaaaaaaaaaaaaaaaaataaaaaaaaaaaaaaaaaataaaaataaaaaaatattttaaaa

SEQ ID NO: 8102 - DNA, 431 bp, Chlorella sorokiniana
  Clone ID: LIB3602-101-Q1-K1-A11
gcttctacggcgtggtggtgcagtcgcggcggcacacgggcgtggagggctgctacctgctcaagacggtgcgcaacgtgagccccggcaccggctgctgctgcacccacttctccctcacccgcatcacctcgggagagcacctggagaagcagtttgtgcagtcctggctgctgtgagccgctgctgtagcctgctggcgggcaacggcagctgcgctgcgcggctctgccgccccgcctgccgccccggcccccggccaaccaccgcccccaccaccacctgtcacccgccctgtatggcctctagactttgagcgtgagctgcccctgccacttctgcttcctgtgtgcaccccgcgtgtggcatgatgatactatggatcccctccaaatcgacttgcgaatgcactcgccccgcttttgttcact

SEQ ID NO: 8103 - DNA, 292 bp, Chlorella sorokiniana
  Clone ID: LIB3602-101-Q1-K1-A12
attccgtgcgacccaacccttcgggcgtgtccatcgcaacgtgccagccccacaatcacacccgcttgctgatctcttacctttttaagacgatgctcaacattagccgagcgaccgtatactaatgcggcaacttggatatcacacactaacctccataccatatccagaacgttatctggccacactgcttgatcacaccccttaacctactctgctaatcagacaactgcaaatgtgctgatcggatctgacaacaagaactgcctccgccggcccctataaagtacca

SEQ ID NO: 8104 - DNA, 354 bp, Chlorella sorokiniana
  Clone ID: LIB3602-101-Q1-K1-A2
cctaggcagggttacacggcaggctggctagtgtacagagttggctgcgctcagatgcggcgcgccgcaaagaagggaaaaaaggctacggtgggttgggtctggatcaaacgaggcaaatcacatacagcaagggagctaggcagggggtctctcagtaaacgctacgcaaggcctgctcagaaaggccgtaaaacagacgaggggcggggctcagcgctgtcacaggcagggtggggtaagcagggatgggtgcggacggcaatgcagggcgttggagcgacacaagcggttatggggcatgaaatatccgggcgataggtgctaacggctgctgcatcggggcatgctaca

SEQ ID NO: 8105 - DNA, 406 bp, Chlorella sorokiniana
  Clone ID: LIB3602-101-Q1-K1-A3
ggcggtggggcgcgcgctgggcgccctgagcgcagtatgatccgcttcgtgctgctgctcagccggcagggcaaggtgcggctggccaagtggtacaccacgctcagccagaaggaccgggccaagatcacaaagaggtgaccaacgtggtgctggcccgccccgccaagctgtgcaactttgtggactggaaggaccagaagattgtgtacaagcggtacgcctccctgtacttcatcgccggcattgaccaggacgacaacgagttgctgacgctggaaatcatccaccagtttgtggagatcctggacaagtactttggcaacgtgtgcgagctggacctcatcttcaacttccacaaggcctacttcatcctggacgagctgctgctggcgggggagatgca

SEQ ID NO: 8106 - DNA, 493 bp, Chlorella sorokiniana
  unsure (1)..(493): unsure at all n locations; Clone ID: LIB3602-101-Q1-K1-A4
ccaccggtggccgaattttccagctgcccagcccgcgcctcgcctggcgctgactggcctgctgccgcctccgctccctcgcctcacctcaactcccgtctagcaaagcaacccctcgtctcgcatagtacgtcaatgcacccttgcgggagcaggctgcgccagcccatgctgcgcctgctgttgcaaatggccctagcggccagcctgcgctgtgcccagcccgctcccccttcctctcggatgccctgcccttttgaagcaatgcacctacccctagcgaactacctgccccgaaacacgcaaaccctccccccaattgcacagcagcacgccacacgcccgttgtccctgctgtgagctgcggccgctcggatttcataccctcgtgcccgtccaccgcagcagcatttcatacacacgcaactcgccaatgccttgatgaacaaacgcncccagagtgcctaagcaaacgcgctggtacaacacacag

SEQ ID NO: 8107 - DNA, 327 bp, Chlorella sorokiniana
  Clone ID: LIB3602-101-Q1-K1-A5
acaaaaaaaaaaaaaaaaaaccaactgcccaaaacaaaaccaaacctgaaacaaaaaagaactaaaaaaaaactacaatccctaaaaaaggggggaactgccgtccgctcgagcggcccgtcctttcgcccccttcctcactgctctcctttgctcttagcatggctgccaccttcaccatgctgccgcctgctcttgcttttgcccctatcaaccggcagccccctgccctaccccctcttaattcctttcccatactcccccctttggccacctggcttatacccctagcggcctaccccacccgcccttccaacacttcctccc

SEQ ID NO: 8108 - DNA, 400 bp, Chlorella sorokiniana
  Clone ID: LIB3602-101-Q1-K1-A6
cgcgtggccaccccaggttgacacagcagcgcggcagccatggcgtccaagcgtaagggtggcgtgggcggcaacaagttccgcatgaccctgggtctgcccgtggccgcggtgatgaactgcgccgacaacagcgggccaagaacctgtacatcatctcggtgcacggctggggcgcgcgcctgaaccgcctgcccgccgccgcccccggcgacatggtcatggcgaccgtgaagaagggcaagcccgacctgcgcaagaaggtcatgcccgcgattgtggtgcggcagcgcaaggcgttccggcggaaggacggcacctacatctactttgaggacaacgcgggcgtgattgtcaacaccaagggcgagatgaagggctccgcgatcaccggccccgt

SEQ ID NO: 8109 - DNA, 359 bp, Chlorella sorokiniana
  Clone ID: LIB3602-101-Q1-K1-A8
caacccttccgataagtgcgtgcgccgtcggcccgatctgttaattattatcacctccgtgtgcatcctcaggcgcatggccatggtgcgggtggacgcattgtttgacaagtgctgtgcagacacggaggcattagaccttcccttgaagcaacctcttaacgctcggctgctgctagctaccatacttgaccactggagtgaggcattggaaaccatctgccagcacacctgcttgtattttttagcgaccacgtgtgctgaatgcaaatcctttgagacgctggtgactgagtgtaatcacatgaaggtgttaaaaaagaactatggcaacacgtacgagctgttgtacataaaaa

SEQ ID NO: 8110 - DNA, 326 bp, Chlorella sorokiniana
  unsure (1)..(326): unsure at all n locations; Clone ID: LIB3602-101-Q1-K1-A9
gctttcctcacgttcctgctctagtctgctctgctgcccgctgctccctgcttcctttgctttcgctgacactgacttacatcgagcagcagtctgttgcagctggttcgacaatttgactcaaccacggtaacaaaggacacaaaaaaaaaaaaaaaaaaaaaaaaaaaaaaaaaaaaaaaaaaaaaaaaaaaaaaaaaaaagggnggnaacaaaaaaaaaacacaggctggnctacgcgggcgtgccacgcctntgctctcttatagggccccccaaattaaattaactggccagctttttacaacgtcatgactggaaaaacc

SEQ ID NO: 8111 - DNA, 237 bp, Chlorella sorokiniana
  Clone ID: LIB3602-101-Q1-K1-B1
ctatgtgcctacgtttccttcccccctttctcggtgtgctttgtgagccgcctgtcacccccgcccctcccaccaccctaacatacaggagccacccacgaaagccggatcctagccccgcatctaagccttttaccaattccttgcgaagccccttaagtatgattatgccactgctctctcttcatctttggattggatagcctgtgtgtgtgttccgtgtaattctgcagacgc

SEQ ID NO: 8112 - DNA, 407 bp, Chlorella sorokiniana
  Clone ID: LIB3602-101-Q1-K1-B10
ggccaccgacgccgtgcgcgccaagtccaagttctggtacttcctgcgcaagctgcgcaaggtgaagaaggccaacggccagatcctggccatcaacgagatctttgagcgcaaccccaccaccgtgaagaactacggcatctgggtgcgctaccagtctcgtaccggctaccacaacgcctacaaggagtaccgcaacaccaccctgaacggcgctgtggagcagatgtaccacgagatgggcagccgccaccgcgtgcgctccccctgcatccagatcatcaagaccgccacgctcactgcgtcccagtgcaagcgcgcggtcacgcagcagctgcacgacagcaagatcagcttcccgctggcgcgcaaggtgctgcgcccctcgttccgcaagttccgcacca

SEQ ID NO: 8113 - DNA, 576 bp, Chlorella sorokiniana
  Clone ID: LIB3602-101-Q1-K1-B12
caggcgccgcaggagggtaaagagcaaagatgccggcgggccagggctaccgcgcgcgtacgcgccacatgttcagccgcggcttcaggcagaagggcttcatcccgctgtccacctacctgaccaactacaagctgggtgactatgtggacatcaaggtcaacgccgcggtgcacaagggcatgccccacaagttctaccacggcaagactggctgcgtgtggaatgtgaccaagcgcgccgtgggcgtggagctgctcaagcaggtcaacgggcggtacatcaagaagcgcatccacgtgcgcatcgagcacgtgacccccagccgctgccacgaggagttcctgcgccgctgcaaggagaacgacgcggcgcggcacgcggccaaggtggagggcaagccgctgccggtgctcaagcgccagcccaagggcccccgcaccgaggccatcatgctggagaacgtgaagatggagaccatcacggccatcccctacgatatcctcaaggagggcgtgctctgagcgtgatcggcggcgacgttctgttgattgcggctgcaacttaatgagatgt

SEQ ID NO: 8114 - DNA, 379 bp, Chlorella sorokiniana
  Clone ID: LIB3602-101-Q1-K1-B2
ccctattgcctgtggggtctcaggagcaggatggtgaagttcctgaagcccgggaaggtggtcatccttctgtccggccgctatgccggcaagaaggcggtcatcgtgaagaactacgatgatggcaccagcagcgcccctacggccacgcgctcgtgtgcggcctgtctaaggagccccggaaggtgatcaagcggtcgtccctcaagacccaggcgcgccgctccagcctgaagaccttcatcaaggtggtcaactaccagcacatgatgcccacccgctacacgctggaggtggacctcaagggcgtggtgaccgccgagtgcgtggacaacagcaccaagaaggtggaggccaacaaggaggccaaggcgctgct

SEQ ID NO: 8115 - DNA, 421 bp, Chlorella sorokiniana
  Clone ID: LIB3602-101-Q1-K1-B3
gtccttcaccatgcctcagctgtaccgcgtggtggagggcatcgacatcttctcccccaagttcaacattgtgtccccgggcgccgatcaggacatctacttcccgtacaaggagaaagagcgacggctgactggctgcacaaggacctggaggagctgctgttcagccccgacttcaagggagcagtgggccagctggcggaccgcaacaagcccatcttgttcagcatggcccgcctggacaaggtgaagaacctgacggggctggccgagtggtacgcctcctccccccgcctccgctccctggtcaacctggtcatcgtcggcggcgtgattgaccccgaggccaccatggaccgcgaggaggcggacgagtgccgcaagatgcacggcatcgttaagaagtacgacatgcacgact

SEQ ID NO: 8116 - DNA, 438 bp, Chlorella sorokiniana
  unsure (1)..(438): unsure at all n locations; Clone ID: LIB3602-101-Q1-K1-B4
ctgaaggccaatgccgactacttgcggcaagcgctgggctggcaggatggcgacggccagctggcggcctttgtggctgcctacccacagtcttttgccacagctgacctgaatgacgagcgaacgcagcagaactgcggctgctaagcgaggtggttggcgtcagtgctcaggagtgccttgccgctggcagcagctacttgaagactgggctagagacgatggctgcgaactacatgcttgccctggagcgggcgcccggcatgctattcaaccgcttcggagaggtgcacctgagctggatagttgacgtgtctcaagctaggtaccgcagccacctgnggctgaacgaccagcagtaccacgcctttgtgcgggagtggaaggacagcgaagaggggcggcgcctgctggaggggctcanggcgggcagtgtgg

SEQ ID NO: 8117 - DNA, 313 bp, Chlorella sorokiniana
  Clone ID: LIB3602-101-Q1-K1-B5
cgaccgccgccgcctcacgctgttgcccttgaccctcttccctttacgcgcttgcatgcgttcccgactccgctgcatgttgcctgtgtgtgcaattgtgcatcaggcaaaagaaacgagaagaaaactccacccaaacaccattttgcctgttgtaccatcctgtacgaaaaggaggctgtagtggtgtaaaaacatcaaaaccaagaaaaaaataaaaacaataaataaaaacaaaaaaaaaaaaaaaaaaacaaaaaaaaaaaaatgatataaaaaaaataaaaaaaaagaacacaataaactaaataaa

SEQ ID NO: 8118 - DNA, 341 bp, Chlorella sorokiniana
  Clone ID: LIB3602-101-Q1-K1-B6
ctttaggcctgtggcacggccggcgcaccagcagcaacaggctcaccaggctcaccaggcccagcaggcgcagcagcagcagcagcagcagcatgcgcctgtgggattgcagcagctggcggtcgaggagggaggcggcaatggccaagcagcgggctctgatgcggcgggggcaggtgtagcagcatgtgatgtgattttgcacagtgatgttgtgacgtttgcactgacctttagcactgacggcactgatctgttctgtcttgctactctgatgaggcacattgcctctccaaccacacacggcacaactacaatgtgcttgtgaggcaggcaatgtg

SEQ ID NO: 8119 - DNA, 400 bp, Chlorella sorokiniana
  Clone ID: LIB3602-101-Q1-K1-B7
ccctgccaggctcgttgctttgcacccccgcctgcctcggtacgcaccctcccttcctgggccctggcccagtcgcacaaccccccacctgggcccttggccctgtttgctttgaccccgctcgctgccgcactgcggcgcaccatgctccttccccacaccgaccctgcaccttggccctcatattgctgccgtccgtcgcctgccgtgccccgccagcccgcctcatggggcgctccatgcagctcacatccccctggcaggctggctgagcacttaggctagacagcagctgcccgttggcctccctgcacccggttttgctcccttcttgcttccacaacccgcttgcagcaacgttgctcgtgcactgctcccagcagttggtggtgctcaacga

SEQ ID NO: 8120 - DNA, 421 bp, Chlorella sorokiniana
  unsure (1)..(421): unsure at all n locations; Clone ID: LIB3602-101-Q1-K1-B8
cggacgcgtggggtcggagagccggtttgtgcggccctacatcagccagctgtcgccggagctggtggatctgctgaaccacgtgctgcacaccgaccccgacctgcgggcggaccttgaggccatcaactccacccctggatgaggaagccgctgccgccgcacctggccgcggcgttgcagcgcacgcggcacgcgcagctgcagctggagcgccggctggcgatgctcacgcccgaccatgacatggtgcaccagcgcaactcacgcgtgtttgacctggtgcgtgaggcatcactgccgccggagcactgggaggagagctaccaccgcctgatgcaggtctgcgccggcagccccacgctggtggactgcagcacactaccgggcgttgtgcgcatcgacatgctgncggcagcag

SEQ ID NO: 8121 - DNA, 560 bp, Chlorella sorokiniana
  unsure (1)..(560): unsure at all n locations; Clone ID: LIB3602-101-Q1-K1-B9
ccgcgttccaggcggcggtgcagcaggtggaggagctcaaggcagcggagaaggaggcggcggccgaggcgggagaggcgcgcggcctgctcaagcagctggagaccgcggcgcgccggcggtagattgggcatgagactgtgtgccagctggaggcgccgggacgcagcgagaggcatgggcggcaggcaagacagcagcgtgagaattccacctgccagcgcttgtaagtaaccctggccgtcccggctgcccgttccctgtgtgtcccctccttgctccaccccacaccacacatgcttgcactgctgagatgccgcggctcccacaagggggccgcccttgcttgtggcgctgagctgctctttgaatggccgcccagagctgattgtggcctgccacaccacactgctcctgtncaccgacggctgcccctcttgcatggcgctgtgcccgagactntctgtggcatggcttgatgctgagattaaccaaatgaggcactgctctgtttgaatgccgatgtctggccctgggaggccactggtgatcaacaagag

SEQ ID NO: 8122 - DNA, 391 bp, Chlorella sorokiniana
  unsure (1)..(391): unsure at all n locations; Clone ID: LIB3602-101-Q1-K1-C1
gcaatttggggaatcgagttcggctcgaccgaacgcgaaacagccaaccagccaccatgctgatctccaagaagaaccggcgcgaggtgtacaagtacctcttcaaggagggcgtgctgtacgcggagaagactcaacctgcccaagcaccccgagattgatgtgcccaacctggaggtcatcaagctcatgcagtccttcaagtccaaggagtatgtgaccgagcgctacgcctggcgccacttctactggttcctgaccgactctggcattgagtacctgcgcgagttcctgaacctgccctccgagatcgtgcccgccaccctcaagaagagcacgcgccccctggagcgcgagggcgcgcgcccgccccgccgngacggcccccccc

SEQ ID NO: 8123 - DNA, 494 bp, Chlorella sorokiniana
  Clone ID: LIB3602-101-Q1-K1-C10
aaaaaaaaaaaaaaaaaaaaaaaaaaaaaaaaaaaaaaaaaaaaaaaaaaaaaaaaaaaaaaaaaaaaaaaaaaaaaaaaaaaaaaaaagggggaaaaaaaaaaaaaaaaggggggggggggttttagaggttcaaggttttgtccgggtgcttgcgactttttattttttttttgggggcccctaaattaaattatggggccggttttttaaaacgtgtggattggaaaaaccttggtgttcccaaattaattggctttgaagaaaatccccttttggcagggtgggataatagaaaaaaggccctaacgattcgcttttccaaaaagtggccaacctttattggaaaatggacccccccttttgggggctatttaaggggggtgggtgtggtggtttccccaagtttaactgttaatttttgcagaggccttttgcgccctttttttttggtttttttccctttttttttagccaacttttggcggtttttt

SEQ ID NO: 8124 - DNA, 574 bp, Chlorella sorokiniana
  unsure (1)..(574): unsure at all n locations; Clone ID: LIB3602-101-Q1-K1-C11
gcaccgtcaacaaagtgggcgccgattatgttggcctgctggtgctgggggtgatcaacgcctccgttgcggcagaccagatgcggccagagttccggccacgcctagcggagcactgctgggtgagcagcaagggccgcgccaccggctggaggcgggcacgaaagtgcactttgatgtggcgagcgtgcggcggcacggcgccttcatctccattgctggatcgctgcagcaccccagcaccggggcggagggctttgcacggccgcctgagcgcaaggcggctggggcggcggcagcagcagcagcagggcggcaggaggccggcgcgcaggcgcaggggccggcgcagcagcagcagcagcagcagcagcctgagcaaggcaagaagaagaaagagaagaaaaagaaggacaaagcggcggcgcagcaggcggcagcaaatcccgcggncgcagcccagcagcagcagcagcagcctgcaccggtggagcagcagtcggcaggcaagaaggctaagaagagcaagcagcanaaggagcagcagcaggcggcgccaccgcagcaggccaac

SEQ ID NO: 8125 - DNA, 352 bp, Chlorella sorokiniana
  Clone ID: LIB3602-101-Q1-K1-C12
gtgcgcgtatacaaaggaggcgccgaagatgaagttctgctcgttctgcgggaaatcaatgccttcagcacggcggaccaaatgcgggcggagttccaggcaggcgtagtggggtactgctgagtgagcatgaaggagccgggccactgactgtaggcgggtacaaaatttcactttgatgtgctgagcttgcggcggcactgcgccttcatctgcattggtggatcgctgcaaaacaccaacaccggagcagagggcttttcacggccgactgaacgcaaggtgtctggcgctgctgcagcaacagcagcatggcggcatgaagacagctcgcatgcacagaggccggcgc

SEQ ID NO: 8126 - DNA, 322 bp, Chlorella sorokiniana
  Clone ID: LIB3602-101-Q1-K1-C2
gatgcgcgcttcctgcaggagattgcgcagcgcggctccctggacagccactcgcgcctgggcagcaaggtggtgctgtccaaggagctggacggagcggtcattgcgctgggagagctttacccctggaagacgtgtgaacaaggccgcagcttgacaccgtcctcaagcacagcatcactgcagcactgcgcagggccaacggcggcgagcagcacactgcgcgttgagcgcgcttcacctgctgccttgctcccgtggcttactggcctccaatgttgccaaaggccagccatgtaatcatgtaacatactcccgagtc

SEQ ID NO: 8127 - DNA, 421 bp, Chlorella sorokiniana
  unsure (1)..(421): unsure at all n locations; Clone ID: LIB3602-101-Q1-K1-C3
cgtcaagcccggcgatgaggtcatcttcatgcccacccacaccgccgccaacaagtgcgagggcaaggtgttcaccgtggagatgcaccacaagcgcgtggacaaggccggccccggcgacaacgtgggcatgaacatcaagggcctggacaagggcaacatgccccgcaccggcgatgtcatgatcctcaagtcggacgccaccctgaagcaggtgaaggacttcaccgcccagatccagaccctggacatccccggcgaggtcaaggcgggctactcccccatcggctttgtgcgctgcggccgctccgcctgccgcatcaccggcatcaactggaaggtgggcaaggagaccggcggcaagaagctggaggccccccacagcctcaaggccaacgagatggctgangtggtgttcgag

SEQ ID NO: 8128 - DNA, 401 bp, Chlorella sorokiniana
  unsure (1)..(401): unsure at all n locations; Clone ID: LIB3602-101-Q1-K1-C4
cccgtcgtcggcctcggtcaaggagtggcaaccatgaagaacgacgagggcgagattgtcgatctgtacatcccccgcaagtgctcgtggaccaacaagctgatcacggccaaggaccacggcagcgtgcagatcacattggccaccnntggacgagagcggcgtgtacaccaactcgttctccaccttcgcgctctgcggccaggtccgcgtcaagggcgaggctgacagcgctctggaccatctgtgggccaagaagcgggctgagatcggccagtgaagcgctgctgagttctagccgccagccggctgggctacacagctgccagccggcggtgggccagccagccttgggtcggccagtgatgcgctgcgaagcaaagtgctgagcgggcgggcgc

SEQ ID NO: 8129 - DNA, 454 bp, Chlorella sorokiniana
  Clone ID: LIB3602-101-Q1-K1-C5
cacctgggcaacgcctccaccaacggcccccccatcgtctatctcgtgcccggcggcaacgctgctcagaactccacgcttcccatgctgatgccgccccgctccggctccaacctggtgttctccggcacgttccgccgagcgacgtgggcgctcccctgaacggcacgacgatgacggagctgatcgacgcgtttgtgaccagcggcgcctatgtgaacatccacaccaccacctacccggccggagaggtccgcggtcagatcgagtggcaggcgtgagcgaccaccctgcccggcgcatgcgtcatccaggcgcaagccttcagcgcgcctcgtccactggagccatcgtacggttagcccctgtgtgtgacagggtgccccatggccgggcaggccacgatggtccgccatgcacaggctgctgtgggctcctgatgtggtttcttttt

SEQ ID NO: 8130 - DNA, 527 bp, Chlorella sorokiniana
  unsure (1)..(527): unsure at all n locations; Clone ID: LIB3602-101-Q1-K1-C6
gccgagcgcatcggtgccggcgcgcccgtgtacctggccgccgtgctggagtacctggctgctgaggtgctggagctggctggcaacgccgcccgcgacaacaagaagacgcgcatcatcccccgccacatccagctggcggtgcgcaacgacgaggagctgtccaagctgctggcgggtgtgaccatcgccgagggcggcgtgctgcccaacatccactccgtgctgctgcccaagaagagcaagggcgccaagggcggctccgtgtcccaggagttttagagagctggaggcggccagacagcaacggtccaggcatcgtcatccactccaaccgtccactccaaccaaaaaaaaaacaaaccattggtgttattcaacaccacctaccatatcggttcatgtggcagctctcagtcgctaacatggcggcctttgcatacccccatcaatatatatgcccacaatgtttggtagttgagtagcatagattgctcgacgcatcagacnactgactgaagacactg

SEQ ID NO: 8131 - DNA, 269 bp, Chlorella sorokiniana
  Clone ID: LIB3602-101-Q1-K1-C7
accccgtgcttgtttctgtagcccccctctggtcttttccatcccttgctccttgctctgcacccgaacgctcaacactgctaaccaaagggcaccgaaaacacccttgagcctcgcccccgttttttgcaacccgcgcagcttctttcatgtcgtgttgcccctgcccatgaggcatgcccatgatactttttgaaggacccgcaacaccccgcaagacacaccacgcacagaacaacatgctcggctggagttagttcccatcatgt

SEQ ID NO: 8132 - DNA, 429 bp, Chlorella sorokiniana
  Clone ID: LIB3602-101-Q1-K1-C8
agatcggcaaggtgcacaccgtgcccaccaaggtcaccggcgagtgcggcagcgtgaccgtgcggctgatccccgccccccgcggtgccggcattgtggcggcccgcacccccaagaaggtgctgcagatggctggcattgaggactgctacacctgctcccgcggctccacccgcaccctgggcaactttgtgaaggccaccttctacgccctggccaacacctacggcttcctcacccccgacctctggcgcgagaccgtgttcaccaagagcccgctgcaggagtactccgacttcctggccaagccggtggttggcaaggcctactgagcggcctccccatgcccgccgccccgcgcgccgcggcggcaggagcagcagcgtaacagcagcgccctgacgcgaagatagatgagaagttggaccc

SEQ ID NO: 8133 - DNA, 393 bp, Chlorella sorokiniana
  Clone ID: LIB3602-101-Q1-K1-C9
gcactgcggcgcaccctgctccttccccgcaccgacttgcactttggccctcttgctttggccgcccattgcctgccgtgccccgcccgcccgcctcatggggcgctccatgcagctcacatccccctggcaggctggctgagcgcttaggctggtcggctgctgcccgttggcctctttgctctcggttttgctccctttgcttccacaacccgcttgcagcaacgttgctcgtgcactgctcccagcagttggtggtgctcaacgatggggtcacccggacacccgacctccgctgttgttgtttcattccagcattgcatgcccacgttgtgttgtttccagagccagtcagcctgtggaccaggcccagcctctgtaacccaagcaagc

SEQ ID NO: 8134 - DNA, 568 bp, Chlorella sorokiniana
  Clone ID: LIB3602-101-Q1-K1-D1
cgggaggcgccgaggggagagcacgatgcagatcttcgtgaagaccctcacgggcaagaccatcaccctcgaggtggagtcttcggacaccatcgagaatgtgaaggccaagatccaggacaaggagggcatccccctgaccagcagcgcctgatcttcgccggcaagcagctggaggacggccgcaccctggcagactacaacatccagaaggagtcgacgctgcacctggtgctgcgcctgcgcggcggcatcattgagccgtccctgcagatcctggcccgcaagtacaaccaggacaagatgatctgccgcaagtgctacgcccgcctgcacccccgcgctgtgaactgccgcaagaagaagtgcggccacacctcgcagctgcgccccaagaagaaactcaagtaaactactcgctttggcaacagcgggagccgcatgagcggcaacaaccgttgccccccccccgccccgccagccgggatgccatgacaacaccggctgctcagctgctgatgtgctgcatgttaattgctgctggggaaatgtaacggtggtagcgatc

SEQ ID NO: 8135 - DNA, 571 bp, Chlorella sorokiniana
  unsure (1)..(571): unsure at all n locations; Clone ID: LIB3602-101-Q1-K1-D10
ggccatcctgctgacccagctggtgctcatgggcctgattgagggctaccgcgtcaacggcggcccggccggcgagggcctggatgccctgtaccccggtgaggccttcgaccccctgggcctggctgacgaccccgacaccttcgctgagctgaaggttaaggagctgaagaacggccgcctggccatggtgtccatgctcggcttcggcgtgcagggcctgatcacccgcaagggccccattgagaacctggctgaccacctggcggcccccgacgccaccaacttctgggtggactacgcccccaagtccgccggcatcggctactaagctgtttccgtcgcttgactggcgccgcccgctcgcccgcccgctgagtttacggccactcgcggcaacaggcagcagcggcgtctgtactttctgacntctccggcgattgctggtggcgcaccttgcttgctttgatgcttgcttcgggggcctangcaccctcccatgcaacacatgaacccccaccacccctgccaacccaagttttagcctgtgtttgcgcgcggtgaaagcaat

SEQ ID NO: 8136 - DNA, 362 bp, Chlorella sorokiniana
  Clone ID: LIB3602-101-Q1-K1-D11
ggttcagccgggaacctgcagaggaggcggaggaggcgcatgtggactgaaaaccttcctaaatcataattgctgctctgctcgtgtgctgctatgtctcctgcttgcaccgcttcgtctcggctcgccgccttgccgcccctcggctgccgctctcaacttgccgctgttgcttgctccctgctgctgtggtctacatgctcccgcagctcagctatacacctggctgcctctgcctgcacatcacctctacgctcctctttcttcctttttcttccggcacataatgtgtatcgttcataactctcagttctgcggaatcactgcaaccgcgcacacagaaactggccgctgttgcttat

SEQ ID NO: 8137 - DNA, 286 bp, Chlorella sorokiniana
  unsure (1)..(286): unsure at all n locations; Clone ID: LIB3602-101-Q1-K1-D12
gcgacgacactgtggcagcctacaactccggcaagctcaaaaccctgctggaggcggccggcgtgaacgccaagctttgagcggcaagagcgctaggcaactgcctgagcggccgctcagctcctgactacttcagcagcactgcattgagctgtgctgtggagcccagcgcagcagcagcaatgcgtgcccctccccagcatgattttagcaacagcaacaaactcaacctcatttcataccatcctttgttagccaggcaccacttgtagccaggcaccncgaa

SEQ ID NO: 8138 - DNA, 415 bp, Chlorella sorokiniana
  Clone ID: LIB3602-101-Q1-K1-D3
gacggcccgtgtggccactgtgtctcggcagaccaaggagacgagcgtcaaggtgacgatcaatctggacggcaccggcaagtgccactccaagacacagatccctttcctcgaccacatgatggaccagctggcgcgcacggcctgtttgatgtcacggtggaggcggagggcgacacctggatcgacgaccaccacaccaacgaggacattgccctggcgctgggcactgccctgtcccaggcgctgggcgaccgcaagggcatccaccgctttggcgacttcacagccccgctggacgaggcgctcattcacgtggtgctggacctttcggggcggccacacctcagctgcggcctggagctgcccacggagcggataggcagctacgagacgcagctggtggagcactttt

SEQ ID NO: 8139 - DNA, 361 bp, Chlorella sorokiniana
  unsure (1)..(361): unsure at all n locations; Clone ID: LIB3602-101-Q1-K1-D4
gcggcgcgccaagaacaaggcggcgcgcgagcgcaaggcggcccgccgcgaggagcgcttcgcgcagggcgtgaccgccgccaccgagagccagaagtaagcggctccgtctcggcggcagcagccgcggcggcggcgacccantgtgctccccccgccgccgcgcgttgttcttgcagcttgcatgctgggcggccggacgaggggcaacctcgcccaggactttgtgtatggccagcgccaggcgctcagccagcgccggggcctccacgtgttataccacacttgctgccccgatggacgaggcgctcattcacgtggtgctggaaccttttggggcggtcacatcttaaatgaggcc

SEQ ID NO: 8140 - DNA, 405 bp, Chlorella sorokiniana
  unsure (1)..(405): unsure at all n locations; Clone ID: LIB3602-101-Q1-K1-D5
ggacgccggagcctactgcatgtccatggccagcaactacaacatgaagctggcccccgccgagtggtgggtggaggacggccagaagctgaccaagatccggcggggggtcaccctcgaggaccacttccgcacgcgggctgggagtaagcggacccctccgccagcttgacccgagcgaagccaggcggcgtttttttctctgcccgtctctgtacccccgtgccgcctgctgctgcccccgccaccccagatcagccgctagtgcgccaaactagtgcagcgcccctgtacgatcccctgcagtgattccttccccaacgaactaaatcagctatggcattcaattcatgtttggtcaacctgtaaacacctgccttgaaaaaaaaaaaaaannnanaaaaa

SEQ ID NO: 8141 - DNA, 547 bp, Chlorella sorokiniana
  unsure (1)..(547): unsure at all n locations; Clone ID: LIB3602-101-Q1-K1-D6
ctcagcatggccgacatgtttacctacgagggagtggcgcgcctgctgagcaaccgcagcgcggtcctgcccgcctgggtccactacgttgcattcgacctgtgggtcgctcgctgggaggtgctggatgctcaagagcgtggcgtgccccagctgttgatgctggcacccctgttctgcacaatgatggccggtccagctggcctgctgctctatctggcgctcatccgcccatggttcagcgctagcgctgggcgccgcggcggggccggcaagcaggattgaacagtggatgttggcacgagtgcacgagcgccagcagctgcacagagagcaagactggtggagtgagggatggatgctgccggccaaccgctgcaaggagtgactgaaagagttgcacagggtgtgcctgtgtgcgcccgcngcatacagacaagcatgaacattcaagggctgcgacccagcgctctgcgcagttctaggcggctcagtcccgttttgtatgttcagctcacagcaagttgacaaattttgcacagacact

SEQ ID NO: 8142 - DNA, 323 bp, Chlorella sorokiniana
  Clone ID: LIB3602-101-Q1-K1-D7
caacgcccgcggcgggcctggcacctcccgacctgccccgccattttatctcttttcaaagccagcccgcaagccaatgtgtgagccaacgcacactataaaaatgagccatgaagcaaaaaaagacaataaaaaacatcagacgaaaacgtaaaaagagcaacctggctaaacccgcatgaccaagaacaaaactggccttcttagcccagatgggcggaagggagcggggggcgttcaataggtccaattccaaattgaccactattaaagtagcactacatcactggctgcccccaaacttaatgctgtccaagcactgt

SEQ ID NO: 8143 - DNA, 353 bp, Chlorella sorokiniana
  unsure (1)..(353): unsure at all n locations; Clone ID: LIB3602-101-Q1-K1-D8
gcagcgtgaagggcaagcgcagcgcagggcagatcaccctcgatcaggagctggagtttgttgtggacggcgaccgagcggcacaggggcacgacatacggctggaggtgtgggacacgcgctggcgcgacgagttcaagggccgggcgtgcgtgccgttccggcacatccgagaggcgcggctgtggcgggggagcgtggatttggaggatgcgcatcaggggcgcctgttcctggaggccagctggacgccgctcattgcggctggcggcatgtcttgagcccctggaatgtgtgcctgagagcttgtaagatcgagtgcttaanaaaaaaaaaaaaaaaaaagaaaaang

SEQ ID NO: 8144 - DNA, 75 bp, Chlorella sorokiniana; identical to SEQ ID NO: 103
  Clone ID: LIB3602-101-Q1-K1-D9

SEQ ID NO: 8145 - DNA, 437 bp, Chlorella sorokiniana
  Clone ID: LIB3602-101-Q1-K1-E1
atctgggacctggagtccaagtctctggtggacgagctgcgccccgagctgcccgagcgctccaagaaggcgcaggtgccctactgcgtgtgcctggcctggtccgccgatggctccaccctgtactccggctacaccgacggtgccatccgcgtgtggcaggtgggccgcgccatctaagcagctggccacggcggtcggtctcagctgccctgcgctgcagcaggtgctgccccagtggcaccccgcacttggctgtggcggcggcggcggcggcctgacgcacggcgcgcggcgcggcgccccccgcggcaggatttgtgacaggccctctgcacatcgaacgctaccatagacggtggaagagctaaagacgggagagtgttctgggcccggtcactgagatgcttgccggggggtgggtgctcgctttcatg

SEQ ID NO: 8146 - DNA, 392 bp, Chlorella sorokiniana
  Clone ID: LIB3602-101-Q1-K1-E10
cacccctgcacctccgcatcatgccgctgctgtgcagggaggcaaggaggctacacgctccaacgctctgctgcacaagctgattgtggacgcggtggcggaggtggcgccgggcgtggggcgcgacctattgcctggttacctcccgtgacgaaatcgatgagctgctcaggctgcatgatgtcatcgacctcgtcatcccacgcggctccaaccagctggtcagttacatccagcagcacaccaagatcccggtgctgggccacgccgacggcatctgccacatttatgtggatgcagcggctgacatggacaaggcgcgccgcatctgcgtggacgccaaggtcgactaccccgctgcatgcaacgctgtggagaagattctggtgcac

SEQ ID NO: 8147 - DNA, 59 bp, Chlorella sorokiniana; identical to SEQ ID NO: 4918
  Clone ID: LIB3602-101-Q1-K1-E11

SEQ ID NO: 8148 - DNA, 573 bp, Chlorella sorokiniana
  Clone ID: LIB3602-101-Q1-K1-E12
caacctctcggatctagcttgccgttgtgaaatcttgccacagacaccgccccggctccccctcccgcccacaaagcctgcacttccgcagcagttacgtgctaggggcggccccattagcttataaacacgcgcagagcgtgtcacaatcgacttgcagggctcacatggcccgccgccgcaactgggcggtgacggcggcagtggcggcgctctggctctgtgcgggcctctggatgctctgcctcactggatccagctgcgcagtgctgccctcaaggtgaggagagccccaatgtcagccccaggcagccagtgggccgctgctgccagccgctgccgcccgccgcgccctcttgcccccttctctccccaatgttccccctcccttccccccgcgcttgtgcagccccagcccgatgccccgcaactctcccgcccgccgctgctggatggcacgtccaatggccgcaggctgcagcaacatgccgcgcaagctgccgtgctggagcagcaggcagcgcagcagcggctagcggggaggcaggagcagcgacgacccatgcaacccta

SEQ ID NO: 8149 - DNA, 413 bp, Chlorella sorokiniana
  Clone ID: LIB3602-101-Q1-K1-E2
cgaagctgtctgccagccgctgcccgactttgtgacgcgggagcgccccgccgccttccgccccgtgccatggcgcgagttcatgcaagcgcgcgtggcagggaacatcgaggacctgggggaggaggtgcagacctaccactaccgcatccagccttagacgcgctgaggcgtggccagcgcgttgaggcgtagccagcggtgcatgggcaagcagtggctgcttgctgaccgacttgtgtgcgagcagcgacggctccccagtgagcggcaacacacgaactgcagttgaatcgagtactggagtgctgcattctgctcttggcctcgtaggttgtagtttgaactgattcacccaaactgactccaattgcggccttcactgcgcatgctgtctggttacattttgagac

SEQ ID NO: 8150 - DNA, 389 bp, Chlorella sorokiniana
  Clone ID: LIB3602-101-Q1-K1-E3
cgcgagctcaaggcagcccaggcagcgcgctaagcagcggcgctggtattgaacagcctgtgcctcatattgcaacagtcccggtgccacgacgcggcgaacgctgcagccgggctcatttggttgttcagttgggcttggggaccgcacggactggacggttccattgcttcggatgttttctatgcagcgtgtttgccaggctgcccatcatgcctcagagacttgttttgcaaccgctgcttggtcgagaggtcgactctgttatctgttgctgcctacacatgctatcctgcaagccagccatgttttggtgtctgatatgaggcaaattcatacagtgttgctgtaaatgattgacgcgcaaaataaaaaaaaaaaataataaa

SEQ ID NO: 8151 - DNA, 339 bp, Chlorella sorokiniana
  unsure (1)..(339): unsure at all n locations; Clone ID: LIB3602-101-Q1-K1-E4
gggggaggaccccctcaaggggcagggccgctgcctccccggctggtccccattctgatctgcttgtgcgaaattgtgcgtgtgttgtgtctcaaaacagcaacctgcctttgcgggccagcccccaatgtgctctcgcatcctgagtgtttgtggctgtttcactgcatttcacgccctgctgctgtgattcattcgtccttttgtcctgcgtccctggcctgctgctccagaccggcttgggctccctacccatccttcctgccaacctgtttaataaactgcacccaanaaaaaaaaaaaaaaataaaaaaaaaaaaaaaaaaaaaaaaanaaaaa

SEQ ID NO: 8152 - DNA, 420 bp, Chlorella sorokiniana
  unsure (1)..(420): unsure at all n locations; Clone ID: LIB3602-101-Q1-K1-E5
aacgcacccacgctgctgcagcgctccatcagcctcgatggcagccgcgagtggctggaaagcaagcagcagcggcaggagggcgcggcatcacacaaggcgacggcagcggttggcgcggcaggggccaagagccagcaggctcgccgcaggcagcaggcgcagcggccgcagcaccagcagctgcagcacctgtggcggcgcccaagccagctgcgcccgccgccgctccagctgcggctgcagcagttgctgccaagtcagcaggcaagtagaccagtgaaccaaatcgaacccacactgacgtaccctccaacttgccttgcctgctcctttcaaatcctgcctgcatccttcaacatctgcatgccagtaagcgcagcaccgtctgcctgctggcctgtacaancatacaattac

SEQ ID NO: 8153 - DNA, 302 bp, Chlorella sorokiniana
  unsure (1)..(302): unsure at all n locations; Clone ID: LIB3602-101-Q1-K1-E7
gcaggtggaggcgggtgcgctggaccagatgtacggcatcctgtcccagtacacagaggctctgggcaagctgaatgaagtgctgcggcgggcggagcgggatgtgggcatcctggaggtgaaggccagcgagcgcggctaggcagaacgtcacatgagagcgcacaagcgcggttggcctgcagcgtgcatgccatgctcggcaaggcaccgcccattcctcggatgcaacttcctgtaaaagagtggtgctnanaaaaaaaaaaaaaaaaaaaaaaaaaaaaaaaaaggggnnaaaatat

SEQ ID NO: 8154 - DNA, 410 bp, Chlorella sorokiniana
  Clone ID: LIB3602-101-Q1-K1-E8
gcagcagctgtttggcggcgccgaggggctgagcgcggcgatcgccgacctgcgggagccgtccagcctgccggcagcgatggagggcgtggatgtggtggtgtgcgccaccggcaccaccgccttcccctctaagcggtgggacggcggcaacaaccccgagcagaccgactacgtgtcggtgcgcaacctggtgcgtgcctgcccgcccagcttgaagcgctttgtgctgaccacctcggcgggcgtggagcgctccggccagttccccttctccatcctcaacctgtttggcgtgctcaagtacaagcgcatgggggagcaggagctggagggaagcggcctgccgtacgtcatcgtgcggcccaaccggctcacagacgggccttacaccagctacgacatcaaca

SEQ ID NO: 8155 - DNA, 404 bp, Chlorella sorokiniana
  unsure (1)..(404): unsure at all n locations; Clone ID: LIB3602-101-Q1-K1-E9
cgagcgtggaggaggcgcgggcgctgctggatgccggctacaccctgctggacgtgcgcacggagctggagagcaacgcgcgcggcaaaatccgcggctccatctgcatcccctgcgccaacgcgcgccagcagttgacgccgcctccggccagatggtggtcagcgagcaggacaaccccaccttcctggcccaggtggcgcgccgcttcccccgcaaggacgcacgcatcctgattgcgtgcagcaacgggcggcagtacagcattgacgtgctggaggcgctggaggaggaggggtacaccaacattgtgggcctgcagggcggcgtgaacggcttcctgcgcgtgttcgacgcccgcctcaaccccaaggacggncggcccgtggcgcggcgggcaatga

SEQ ID NO: 8156 - DNA, 282 bp, Chlorella sorokiniana
  unsure (1)..(282): unsure at all n locations; Clone ID: LIB3602-101-Q1-K1-F1
cggaggaggcccagaagctggcgcagcagttcagcaacaccgagttcatcagcaagctgcttcctgagagcggcgtgctggaggcactaaagaaagtggtgcccatggcgctcaagctcgtggtgtgaagtgccgagtgaaagtgccggcaggcagcagagcggcatgggaacgccggcagcagcgcggcgggccgcctgtatttgttgcatttctgcagctgcacctgatgttttgtttgcaagtgacacttctcttgcactgtcattgctggtcgcangc

SEQ ID NO: 8157 - DNA, 425 bp, Chlorella sorokiniana
  Clone ID: LIB3602-101-Q1-K1-F10
cggacgcgtgggtgcagctgatcaagaacggcaagaagattgcggcgttcgtgcccaacgacggctgcctcaacttcatcgaggagaacgacgaggtgctcatcgccggtttcggccgccgcggccacgccgtgggtgatatccccggcgtgcgcttcaaggtggtgaaggtgtccggtgtgtccctgctggcgctcttccgcggcaagaaggagaagccccggaactaaacggcccgcgcccagcagcggcagcagcggcgcgcctcggcaacggggggcgccgcgtccgccagcactgcacctgcctggcggcggcttgggagggcgtgcagcgcatgcagcgtgcaccgccgcggccctcccgatagtttaggaccccacaaccagctccctctgcttccactactgatgtaacacgcaact

SEQ ID NO: 8158 - DNA, 555 bp, Chlorella sorokiniana
  unsure (1)..(555): unsure at all n locations; Clone ID: LIB3602-101-Q1-K1-F11
gcgcggtggagtgggcaattcgttcgcgatggtgaacgtcccgaagaccaagaaggccttctgcaagggcaaggagtgccgcaagcacaccatgcacaaggtcactcagtacaagaccggcaaggcgtcgctctacgcgcagggcaagcggcgttacgaccgcaagcagtccggctatggtggccagaccaagcccgtgttccacaagaaggccaagaccaccaagaagattgtgctgcgtctggcctgcaccgtgtgcaaggcccagcacatgcacgccatcaagcgctgcaagcacttcgagatcggcggcgacaagaaggtcaaggggctatactagtaaaaaaaaggagagcggcaggcggagagcatgaccgagaaatggaggcagcggcgcccgctcacccttggcggnctgctccccgcccggcgcctcgctttggccgcctctggccactcgtacgcctccttgtccatgcccttgtgcttcctgagctgcccaacctgncatgcaaacagcctggccgtctgtaatgccattggcgtgtgnaaaaa

SEQ ID NO: 8159 - DNA, 529 bp, Chlorella sorokiniana
  unsure (1)..(529): unsure at all n locations; Clone ID: LIB3602-101-Q1-K1-F2
gtcaatgatgacagctggtgccatgtcgcggaggacggcacgagcaagtgcaccgcgccgctgctctccatcttcaaatccaagtttgaccgagacatcttggtccccaacttcaagcctgagctgttcgagcccatattcagcccttgggaaaacaagaaggaaatcgccttcttcaggggatcccccatctgttcgttcccctcgctcaatggcacccgcccaagcccgagttccggcgccaactgctcgcgatgggtggtggctcagctgtcttgggaccatccggagctaataaatgcgacacttacggagaacgtgactcagtatggcgggcctctgtgggtggacatgcctcgcgtatcacaccaggaagcagccgagtacaagtatgtactggctgtggatggcgccacggcagcgtaccgcctggccttnctgatggcccacaacagcgtggtgctgaagcaagtgacggacaagattgaatgggactacggcgcgatacacccctgcgagcactacttcc

SEQ ID NO: 8160 - DNA, 561 bp, Chlorella sorokiniana
  unsure (1)..(561): unsure at all n locations; Clone ID: LIB3602-101-Q1-K1-F4
cgcccgatggtgcctgcaccctctgcttgaaccagtaccacgtcctggtgcctttgaacgcactctacatcaacgcggcggggcaaggaagcacgtgcatgaccgccgccaaggtgcagagcgaggcgctggcgatcaccggcaagnccggccgtcctgccaaacggctgccgggaggtggacacagagttcaagtgcaaccgctgcgcggatacctacagcctgactgacggcaagtgcgtgcgtggtgggaacaagtgcaagtcgacgctgtcttacaaccagtactgtgctaaatgtgacgccaccggcctcaagtgcctggcctgcaatggctcgcgctctccgccctacggcgcgcctgacaaccggtgcacgttcccgtgcaaacagctgtatggcatttggatgcctcaaatgcaaccagtggaagtgcttggttacggacacaaagtatgccaaaggccggtgatcagcgaacaaggaatgaggagaaagcagctcgagcggnatgccaccgatgcccgttgcatggtgccgtggatgcggccactgctattg

SEQ ID NO: 8161 - DNA, 558 bp, Chlorella sorokiniana
  Clone ID: LIB3602-101-Q1-K1-F5
ctgtggcgtggatagcacttgatattcaccatgtttggcctgcaaaaggagatcaccaagtagggcagcggtgccagccccaagcagggcgacaaagtgactgtgcactacacgggcaccttccccgatggccgtacattcaacagcaagccgtgaccgcgggcagccgtttgtgttcaacatcggcatgggccaggtcatccgcggctgggatgagggcgtgatggccatgaagattggcgagcgctgcaagctgacctgccctcctgactacgcctacggcgcgcgcggcgcgggcggcgtgatccctcccaatgccaccctggtgttcgatgttgagctgctgggcatcaactgagcatggcatagcaggcacggcacgcgcagcacgcccagtgagagagcagcagcagcaatgattgaccattgcacttgttcacggtgtgatagcaagtctgtgggacggccatgattgacgctcgctctgtgctgtggcattttttgggttttcctgcactgtgctgcggtttttgatgcagcactgctgcccccagtttg

SEQ ID NO: 8162 - DNA, 315 bp, Chlorella sorokiniana
  Clone ID: LIB3602-101-Q1-K1-F6
gcccagctgtcagcgcgatctccggggcggcgctgcggtccattgtctgccgcccgcccaccccgctctgctctggcccctgctgggtgtgtgcccaaaccccaaccgacaagtcctgagtcccgactgatccaaaccttaaaccctacccaccaccagtctgctgctctcgagttgcatcttgcttctgtctgcccgcgctcttgcgcgcacctactgcaacccctgattctttgcacacaaaacacttgattgcactgcgcccgaccttccggccttatgcttcacagcccgctgtgtaactcacattgcggg

SEQ ID NO: 8163 - DNA, 466 bp, Chlorella sorokiniana
  Clone ID: LIB3602-101-Q1-K1-F7
ggcagagggcggcaagacagccattgctgaagtgctgctcaaggcgggcgccaatccgcaggcaaaggacgagcacgggcacacacccgcccgcgtggcaggcatgcacggccaccgaagctgtcgaactgctgtggggcggacgggcgaggcaggcggcagcagcagcgacgccggcgctagcggcagcggcagcggcagcggtgcaggcggcagcagcagcgctgtggatgatttcatggccagcagcaaggacgcgctgaaggagcgagaggccaagaccgccagcaccagcgatggcgcaagcgtggtcactgtgccgcagccagaggtgcccgatgaggcgctggcggataccttcaagcgcaagggcaatgagatgtttgttgcggggcagtacgagacggcagccaagctgtacgagcttgcgctgtcgcactggaccaagaacccggtgtgtggagca

SEQ ID NO: 8164 - DNA, 397 bp, Chlorella sorokiniana
  Clone ID: LIB3602-101-Q1-K1-F8
cctcagaccaccaaacagcacaccatgcagaccgccctgtgccaggccctgcgcgcccctgtggcctccaaggcccagacccgcagcaacgccggccgcaccgtcgtggtgtgccgcgcgcagcatcagaacctgccgctaaggccgcggctgcgggcgtgtctgtccccgccctgctggcggcgcaccccgctctggcgctggtggacgaccgccttgcgggcgagggcaccggcaagatcctgggcatcaacgacccctccctgttctgggccatcaccattgtgttcaccatcgtgtggggcgtgttctacgtgtccacccgcgagattgacgctgcgtatgaccgcgagaacgacgatgactttggcctgaccctatgagcgggcgcccagca

SEQ ID NO: 8165 - DNA, 569 bp, Chlorella sorokiniana
  unsure (1)..(569): unsure at all n locations; Clone ID: LIB3602-101-Q1-K1-F9
ggcgcaccccgtggcggctgaggactcagctgacacccgggaggccgagggggaggaggaggagcagtgaggcccagcggctgccatccccaggccagagacagaagtgacagaccaacagacacgacaggccagcagcctgaggtagcccagttttgctcacactccccatgcgcgacagcctttgcggctgctgcgcaagctttgtacagtgcacacccgcgacccctacacgtgactgctttcgccacaatttgcctgtttgaagacccccgaaccgaccggcccactgtcaccacgcggcgtccctgcgctgccgccgcaagcgcatgcagcccattttcctgtttgccctccactgtttagccggccccgcctgggcttgttacggcagggtttacctggctgagtggcacgccacgccatgtgctgtcaaactgctgctgtncgatgccccagccggtgcccgcggccagctggccaacatgcctttcgccctcacggaaccacacagctgcaaaaaggcgtccctgcgctgccggcgcaagcgcatgcagnccattttcctg

SEQ ID NO: 8166 - DNA, 399 bp, Chlorella sorokiniana
  Clone ID: LIB3602-101-Q1-K1-G1
gagctgaagaaggtggccagcaaggatggcgtgaaggtgcactacatggttgatgccgccacccccaccggcacctgcgccgcctgcatcgtgggcggcgagcgctcgctggtcgccaacctggcggccgccaacactacaaggtggaccacctgcagcagcccgagaacatggagtgcctggagaaggcacgcgtcatctactcggccggcttcttcatcaccgtgagccccgagtcgatgctgaccatggccaagcacgcctgcgagaacgacaagacgtactgcctgaacctgtcggcgcccttcatctgcgaggtgccgcccttcaagcagacgctcatggacctcatgccctacgttgattacctgttcggcaatgagaacgaggcgcgcgcct

SEQ ID NO: 8167 - DNA, 295 bp, Chlorella sorokiniana
  Clone ID: LIB3602-101-Q1-K1-G10
accaagcgcaagctgttgcgcgctccaatttggcctccctgcagctggccacctcgccacgctgattctcaacgtgtgtcaattggcaacatgtgtaatggtcaacattaaaaaaaaaaaaaaaaaaaaaaaaaaaaaaaaaaagggctgtcgaactaaaaaatacaaagcatacaaacacacgcatgcggcggtaatagctactatatacatgtaccttacttcaatcaactgcccgtacatttacaatcgacggggctgggataaccatggcgtaacataccttaaccgcgtt

SEQ ID NO: 8168 - DNA, 380 bp, Chlorella sorokiniana
  Clone ID: LIB3602-101-Q1-K1-G11
cctacttccccggcggcgccatcgccatgcctaagatgctgaacgacggcggcgtggagtatgatgatggcacccccgccaccgaggcgcagcaagccaaggacgtggtgaccttcctgtcgtgggcggcagacctgagatggacgagcgcaagctcatgggcaccaagtggctggccgtgctgtccctggtcttcctcaccaccgtgtactacaagcgctggaagtggtcccccctcaagtcccgccgcctcatcgtggatgtggtcaactaagccaagcggccagcacccacaaacagtcgccgccggcgcgagcacccacctgccggcggcggcagatgcggtggcgcatgtgtgcactggcttgccacctggcacg

SEQ ID NO: 8169 - DNA, 138 bp, Chlorella sorokiniana
  Clone ID: LIB3602-101-Q1-K1-G12
gaattgtgggtgtgcacctgcctcccttccctctcatggtcgactgtcctctgagcctgaccccgaaagagcgctcccacgtgtgtgtgcgtgtttgggcttttcccctcagcttgccccagtgtaaacagctaggtc

SEQ ID NO: 8170 - DNA, 562 bp, Chlorella sorokiniana
  unsure (1)..(562): unsure at all n locations; Clone ID: LIB3602-101-Q1-K1-G2
cttcagcacagccctccgtggtgatcgacctcagcaaggggatcaatcacgacaagccagcggtcgcagtggagggtgaggtgtgcgcacgaggcgcgggcgggcacgccgcatgcctgggcgctccccaaccggacacgagcctgtggacgggcgcaagctggtgggaggcgccagcaagctgacgtacccggctgcagagcagggcaagagtgaggagcccgacatggcctcgcaccctagctctgccgtgtggggccagtggggcagcaccgactgagccagcacaccggcttctaactaggcaggagtcgccccacggacctggctgcgatccgacaagtttcactcggcagtgtaactcctttgttggcgcctgcttgcctcaagcgcgtgacgtcgtgtcagcccatgctcagccgncgcgtgtacctcgccttcccaagccctgcgactcagaaccccttgtatccatgcatgaatgtnccttgctgaaatggtggtttcgcctggtttccaactatgaccatcatctccgcaccacatttccatgtggatgact

SEQ ID NO: 8171 - DNA, 430 bp, Chlorella sorokiniana
  Clone ID: LIB3602-101-Q1-K1-G3
ctgatttcaccttgcaggtgtacgaggaggcgcgggagctgttccgccgccaccgcggcctcatcgcgctgggcggcagcgagtggcctaacatccggtgcgctttttgggtggttttcaacaaccaacatcatggctaggaagcgggcggggtatgcaacggcagccatacatgctggtggatggaggctttgcaaggtccaccccatcccgtgcagcggttgtgtgctcaggctggcggaatggtgcttgtgccgcatgccggcttcccttgcaggggtatctgcttggcctctctagccctgctgccctgcagtcgcgataaccctcaatctcccttccctccctttgcagcgctgatctgttggagctggcgggccccggcggcgtggacagtcgcctgcgcgtggcacagcgcatgatgcgcagc

SEQ ID NO: 8172 - DNA, 362 bp, Chlorella sorokiniana
  unsure (1)..(362): unsure at all n locations; Clone ID: LIB3602-101-Q1-K1-G4
ccctggctgagctgaaggtgaaggagatcaagaacggccgcctcgccatgttctccatgttcggcttcttcgtgcagggcctggtgaccggcaagtcccccctggaaaacctggctgaccaccttgctgagccgctgtgaacaacggcttcgcgtccgccaccaagttcctgcccctggcctgaacgccgtcgtcaacctggagcgacctgngcatcccatattaacggcggccagccggttttggacaagcacacacaacatatgagattcccaacctccctgcgcactgcttgtaacaatcctggctccctcttgtacccttgacccgcactcgggcgtggatatgtaacgttccgcggg

SEQ ID NO: 8173 - DNA, 384 bp, Chlorella sorokiniana
  unsure (1)..(384): unsure at all n locations; Clone ID: LIB3602-101-Q1-K1-G5
gcccgcagctgctgcacactcgtgcccaaggcgcccaaagcccccgacacttccctgcggttgcacaacactccgcaatggcgctctcgttcccgcgcggctttgccaccgacgacttctttgcgcccttttacgggcttcccggacatgagccgcgagttcactcgcgcactggcgccgctggagggccaggccggcacccagctggccacccgtggcgtgccgatcgacgtggtggagaaggacaacgccttcgaggtgaaggcggacctgccgggcgtgaagaaggaggacatcaaggtcacggtggacaaggacgtgctgcgcatcaacgtggagcgcagcgaggagaagaaggaggagcangaggggcagggcctgaag

SEQ ID NO: 8174 - DNA, 303 bp, Chlorella sorokiniana
  Clone ID: LIB3602-101-Q1-K1-G6
actacttccagttggccccatctacatgcctaagatgctgaacgacggcggcgtggagtatgatgatggcacccccgtcaccgaggcgcatcaagccaaggacgtggtgaccttcctgtcgtgggcggagacctgagatggacgagcgcaagctcatgggcaccaagtggctggccgtgctgtccctggtcttcctcaccaccctgtactacaagcgctggaagtggtaccccctaaagtgcctgcgcctcatcgcggatgtcgctaactaaatgaagcagatcagcacccacatcaagtccc

SEQ ID NO: 8175 - DNA, 404 bp, Chlorella sorokiniana
  Clone ID: LIB3602-101-Q1-K1-G8
agaggtcaggggctatactagtaaaaaaaagagagcggcaggcggagagcatgaccgagaaatggaggcagcggcgcccgctcaccctgggcggcctgctccccgcccggcgcctcgctttggccgcctctgccactcgtacgcctccttgtccatgcccttgtgcttcctgagctgcccaacctggcatgcaagcagcctggccgtctgtaatgccattggcgtgaaaaaaaaaaaaaaaaaaaaaaaaaaaaaaaaaaaaaaaaaaaaaaaaaaaaaataaaaaaaaaaaaaaaaaataaaaaaaaaaaaaaaaaaaaaaaaaaaaataataattaataattattaaattttaaaatatatattattgggggccgcccttttaataggttcaaatattattt

SEQ ID NO: 8176 - DNA, 275 bp, Chlorella sorokiniana
  unsure (1)..(275): unsure at all n locations; Clone ID: LIB3602-101-Q1-K1-G9
cttagccacaacaacgcagggacacccttttgttttttgcatgcggttgagtaaacggcgagcacaggtgtcgcctgcggctctcctccccttgcaccgccccctcggtgggggtgccctagacccaccctcctgcatgtgttctcctgccatgttccttcccgccatgtccccaccaacacgggagatcgctgctcctgccgtgccctcaacctctcttgctgggtgcatcgcacatcgccatacaagctggcaaggcaacantgatnacntag

SEQ ID NO: 8177 - DNA, 577 bp, Chlorella sorokiniana
  Clone ID: LIB3602-101-Q1-K1-H1
agcgggtatgcaaccatggcggagtccgtccagactttcggccgcaagaagaatgcggtggctgtggcctatgtgaagcgcggcaagggcgagatccgcctcaacggcgccccgctggagctggtgcagcccgaacgctgcgctggaaggcgtttgagccggtgctgctgctgggcaagcagcgcttctccaacgtggacatccgcatccgcgtcaagggcggcggccaggtgtcccagatctacgccatccgccaggccatctccaagggcattgtggccttctaccagaagtacgtggatgagcagagcaagaacgagatcaaggacatcctgctgacctacgaccgcacgctgctggtggccgaccctcgccgctgcgagcccaagaagttcggtggccacggtgcccgcgcgcggtttcagaaatcttacaggtgaaggctgccccgtgggacgggtgggcgcctctggaggcttcttctgcgccgctggcgtggcggcagcggcgtctgcggcctaggcagctgccctggagcagcatgccctcagcgaaagcaccatgagtacaccttgcg

SEQ ID NO: 8178 - DNA, 153 bp, Chlorella sorokiniana
  unsure (1)..(153): unsure at all n locations; Clone ID: LIB3602-101-Q1-K1-H10
ctcggcttctaccttcacttttctgttgcagttgctcagttttcaccctgtgttgcacactcaccccttgcttgctgcgcactcgctgcacacaacccatgcccacagtaccgccagaaacaaaattacatgtgtggtaaacatttcaganga

SEQ ID NO: 8179 - DNA, 393 bp, Chlorella sorokiniana
  unsure (1)..(393): unsure at all n locations; Clone ID: LIB3602-101-Q1-K1-H11
gtgctacgggcgccactaccttgccaacccggaccttccccgccgcttccgcctgggcgcgcccctcaacaagtacgaccgcaacaccttctactctcagggcgaggagggctacattgactacccgttcctgaggagagcgaggagggcaaggccttcctgcagaccgtgcaggcagactgagcagcaggccgactgagcagactgcgcaacattacagtcctcgcagccagaacggggtctcacgcgactaatcgaccccagttctcctgcggcgcaagtcacccacctcgttcgtccacgatgcctgccatgccattctttntatgatgcgaaatgtgtcgcgacatacaggaaactgacccattccctgcctcccgccaaccccatgac

SEQ ID NO: 8180 - DNA, 494 bp, Chlorella sorokiniana
  unsure (1)..(494): unsure at all n locations; Clone ID: LIB3602-101-Q1-K1-H2
ccctccggattcccttcgcccacctccgaaaaaaattaaaaaaataaaaaaaataaanngatttaaaaaaaaaaaaaataatttttattaaattttaataaataggggaaatttaatttatgtatggtatattttattctttcttttttttagtttttattttttatgtgttttaaaatttttttttttttacatanaatttttttttggngtttttttttttatttttattattttttttttatttttttttgtttaaatattttttaattttatatataaaagattttttattttttttttttaatttttgtttttttagatttttgtagttttttttttatnttttttttgtggtttttggttttttttttaaattttatatttttttgttgttngttttaagttttgttttttttttttttgttttttttaaaaaatttggattttttttttttaaaattttttaggtgtttttttttttattttttttt

SEQ ID NO: 8181 - DNA, 385 bp, Chlorella sorokiniana
  Clone ID: LIB3602-101-Q1-K1-H3
atgaaggagtataaaagaagcaagatggtgaaataaaatgaaaaaaaaaaaggagaaaaaaaattatataaaaaaaaatatgaaaaaaaagaaagggggaaatagagaaagaactacgatgatggcagccagcagccgcccctacgctcgcgctcgtgtgcggactgtctaaggagccccggaaggtgatcaagcggtcgttcctcaagacccaggcgcgccgttccagcctgaagaccttcatcaaggtggtcaactaccagcacatgatgcccacccgctacacgctggaggtggacctcaaaggcgtggtgaccgccgagtgcgtggacaacagcatcaagaatgtggaggccaacatggaggccaatgctcttctggagga

SEQ ID NO: 8182 - DNA, 284 bp, Chlorella sorokiniana
  unsure (1)..(284): unsure at all n locations; Clone ID: LIB3602-101-Q1-K1-H4
ccgatcccggtcgaccacgcgtccggccgtgctggtacaccatgttttgatgaaccgcatgccccatcaacccaggaggctgctagcgcgcagctggaagccgcccaagatttgccaggcagcagggccagcagctgccgacaggggcaggttgcgtcggctggcacaggctggtgctccgtttcccggtccaggcagcctagctgcgcacatttgcaagctttgaacantnnancacaaaaaaaaaatagaaaaaattaataaaagtggtaaacataccaaaa

SEQ ID NO: 8183 - DNA, 324 bp, Chlorella sorokiniana
  unsure (1)..(324): unsure at all n locations; Clone ID: LIB3602-101-Q1-K1-H6
cacctaagctctcaagcgaaagcatggtcaggtcacaagatnatgaggcgatcaaggaggggttccaggctggccagcagcattgccgcatatgaanaggcgagcacgaggtgctgaatgaccagcccaccaagctgtgcgagaacgacgagcctgtgcccgactgagacaactatgcgccaaccaaggtgtacgagaacgatctgaatgtcatgcaactaagagtgcacagttctcctgagggccatgtaacagccataggtcatcgccgaccaaacacgaaatcgaatgcagcaggctgaacgccgcgcaatgaactggtga

SEQ ID NO: 8184 - DNA, 434 bp, Chlorella sorokiniana
  Clone ID: LIB3602-101-Q1-K1-H7
ggaaggcacgttagtgctgagagcgccagtgaaaatggtgttcgtgcggacggaccgcacgcatgtgctggacctcgcgtacacgggcaccgtggccgatgtgaaggccgccatcgaggcgcgccagggcatcccgccgaggagcagcgggtgatgttcggcggtaagcagctggaggacgggctgtccctggaggcttgcggcatcagcgatgactcccagatgtacatcctgatgcgcctgctgggtggtgccaagaagcgcaagaagaagacctacaccaagccgaagaagcataagcacaagcacaagaaggtgaatctgcgggtgctcaaattctacaaggtggacgacagctgcaaggtgcaacgcctgcgcaaggtgtgcccacagtgctgtcccggcatgttcatggccacccactttcaaccgcg

SEQ ID NO: 8185 - DNA, 453 bp, Chlorella sorokiniana
  unsure (1)..(453): unsure at all n locations; Clone ID: LIB3602-101-Q1-K1-H8
ggacgggctgtgggcggtgctggcctggctggccatcctggcgcacaagaacaaggacgtgcccgagggcggcaagctggtgagcgtgaaggacattgtgatggagcactggaagcagtttggccgcaacttctactcgcggtacgactacgagggggtggagagcgacaaggcggacgccatgatccagcacctggagggcgtgatcgcggccgccaagaagggcgacaagtttggcgactacgtgctggagacggccgacaacttcacctacaccgaccccatcgacggcagcgtggccaagaaccagggcatccgctttgtgttccaggacggctcccgcatcatcttccggctgagcggcaccggctccgcgggcgccaccatccgcatgtacattgaggcgtacaccggcgacccctcgctgtttgagaaggacgcgcangacgtgct

SEQ ID NO: 8186 - DNA, 286 bp, Chlorella sorokiniana
  Clone ID: LIB3602-101-Q1-K1-H9
cccgcctgcgcgcgcaccgccccaccccttctttagcctctcctcccttgctcgcatcttctcggttcttcggatgtgtgtgcagtgtgtgcgcggtgacccccgcggcacgacttgataaccaccaaagcacaatttaatcttgcctggccaaaaaaaaaaaaaaaaaaaaaaaaaaacaaaaaaaaaaaaacaaaaaaaaaaaaaaaaatgaagcataaaaaaaagagagacaagccatgtgactacttgatgaaaacagcggccggcttcacctacaccaacc

SEQ ID NO: 8187 - DNA, 450 bp, Chlorella sorokiniana
  Clone ID: LIB3602-104-Q1-K1-A1
gtgcataaaggcgcggcgaaacccctgtgcccggcctgcaccagtcgcccaccgtcaacatgagtgccctcactgttggcgtacctagttactacttgctttgcctgatgggggccgctcggagtggcgcaaccgtaccggtgggcaagctaaggggctggcctgcattctgcttgcgttgatgtctcgcctaagccacctatgcccctttctgctgcctttgctactgctgctcctcttgctggctcatggcccatccatgctcccacaaatgcatcaactgaggccgctccctagcctgcgcccagggcgacaccctacaatacctgtaaaagtctaagggcgctccttaaaaatttattacctatactttatagacacgtatcgccggatttaccccgtaaagctctaaggggggggctctctataggatccagtttagtgctctac

SEQ ID NO: 8188 - DNA, 509 bp, Chlorella sorokiniana
  unsure (1)..(509): unsure at all n locations; Clone ID: LIB3602-104-Q1-K1-A10
ctgnccgccacttacaacatcccgggcgtgctgttccgcgacgtcgtggtcaggggcttctggctcattccctactggccggcctgcccgctgccgagcgggagcgggtgatgggcaccgtgctgcagctgctggctgacggcgtaattacgccctactcgggcgagcgcttctcgcttgaggacgtggtggcggctgccaaggcctccaaggccgatgcgcgcggcggcaaggtgctgctggagggctgaacaccctctaaaatagcacggtgcggcatgctgggagaggcggcgcagctcggcacagcagcagcatggcagcgacagctgcaagcccctcgcctcccctgcgagcagcagcccggagcacagcgtgagctgggaataacagcgctttgaaattcaccgttgccgaaatgaaatcatgatggctgcccacttcattgcaatcacacattccttctgtcattccattgcctgcatgcaattttaacaaacatgccctcc

SEQ ID NO: 8189 - DNA, 550 bp, Chlorella sorokiniana
  unsure (1)..(550): unsure at all n locations; Clone ID: LIB3602-104-Q1-K1-A11
ggcctcggtcaagnatggcaaccatggaggaagacgagggcgagnatgtcgatctgtacatcccccgcaagtgctcgtggaccaacaagctgatcacgggcaaggaccacggcagcgtgcagatcaacattggccacctggacgagagcggcgtgtacaccaactcgttctccaccttggcgctctgcggccaggtccgcgtcaagggcgaggctgacagcgctctggaccatctgtgggccaagaagcgggctgagatcggccagtgaagcgctgctgagttctagccgccagccggctgggctacacagctgccagccggcggtgggccagccagccttgggtcggccagtgatgcgctgcgaagcaaagtgctgagcgggcgggcgctccggcgcgccgccgccagccacgcagtgcaagctgtaacgcgcctccttgcgnaaaaaaaaaaaaaaaaaaaaaaaaaaaaaaaaaaaaaaaaaaaaaaaaaaaaaaaaaaagaaaaaaaaaaaaaaaaaaaaaaaaaaaaaaaaaaaanaaggggggg

SEQ ID NO: 8190 - DNA, 59 bp, Chlorella sorokiniana
  Clone ID: LIB3602-104-Q1-K1-A12
gttccaaatattaattgcttttacgggcactcttgaacccccaaaaaacttttattagg

SEQ ID NO: 8191 - DNA, 575 bp, Chlorella sorokiniana
  unsure (1)..(575): unsure at all n locations; Clone ID: LIB3602-104-Q1-K1-A2
gccggtttagtaccctgncagttctgcatgctcttgcctgcaatgccggnccttggcgtgaagcagcaccagttgtaagtgagtgttgtgagcccagcagaaggcggcaggggcacatctgcccaaccttggtgtgaagcagcaccagttgtaagtgagtgttgtgaaaaaaaaaaaaaaaaaaaaaaaaaaaaaaaaaaaaaaaaaaaaaaaaaaaaaaaaaaaaaaaaaaaaaaaaaaaaaaaaaaaaaaaaaaaaaaaaaaaaaaaaaaaaaaaaaggggggggccgttttaaaagaaccaaagtttacttccccttgcttgcaaagtaatactttttttttaggggaaccaaaattaaattaactggccgggttttaaaaacgtgggaattggaaaaaccttgggtttcccaaattaaatggctttgaaaaaaatccccttttcccaagttgggttaaaaccaaaaaggcccgaactattcgcctttccaaaaatttgcccaatttgaatgggaaaaggaacccccctttttaagggccctattaaacccggggggtggggggggttaccc

SEQ ID NO: 8192 - DNA, 460 bp, Chlorella sorokiniana
  unsure (1)..(460): unsure at all n locations; Clone ID: LIB3602-104-Q1-K1-A3
cnctgacctggcgtctgncgacagcgagcgcacgcagnaactgcgcgaggcggnanatcaagcacgcccgcctggccatggtctccttcctgggctacaccgtgcaggcctggtacaccggcgagggcgccctgggctccctcaacaagttcgccaacggcttctaagcagcccggcatgacgacggcctgggcctagcgcccggccgctttgcagccacttgcagccggcccctttgcggggccacccccacccaacacccctttcatgagaagattaacaccctgccatcgctcccttgctacgcctcccccgcccgtgcgctctctgcatcggtcgttctgtttgcctgcgggcgcgcttgctcccgggcgccccgcagattttgcatctgctcgctcgtgtgctgtcaggagtcagcggttgtatgatttcctgttgtaattcgtaacgttccana

SEQ ID NO: 8193 - DNA, 522 bp, Chlorella sorokiniana
  Clone ID: LIB3602-104-Q1-K1-A4
gggcaacctagccggacacgagtgtcggcgcgtggaccaggacaaaaagacatcgtgggcactagagactacacaaacagacctgcagcgctggtgctgccgcgctgcacctgctttgcgtgcaccaaccacacgcacgcatacctgcaccacctgctgcagacccaccaaatgactgatcacgttgctgatcaaggtgcacaacacgcaccactacctactctaataatatgaggacaacaacgccattgcattgatgcgggacgtgctctcccacgactgggtcatgaagaaggctcggcccggctgtgcgaagagggcaccaagacaagaagacttttataccagggcaccttgagcagaaggcggactgacgtttagaccgcagagattcatgtgatgccataggatctatgaagagcaaaggtatgtaaacctgggcactggaccggagagaataaccgacctaccaacccaaccttggactggtgccaaagaggggggaggctgtaaaggaaccaa

SEQ ID NO: 8194 - DNA, 568 bp, Chlorella sorokiniana
  Clone ID: LIB3602-104-Q1-K1-A5
gcggtgccagtgaacagctgggcgccccacgctccgcaacacatgtttgcctcacagctgcagcagccactgctgggccggcagcagcgaccagagagtggcgcagctgccctgccgcccagcacagcagcacaaagcagacagcgacagctcaccagacccaaccagacccagactcgaacccaagcacctcacacggccgccattgtgcagctcacaggcagccgactgtagcatactggacccaccgctcacgcctcaacaaactgcctgcaactgacatcgaacgctttacccggcctgcgcagggagcggccatttgcaaacagatggctgctcccttgcccgtgccttgcatcttattgccgacattgcctcttctgctccgccgtcctcttcattctttgcttcctgcctcttgtttgtgcacgtgctccaccccccgagtgctcattgttgcttgctcccagtagcgcatcgctcatgttccctgcagcaattttccagctgccagtcgcccacaattggcggcactctccccagacagcacggctgccttgggttgaca

SEQ ID NO: 8195 - DNA, 536 bp, Chlorella sorokiniana
  unsure (1)..(536): unsure at all n locations; Clone ID: LIB3602-104-Q1-K1-A6
cggccgcgtgggcgccgngcccccgctgctgcacgacagcctgagcgaggcagnatacagccactacaagcggcagcgcaccacgccgcgcatgagcagcatcagcgagccagattactacctgaacaactcgctgtctgaggggacgtacggcatgccggctgtgctgcagcacaagcgcacgcagggctcctcgctgcggggcgggcccaagccaatgatgatgcagcgcatcgtggtggtcaaccgctcggcggcccaggacgacaagccggagcgcctgcacgactccttctccgccgtcgactacagcgccagccgctgagcggcagtggggcgcagttgtgcgcccgcagacgactgttgatggcccgagccagctggccggcggtgggcagaggcccgcaggcattgccctcgaagttgccagcccggcggcacaattttggctgcatcgctgtattgctagtgttcacatgcacgtatgttgtatgtccttggcgctgctgcgccccatgtagatcgtttgcatgccc

SEQ ID NO: 8196 - DNA, 574 bp, Chlorella sorokiniana
  unsure (1)..(574): unsure at all n locations; Clone ID: LIB3602-104-Q1-K1-A7
gcgttcaacacaatttctgncaccttttgtgtttgatgcgttgcacaactgatgggaacaatgagcaggacgcccaggcatgtggagacgggggctaaagggcagttgggggatgccgagctgcagcaggaggcagctggcggacagcaaacagcctgactctgaatgatttttgtgcacagcagggacgaggcgcttgtgcatcgccctgccctggcacacgctcctgacgcccttttggctttgatccgttgcatagcgcaaattcgactagcgttgctgtactgtaatcgtatggacacaaaaaaaaaaaaaaaaaaaaaaaaaaaaaaaaaaaaaaaaaaaaaaaaaaaaaaaaaaaaaaaaaaaaaaaaaaaaaaaaaaaaaaaaaaaaaaaagggggggggcccttttaagagaacccaagtttacttacccgtgcttgccaacgtaataagtttttttttggggccccctaaaattaaattcattggcccggcgtttaacaacgtcggaaactgggaaaaaccctgggcgtaacccaaataaaaagctttgagaaaaatcccctttt

SEQ ID NO: 8197 - DNA, 583 bp, Chlorella sorokiniana
  unsure (1)..(583): unsure at all n locations; Clone ID: LIB3602-104-Q1-K1-A8
cagcagtgtcccccgtccaccagtagtgcgccacgccagcccaggcgcccgttgtggtgcgagcaagtcccagcgcggccgagccaagctctccccctcccccgtccgccccgcgccctgcataggccctgccatccctgccgagcccttgccatgcacattttgctgacgatcctgcgtggaaggatcattaacctctgagcaccatgttaaggcagcatgcggaatcatacggcacgcactgcagcaactgggaggcgttgggcctggtggagaagaaccccgctgcccagggcggccgccgcatgattgccgagggccagctccatatggacctggtggcgggcggngtgaccgtgacccgttttcactacctgggctgagcagngcgccgttggggggccgtccgacagtcgtattgcgcgggctgagcgcggngccgtcgtatgcgctgtggttgttctttgttggtacgcatggcttgatgttgtgggtaggttgatggacgtgttttgatgattttgtgtaattaaatttaggantgtttttttttttgtggnatttgtttccgcccacccccccc

SEQ ID NO: 8198 - DNA, 398 bp, Chlorella sorokiniana
  unsure (1)..(398): unsure at all n locations; Clone ID: LIB3602-104-Q1-K1-A9
cacccgcagggccccattganacctggctgaccacctggcggcccccgncgccaccaacttctgggtggactacgcccccaagtccgccggcatcggctactaagctgtttccgtcgcttgactggcgccgcccgctcgcccgcccgctgagtttacggccactcgcggcaacaggcagcagcggcgtctgtactttctgactcctccggcgattgctggtggcgcaccttgcttgctttgatgcttgcttcgggggcctaggcaccctcccatgcaacacatgaaccccaaaaaaaaaaaaaaaaaaaaaaaaaaaaaaaaaaaaaaaaaaaaaaaaaaaaaaaaaaaaaaaaaaaaaaaaaaaaaaaaaaaaagggggggcccgttttaaaggaac

SEQ ID NO: 8199 - DNA, 533 bp, Chlorella sorokiniana
  unsure (1)..(533): unsure at all n locations; Clone ID: LIB3602-104-Q1-K1-B1
gttctagacgcgggcggcgctcgcgactagactagtggaaccgaccgcgggcggcggtggcggcctgcggccccttcctcatcgccaacgagcgcaccgccctggcctgcgctctagaagcagaggccatcgagacggacgccgccagctgccccgagatctgtgcagacctgctgtcgacactgccggcggactgccaggcggccgtgtcggtgctgctgccgcgcgtcatgcaagtcaaggcgccctcgtttgagctgctcaaccagatgtgcggcaccatgctgagcaagagcagcaagatgcccgctgcgcccagcagcggcagcagcggcggcagcggcagcggcggtgccaccagcagcggcagcagcagggcaaggtgtgtcggctgggcgggcctagctgtcggggcggcgctcgcgacaagtttggctctgtgatagcgcgtggttcaactcgctctttctacattattaatgaacagcgcatgtaatgcacagactggaaaaaaaaaaaaaaanaanaanana

SEQ ID NO: 8200 - DNA, 571 bp, Chlorella sorokiniana
  unsure (1)..(571): unsure at all n locations; Clone ID: LIB3602-104-Q1-K1-B10
gcgggagcanagggcctgcccaagnggacgccgtacagnacatccgcggcttcaccaccanaagccattgcctccatgcagagcctcaaggcgcagggccggctctcgctggacaaggtgctggacctgaaggagcagggcgtggacgtggcgtcgctgctgggcgacgacgtgcggcagcagctctaccgcgcagaggtggtggagcgcctgtcggacggaaccggcaacttctccgccgagcgcatgctgcaggagctgcctgagcagctgggcctggatgcgggcaaggcgcagaaggtggtgactgagctggccaaggacaagaagcacaccacgctggtgcaggcggtggcgtgcctgcggcagaagaaggtgggcgacaccgccaagcagctcaacaacctgctgtcctgcgagacggcggtgcccagcggcaaggcgcaggagtggaaggagaaggatgagatcgccgacctgttctccgcctacgtctccaaggaggctgcgcgggagaagcaggacgcggtgcagcgcatcctgngcctggccgacgccgaggcggagggcc

SEQ ID NO: 8201 - DNA, 459 bp, Chlorella sorokiniana
  unsure (1)..(459): unsure at all n locations; Clone ID: LIB3602-104-Q1-K1-B11
gcgcattcctggnagcaggtcgccgcggcatgcccgctgtggtcgacggcttcatttccagcgtggcagcggcagtggcggcacgcgccgaccctcgtgcagcggcagtgcagttttggagccacgccagcgcggagcgtggcgcggctgccgctgccacggccgccggtagccacgcgcaggctgcactgtccatgggcctgcgcctcggcgagggcacaggggcggtgctggcggtgccgctgctgcggtcggcggcagccatcgctcgtgacatggcttcgctgaaggaagtgctggcagcagttgcgcctggggcagatagccggggtgatgacagcagcatgagcactgactcgcggccctgatgcgcacgcaacttgcattgattttttcatttttttgccccattctttttctttgccatccataaggtgcactgctgcaaatcatacacac

SEQ ID NO: 8202 - DNA, 251 bp, Chlorella sorokiniana
  unsure (1)..(251): unsure at all n locations; Clone ID: LIB3602-104-Q1-K1-B12
cccgggtgcgaacccacgcgtccgcttcttccccttttacccggnaaacttactcctggctcgctgctggtcccagccccaagaataccacgtgtgggcacctttggccgctgacgtctcccaaaatctaacccgccccaaataacctgtccctttgctgccgcccccccccacccgcgcggcgcgccctcgctggggggggggggggggcccnccccccccntcccccccnaaccccctgcggggggggg

SEQ ID NO: 8203 - DNA, 543 bp, Chlorella sorokiniana
  unsure (1)..(543): unsure at all n locations; Clone ID: LIB3602-104-Q1-K1-B2
cgcgntccgagctcgccgcaccaccgtgcgcgtgcaggctcagcaggccgcgccccgcgctcaggcccccaagccccagcagtttgctgctggcctggctgccgccttcgctgccgtgaccctggtgctggcgcccgccgccaacgctgctgaggcccgcgcggaagtgaagagcgtggtgtgcgccagcaaccccacctccaagatctgcctcaaggacagcgccaagaactgaggcgtgccagctggactgagcgagcgctgagcccttgctggccgcacctgaggcaggcagccattgctgactgccggggggcaccgggccgccacccgctgcccggcagcatgggcgaggcggcgtgagaaagagaggacttgtgcactgccacacagttttttggacacctgtgctgtaacatatacttgaggaaaaaaaataaaaaataaaaaattttttaatttattgattatggatttttttttttttgttgtttttttatttttttatatatgttttattttttattttttattttttttttt

SEQ ID NO: 8204 - DNA, 136 bp, Chlorella sorokiniana
  Clone ID: LIB3602-104-Q1-K1-B4
cggcggcgatcgaagcggcagcggcaggggcaacgacggcaatccagaacaccgttagcctctaatgctgttatagatctgcagcattggaatcctgagtgatttgtatgcctcaaactttcacaaacccaaccac

SEQ ID NO: 8205 - DNA, 516 bp, Chlorella sorokiniana
  Clone ID: LIB3602-104-Q1-K1-B5
gtcaccggcccactcggttgtgccatgcccagctgcctccacgtcacccttcatcaaccctcacccaacccatccacctgccacccatccactcaccttgcgctgcgccacaacctgtgccacccactcaccacccatcacccgctcaacgccctccatgcaccatgctccccatccactaaatctgccaccccaaacgcacgtgcgccgctggaccacactgccgccccctcacccgtacccatcttccacccgccaccttttctgccgatcaccgccgaacatgctacctcccacacctcactccatgtccacccttcacccgcgcttcacacagagggtgctgccatgcaaagctgctgccaaacccatgcatcatgctcggacacccactgacccacacgttcaacgtgtccggacccattttcaaggtccgactgtacagtgcctttttgggtccttatgccgagctggtaccaggacttagagtgtaacagaaggtttgttttatataag

SEQ ID NO: 8206 - DNA, 523 bp, Chlorella sorokiniana
  unsure (1)..(523): unsure at all n locations; Clone ID: LIB3602-104-Q1-K1-B6
ncagcctgnacgaggcagnctacagccactacaagcggcagcgcaccacgccgcgcatgagcagcatcagcgnagccagattactacctgacaactcgctgtctgaggggacgtacggcatgccggctgtgctgcagcacaagcgcacgcagggctcctcgctgcggggcgggcccaagccaatgatgatgcagcgcatcgtggtggtcaaccgctcggcggcccaggacgacaagccggagcgcctgcacgactccttctccgccgtcgactacagcgccagccgctgagcggcagtggggcgcagttgtgcgcccgcagacgactgttgatggcccgagccagctggccggcggtgggcagaggcccgcaggcattgccctcgaagttgccagcccggcggcacaattttggctgcatcgctgtattgctagtgttcacatgcacgtatgttgtatgtccttggcgctgctgcgccccatgtagatcgtttgcatgcaaaaaaaaaaaaaacaananaccg

SEQ ID NO: 8207 - DNA, 522 bp, Chlorella sorokiniana
  Clone ID: LIB3602-104-Q1-K1-B7
ggtgatgtggtgcccaaggtgtcaacgcctccgttgccaccatcaagaccaagcggaccattcagttcgtggactggtgccccaccggcttcaagtgcggcatcaactaccagccgcccaccgtggtgcccggcggcgacctggccaaggtgcagcgcgcggtgtgcatgatctccaactccaccgccatcgccgaggtcttctcccgcctggaccacaagttcgacctgatgtacgccaagcgcgcctttgtgcactggtacgtcggcgagggcatggaggagggcgagttctccgaggcgcgcgaggacctggcggccctggagaaggactacgaggaggtgggcgccgagtccgccgagggcgacgaggacggcgaggacgagtactgagcggcggcgtgatgtggcggcggtgtgggcggcggctgctcagtacggcagccccgagccctgcctttgcagtgcctgcgccgtgtgactggatgaggcggcggaatgaaatgtaacatgaatgaacagt

SEQ ID NO: 8208 - DNA, 496 bp, Chlorella sorokiniana
  Clone ID: LIB3602-104-Q1-K1-B8
gaaaacgataaactgaccaaaggactaaaccctagacagcggaacatagaaaaaaatgaaacagaaaccaaacaaaaacagcggagaacccactacgccgaacctctcctaacaagcccttcttaggcggcctgggggggtacatcatcaggggccccgtggtggccatcgctctggagggcaaggacgtggtggcccaggcgccccaagatcatcggcgcctccaaccccctggcctacgaccccggcaccatacaccgcgcgtacgccatactacattggccgcaacgtgatccccgtttgcgactctggggaaaacgcgcagaaggagctgccgctctggttctccaaaggcctggtggacaacaggcccgtgctgcgcggccctatctacgagtgaaccgcgcacagcgggctgtgagggcgcccaagcactgggcgcctgtcagctagcagcggtaggctcgctcccttagactctttccggctccaaaaa

SEQ ID NO: 8209 - DNA, 548 bp, Chlorella sorokiniana
  Clone ID: LIB3602-104-Q1-K1-B9
gtgcgagcggcttggcagcacaggggcaccatgaaattctccagcaccgtgaccagcagccgcaggaagtgcaggaaggcgcacttcacggcgccctccagcgcgcgccggaagctgatgagcgcgccgctgtccactgagctgcgcaacaaatacggagtgcgctcggtgcccatccgcaaggacgacgaggtgtctgtcgtgcgcggcacctacaagggccgcgagggcaaggtggtccaggtgtaccgcaagaagtgggtgatccacatcgagcgcatcacccgcgagaaggtcaacggcgccaccgtgaacgtgggcgtggacccctccaaggtggtggtcaccaagctgaagctggacaaggaccggcgccagctgctggagcgcaagcgcgcgggcaagggcctggccgacaagggcaagttcacggaggcggaggtggcggccatggagaacgtggactaagcgccacgcccaccccgcagcagccagcaccatgagcagcgtttaggctcgcaagaccggccaccgacaccagtacggtt

SEQ ID NO: 8210 - DNA, 503 bp, Chlorella sorokiniana
  unsure (1)..(503): unsure at all n locations; Clone ID: LIB3602-104-Q1-K1-C1
ccccgcgtccgcgcttcatcttccccgcggccaggcgtgattgtgctggctngagggccgcctgctcaactgggctgcgccaccggccacccctcgttcgtgatgtcctgctccttcaccaaccaggtgattgcgcagctggagctgtggaacgagcgcagcagcggcaagtacgagaagaaggtgtacgtgctgcccaagcacctggacgagaaggtggcggcgctgcacctggccaagctgggcgccaagctgaccaagctgactgcggaccaggccgcctacatcaacgtgcccgccgagggcccctacaagcccgcccactaccgctactgagcgtgcggtgcctgcggtgcggcggcggtggcctgcactgctggggcgtcggcggcccctcctgcgtcctgctcgcgtctcccgctccttttgtctcgctcccctctgattcgtccattcttattggctgcaacaagccactcggttatgtagtggaacggaccctc

SEQ ID NO: 8211 - DNA, 246 bp, Chlorella sorokiniana
  unsure (1)..(246): unsure at all n locations; Clone ID: LIB3602-104-Q1-K1-C10
ctgtgggaacatgacagcgcccagctgtggagcgggggctnaagggcagttgggggatgccgagctgcagcaggaggcagctggcggacagcaaacagcctgactctgaatgatttttgtgcacagcagggacgaggcgcttgtgcatcgccctgccctggcacacgctcctgacgcccttttggctttgatccgttgcatagcgcaaattcgactagcgttgctgtactgtaatcgtatggacac

SEQ ID NO: 8212 - DNA, 562 bp, Chlorella sorokiniana
  Clone ID: LIB3602-104-Q1-K1-C11
cgttcttcctgccctgctggtcccgctgctggccattcgctaaattggctgatgtctttggccacctgcagcggcgacggaggcagcccgctgcgcctgctgggcctgctgctgctcagccacccgggcacgtgggtgctcatctccgcgctctgcagcggcgcggccatcgcagcaaacgtgctggtcctgcccatgctagcggcccctacggagtgggccatgcgcggtatgtgccaacaagtgctgcacgtgccgggggtgagaggagcctttagcccggatgcatggcgcgctagataccctgcacggaaactcgctgctgtcgcagtcgtatgcagcggtgctgggagagccgagcagaatgcagtgctgcctggcggtcaacatttggcttgcagcggcagttggcgtggtgctcccactgttcgtgctcgggcgctgggaggcggcggggcggtgcagcctgtatgcacggcgctggcggcaggcacagcaggcacagcaggcgggggacataagctcacctgccgcggcaggatttggagcgtctgtgtaaaag

SEQ ID NO: 8213 - DNA, 511 bp, Chlorella sorokiniana
  unsure (1)..(511): unsure at all n locations; Clone ID: LIB3602-104-Q1-K1-C2
ggnagcggcagcatcaacttggcggcatgagcgggatggcgggcaagctggtggccagcggcggcagccccaccagctggcaaggcctgcagcagcgggtgccgcagcagggggcaacccacgctggctctggcacctttgcgggcagccctgggacctactactggccaagcggcggcagcccgcgtgccagcccgctgcgccccaagcacagccccctggccgcaggcctgcctgccagcccagccgcaggtcggcagtggggcattgccggcagcccgtcctcgcccaccgtgctgcgcagcggcagcggcatgcctgggagcccgttgattggagcgcggtggccgggcagcgggctctgaatgtgctgggcgactggtgaccacatnttgaatgactgactaacaaagttattgcaaactggtcagggttgggcagtaaaggtagtaatttgttttnaattttaattgtttgtaaaggggcctgtgtaaaaaaaaaatattaatta

SEQ ID NO: 8214 - DNA, 327 bp, Chlorella sorokiniana
  Clone ID: LIB3602-104-Q1-K1-C3
gggcgaataatagcggcgccagcttggtcgctttagcggtggacgacggtgcggagaaccatgcgcatgtttggggtacggcgggcggcgggcgcatttgctccacgcccgccgcggatttccttctaccacccttcttcccagctgttctgccctgcccattcttcatgcctgcatgccttgccagcgcgcttccctctgcccgccccaggcggcgggcctgccctgctcaactgccgctgggatgccgtgctgcgccaagaaaccaaccgctcttgctgtgtgtaacacatgcttggggaaaaaaaaactgaaatacaaatgaat

SEQ ID NO: 8215 - DNA, 615 bp, Chlorella sorokiniana
  Clone ID: LIB3602-104-Q1-K1-C4
gtgttcaaaaaaaaaaaaaaaaaaaaaaaaagaaaaaaaaagaataagaagaacataaaaggaaaacaaaaaaaaaaaaaaaaaagcatgaaaaagtaataaaatattaaatagagttgggctgggccgttttcagggggtcccatgtttcttccctgtgggcttctcgggtgtttcctgtgtgtttctccggcttgctcgggttgactcccctgggccccctcttgccaaatggggtgaatggcggaaagcctcctcacttcccgctcttttccgcctttgtgccccttctcccttttggcatggtgggcttatttggtaaaggggctttgagccgtggggggttgtccttggtttctgggcagttgtgattggtaaaggggtccggtcccttgaaattgggctcttttgcgcttgggtttttttgttttatttcgcatgttttgcctgtttatttgtgtttggggtctgggattctggggtttttttgatggtttgggtttttaggggttgggggggtttttttggggtttttgttatgaggtttttgggtggtggggttttggttttgggtttttgtggtttttgggttttcctctagcctccccccccccc

SEQ ID NO: 8216 - DNA, 64 bp, Chlorella sorokiniana
  unsure (1)..(64): unsure at all n locations; Clone ID: LIB3602-104-Q1-K1-C5
naaaaaaaaaaaaaaaaaaaaaaaaaaaaaaaaaaaaaaaaaaaaaaaaaaaaaaaaaaaaaaa

SEQ ID NO: 8217 - DNA, 522 bp, Chlorella sorokiniana
  Clone ID: LIB3602-104-Q1-K1-C6
cagtctggcacgcgagtgcgcgctgcgccaggcgcaggagcaggcgctgcaagagactgtgagggacctggagcgcgagattgagcgcatgcgactgccgggcaagcaggactcgattgagtacctgaagaacgtgctgctgcggctgtatgagaccggagaagcagactcgctgctgcccgtggtggcgcaggtgctgcagttcagcccagctgaagtggcgcgctgccgcgacgcgctacactcgcgctccggccacctgactgccggcgccggcgccaatggcgagtcgggcggtgtggccagctacgtgggctcatggtttggcggccggtagccttaggctggcgcgctgagcagggccagatcggcagggccagcatcacagcagggccggtatcgcatcagctctgcttgcaaggcagatacggcaagtatgcggctgcccagaagaaactcgaatgcagactggcagcatctaatgtgttagacagtgaaagcactgttgtaaactgattttgg

SEQ ID NO: 8218 - DNA, 553 bp, Chlorella sorokiniana
  unsure (1)..(553): unsure at all n locations; Clone ID: LIB3602-104-Q1-K1-C7
ctcttcacccaccaactgcacgcctcagctggcacagtaggcacatccagcgctgcagctgggccgctggcctggcggcagttggcagatggagccagcagccttgcggcgctggcggcagccactgggctgctgtcgcccctacgtgggctacgctcacagnaaaacgtcagctcagactccatcattgcctgcgcctgcctgctcctgctagctcacctgtacctgcacgattaccacttcacagccggcctcactgcccacctgagcggcagcctggcgctgggctgcgctgtgtgcggcagcgtgctcatcgcctcgcggctgcgcagcccgctggcagtgtatgcgcagctgctgctgtcgctcgagctgtacatcctgggcccgtattgccgccgccaggtggcagcagcctcatccgctgcgcacgctgtgctgacggcagccatggctgttgcagcgggcatgctcttggtccgccactgtccgctgctcacctcggcgtttgcctgcgcattggcattcatcacgctggtgtgcccctggtggc

SEQ ID NO: 8219 - DNA, 569 bp, Chlorella sorokiniana
  unsure (1)..(569): unsure at all n locations; Clone ID: LIB3602-104-Q1-K1-C8
cggncgcgtgggtgcagtacggcggcggcatctacaagatgcagattggtcggacatcaccaacgcgcatctggtgcccggccctggcatcatcgatggcctcaagcaggttgggctgcccaagggccgcgggctgctgctgctggcggagatgagcagcaagggcacgctggcgcggggagactacaccgaggaggtggtgaaggccgcgctggagcaccaggactttgtcatgggcttcatctcggtgtcgccatcctcctggaagagcagccccaccccgcccggcctcatccacatgacgcccggcgtgcagctggcggcaggcggcgatgcgctggggcagcagtacaacacccccgccagcgtcatcggcgagcgcggcagcgacatcatcattgtggggcgcggcgtgatcaaggctgcggaccctgctgcggccgctgctgagtaccgccaggcgggctggcaggcgtacgaggcggctctgcaggcgtgaggcagcctgttggccccttgctcaggcctttcttggaccgcccgccgcgtgactcgcacccctgacaccg

SEQ ID NO: 8220 - DNA, 575 bp, Chlorella sorokiniana
  Clone ID: LIB3602-104-Q1-K1-C9
actagagcctgggctgacgtatgatggaacactcaaggctcacacgcctgggctgctacataggcgctatgctccacacagagttgctcactcacaggctagagcactggtctgcgtattgggaatgctgacgcaaggcgcgcacgtagggcgtggtagctgcctaaagcatgtcaacgtgcgcgtcatcacagtaagcgcatccacgtacacatagagcacgtgacccccatccggtgccacgtagagttactgcgccgatgaaaggagaacgacgcggctcggcacgcccgcaacgtggaaggcaagtcattgccattgctcaatcgccagcccaaaggcccacctaccggggccatcattctggacaacgtcaagatggagaccatcacggtgcatccgctacaatatactgaaagagggcatgcatctgagcgtgatctgcggcgactgtacgctgattgcggctgcaccttattgagatgttactacccacaagacgcgccgattgcctcgccgcgctttgacgccagcatacgcaccatcgccacctcactgggggctagctgagcgat

SEQ ID NO: 8221 - DNA, 569 bp, Chlorella sorokiniana
  Clone ID: LIB3602-104-Q1-K1-D1
cgccctccacagggcggcggcagcgagggcgacgaccggcatgtgctggtggagcgcagcgacagctacaggggcggcggcggcggcagcagcagcggcgcagccatgtggtgccccatgacggcctgggagacggcagcggtgcgcctgctgcacgagcagccgggcatcacgctgggagagatggcgggcctgcacccgctgccgccctgctgggcgggcacgtttgcggcctatgcagcctacgtgctgcgccgcaagcagctgttcaacgtgcggccctcgggcgggcagcgcgagagcgccgctgtgtacgcctccaagggcgcccgcgcatttttgctgttcaagcgccgcgtgcttcagttcctggcggagcaccggccgcgcaccgatgtgcacgccgtgctggctaatgtgcccgctgagggcatggcgcagcacctgatgagcgagctggagcgcaaccccgtggtgtttctgaccaagtaccttggcggcgagcttgcggttgtggaccctaagcaaggcagcgtgcgcgacgctcgcctgctggagctgcgcccctt

SEQ ID NO: 8222 - DNA, 561 bp, Chlorella sorokiniana
  unsure (1)..(561): unsure at all n locations; Clone ID: LIB3602-104-Q1-K1-D10
cgcccagcacctgtatcagcgctgtgcctggccgctgcgcacctgccgccaatggcccacctgccctctgcgtttgaaactgcaaattgaacccaccgatgcgccgcatgtgtgtactgctttcttcaacgccaccatcacccaccccctcattcgcaccatccctgcactacccacctcctcgccggctgcatgcgctgcactcagcaccatttcatcaaccaatcgcctccctttcatgcgagacttgctctccctgcactctccctttgccctgcccccccaagccaaactcaagcacctgctcaagccaacccacatccgccctttaccaagcaaacccaaacttctcatgcaacagttttctcccccttttcattccagtaccagtgtttgactaccaatcgtcctcccaagcggggctgccaagcctttttgtccagctgccggctgtcatgagctgttgccgctgctttcccccatccggcttgcgctgcaccgncgatcctctctactcccttctctgtacaggtggctcagcagatgtaacatgcgagcttg

SEQ ID NO: 8223 - DNA, 572 bp, Chlorella sorokiniana
  unsure (1)..(572): unsure at all n locations; Clone ID: LIB3602-104-Q1-K1-D11
ggccaaagcgcctgggnaaggcgaagccgtcggccgagcgaaaaacagccgccatggctgcctcccacaanaagtgggtgcctctggagtccaacccggatgtgctgaacgagtacgctgccaagctgggtgctgacctgtcccagtaccagttctgcgatgtctttggcctggacgaggagctgctggccatggtgcctaagccggtggcggccgtgctgctgctgttcccggtgacggagggcaccgaggcggctcgcaaggcggagcaggaggagattgaggccaaggggcaggaggtcagcccctccctattctacatgaagcaaacgataggcaacgcgtgcggcaccatcggcctgctgcatgcactggccaacagccgtgacaggctgcacattgccgacggctccttcctgcaccagttcctggccgcaaccgagggcatgggggctgccgagcgaggcgcttaccttgagcacccgccccagggcgcgcccgacattgactccatccaccaggaggcagcgcagcagggggccactgcggcgccctctgcagacgaagaagtc

SEQ ID NO: 8224 - DNA, 150 bp, Chlorella sorokiniana
  Clone ID: LIB3602-104-Q1-K1-D2
gctctagctgcccccctacgcaccggaaattgacttccgaatcacaccccacgcacatacacgccgtgcacttgcactgttgcgccagcggtttttacgcacaccatacccaattttggctcgttgaagcacggtgtaagcaagagcagt

SEQ ID NO: 8225 - DNA, 586 bp, Chlorella sorokiniana
  unsure (1)..(586): unsure at all n locations; Clone ID: LIB3602-104-Q1-K1-D3
ggccgttggngcagccagcggctctgcaccatggcggagtccgtccacctttcggccgcaagaagaatgcggtggctgtggcctatgtgaagcgcggcaagggcgagatccgcctcaacggcgccccgctggagctggtgcagcccgagacgctgcgctggaaggcgtttgagccggtgctgctgctgggcaagcagcgcttctccaacgtggacatccgcatccgcgtcaagggcggcggccaggtgtcccagatctacgccatccgccaggccatctccaagggcattgtggccttctaccagaagtacgtggatgagcagagcaagaacgagatcaaggacatcctgctgacctacgaccgcacgctgctggtggccgaccctcgccgctgcgagcccaagaagttcggtggccacggtgcccgcgcgcggtttcagaaatcttacaggtgaaggctgccccgtgggacggttgggcgcctctggaggcttcttctgcgccgctggcgtggcggcagcggcgtctgcggccttagcagctgccctggagcagcatgccctcagcgaaagcaccatgagtacac

SEQ ID NO: 8226 - DNA, 574 bp, Chlorella sorokiniana
  unsure (1)..(574): unsure at all n locations; Clone ID: LIB3602-104-Q1-K1-D4
ccccgcgtccgccagtttggcagcccgcccggcccagnacgcgccgctggacatccccagcggcggcgagcacgatctgcacgacgcactgccccaggatcccttcgccctgagcagcacagccgagatgagcgtcagccccgcggagctggaggagcttgaagaggtggagggctgggtgaacctgatggcggagctggagggcatggagcaggaccacctcatcgagctgagcctgcgccacgcggacaagagcaaaattgcgcagatcaaggccgcagcgctctccaaggccaagcagaaggtgcaccacaagcaccacggcggccaccgcaagcaggcgccagcccaaaaggcatgagcacggcactggcctgccgccctgctggcgcgcccgcctgctctctccagccacccccgcagcagccgtccctccgtccgcagtatgcagcaccgccccgcaacctcccctgtgccattctttctgcctgtatccctcgctgtaccacttcccaaggcgttgccacgaggggcgcggncacgggcaggcgccggggcgctcggcgagttgacc

SEQ ID NO: 8227 - DNA, 309 bp, Chlorella sorokiniana
  Clone ID: LIB3602-104-Q1-K1-D5
cactataaattactagtatatattaaatctaacggatagaaggaaccacaaaaaacacctttaccggaggaacacctattggcgatacactatcccaaccccggctgatgatgattgattatgtgcgggtgcacggtctgccgtatgcgctcagcaaggcgcagcgatagaactggccctgcaacaacagcagcagggcgcattaacttgttggacagcacttgcattcatttataatattaacagtcactgtaacatgtaaacagggtgcttgctgggaaaaaaaaaggaaacattgaaatagaactg

SEQ ID NO: 8228 - DNA, 489 bp, Chlorella sorokiniana
  Clone ID: LIB3602-104-Q1-K1-D6
gcgtcataggtttcacagcctgcagcgttcggcccctggtcaccttgatccgtgcagtcagctggacgtgacagccacatctcgcgcagccccgcacccaagccgcccccaccgtccgccgtcgtccgtcgcctgtctgtggctgccggcgcgtcgtagcaccatggcctcctccgctggcctggcgccccgtgccaaggccgtgctcgactactggtttggcgagggctgggaggtggcagacccgaacgatcggcacgcctgaaaagttccagatatggtatcgaggcggcccccaggtggatgccgagatcatccgcctgttcaccggcgactgcgaggcgctgctgcgcggcgagtatgatgcgtggcagggagggcggccggaggaagcgctggccggcatccttatcggtgaccagctgttccgcaacgcctttcgcggcaccgtcaagatgtatgcagctcgacgacaatgtgctgtattgg

SEQ ID NO: 8229 - DNA, 496 bp, Chlorella sorokiniana
  Clone ID: LIB3602-104-Q1-K1-D7
taaaaaaaaaaaaaaaaaaaaaaaaaaaaaaaaaaaaaaaaaaaagggacggacgaataataaaggaaacaaaaataaaaaacagggggcgtgcgtactaaaataacctcttatttagggacacactaaatgcaatgcactgggccgtttttttgacaacgccttaaactgggtaaagcgcgtgcggttttcccaacttattctgccttgggaaaacatccgccatttccccagctggctgtatttggcgaaaaggccccggtcttatcccgcctggcccaacaatctgaacaggcctgaatgcggaaatggcttctccccctgttgccggggctttaaggcgcggaggggagtggtcgcttatctcggcaacatttaccgctcacacttgtgctaggggcttacgcccccgctcctttcggttttcttgccctgcctttttggcgcccggttcctttggcttttcctcccctagcctttttaagcggggggctcc

SEQ ID NO: 8230 - DNA, 374 bp, Chlorella sorokiniana
  unsure (1)..(374): unsure at all n locations; Clone ID: LIB3602-104-Q1-K1-D8
agcgtttcgacgtatggtggtacgagcatgaggggggggagcgggttccaactgccgttggtgctgaggtaggtctggaattgaaatttaaccgttggtagctggtggtggaggagcccagctgcgttttgtggctgtggtgctatctgggtatgaagtggtttgnaaacaatatggtggggatgtggggggagtgtgaaagtattgagtatttgttgttggggggggtggagaatggtgtttttcttatttggggttttttgttgtagtatattttttgggtgtttgttaatggtgtttggtgtgtggtttgaagtttttttttgttggttgatattgggggggggggtttttgggaatttttttttttggtt

SEQ ID NO: 8231 - DNA, 468 bp, Chlorella sorokiniana
  Clone ID: LIB3602-104-Q1-K1-D9
acaaaaagacagaagcgcgacaacctaccgacgaaaacaacagaagaaaccagaataaaacacaaatagcaaaaaaataaacctaaaaaaaactgaaaagaagaacaaaaaaactaaaaaaagggcggcccttttagggtgcccagattaaggtggccggccttggagtgtactcccttttttttggggccttcatactcaattgggttggcctcagttccacagctgagggcatggagctgcccttcattcaccccctgttagtcggtttgagcattgtctcttttatgccgtcgccggaaagataaagggcctgttccctgtggccttttactaaagtgggctgccctgattggctattggacccccccctgaaccgggcttttaaaccggacgcctccgggggtcccccatagcagccccgctacttttggtattccttttaagccccttctttttttttttttt

SEQ ID NO: 8232 - DNA, 572 bp, Chlorella sorokiniana
  unsure (1)..(572): unsure at all n locations; Clone ID: LIB3602-104-Q1-K1-E1
naaaaaaaaaaaaaaaaaaaaaaaaaaaaaaaaaaaaaaaaaaaaaaaaaaaaaaaaaaaaaaaaaaaaaaaaaaaaaaaaaaaaaaaaaaaaaaaaaaaaaaaaaaaaaagggggggccgttttaggggacccaagtttacttccccgtgcttgcaacgtaatagtttttttttggggccccctaaattaaattcatgggccggggtttaacaacgtcgggacgggaaaaaccctggggttccccaatttaatcgctttgcagaaaatccccttttccccagttggggtaataccaaaaaggcccgccccgatcgcctttccaaacagttgcccaccctgaatggcaaagggaaccccccttttagcggccctttaaccccggggggtgtggggtttccccccagggtgaccgttacatttgccagccccttagcccccgttcttttcgtttttttcctttcttttttggccactttggcgggttttccccgtaaagctttaaatggggggttccttttggggttccgattaagggttttagggacccttaccccaaaaaaattgtttggg

SEQ ID NO: 8233 - DNA, 339 bp, Chlorella sorokiniana
  Clone ID: LIB3602-104-Q1-K1-E11
caaaaaaaaaaaaaaaaaaaaaaaaaaaaaaaaaaaaaaaaaaaaaaaaaaaaaaaaaaaaaaaaaaaaaaaacccttgcttgcttgcttggccctaatgtaaataactccttgttgttgctgctccttgtttgtttactcgttgcccttttcgcgctgccccaccaacctgatacatgcaactttttttgtaccctaagggctgcccctcggttaccccgctctttgaatgaataaatctgttccacttcccctccgtttttggttgcggggagcccaaatgccccgcccactggcctgcactgaattgaacgtgcataatgtaacgcggcccgttcc

SEQ ID NO: 8234 - DNA, 582 bp, Chlorella sorokiniana
  Clone ID: LIB3602-104-Q1-K1-E12
acccgtccagcagcagttagcagccatgcaggccaccttcgccggctctaagctgcagcttggcgcgcgcgtcagccgcaagagcgtgaacaccaccgtggtggcctccagcggcaagaagatcgacatcagcaagcagggcctgaactccatccagaatgagaccgtgaagctcaacctgatgggcaagtccaagaccatggagagcaaggactgggtggacccccagggccgcaagggcaagggctacggcgtgtaccgcttcgccaacaagtacggcgccaacgtggacggctacagcccgatctacacccccgacacctggtccgagtctggcgactcttacaagctgggcaccaagggccttattgcttgggccggcctgattgtggtgctgctgggcgtgggcatcaacctggtgatctccacctctgccctgggccagtaaatggcgacgccccccgcgtcggcagcagcagcagcagccagcagcattcccttgcagctaccccccgagaagacaaaccctcaccctaccctagctggcggcgtcaccatgcgccgctcccttgctttccgttt

SEQ ID NO: 8235 - DNA, 335 bp, Chlorella sorokiniana
  unsure (1)..(335): unsure at all n locations; Clone ID: LIB3602-104-Q1-K1-E3
gngcttccgtcccggctgcgccactgttccggcgaggcacgcgcagcggcaccctcccttgcggccctgccctgcccntgatgtgaaccagccctggctctgtaccctcttaccgtcttcacttcccgagcagaaaattgcatcgagactgcgtttttggcacctcaccttgtcctgctgccgcgtgtaaactgccatgtttgaaaaaaaaaaaaaaaaaaaaaaaaaaaaaaaaaaaaaaaaaaaaaaaaaaaaaaaaaaaaaaaaaaaaaaatacaaacgaaataaatataaataaagagaaaacataaagggaattcattggaaagaattta

SEQ ID NO: 8236 - DNA, 477 bp, Chlorella sorokiniana
  unsure (1)..(477): unsure at all n locations; Clone ID: LIB3602-104-Q1-K1-E4
cagcagcaaggaggccatggnatgacctgaatggcgcgaggaccgcacggccgccttgccatggtggccttcctgggcttcctgtcccagcacgccgccaccggcaagggccccattgacaacctgattgaccacgtgtcggacccgtgggcggcgaatttctgctccaacggcgtgagcctgccctccgccttcgccaacgtgttctgagctggctagcccgaccggcggcaaacaaccctgagaagagcttcgcccacaccccaagggcaccccgattgtgttttggttctctattctcctgctacgcgttctgcacttgcacctgccgagctccccccgactggcatgtaaccctcaccggcaaaaaaaaaaaaaaaaaaaaaaaaaaaaaaaaaaaaaaaaaaaaaaaaaaaaaaaaaaaaaaaaaaaaaaaaaaaaaaaaaaaaaaaaaggggcggcccgttttaaaagaac

SEQ ID NO: 8237 - DNA, 439 bp, Chlorella sorokiniana
  Clone ID: LIB3602-104-Q1-K1-E5
ccgtcgtcgagtagccagcacgaggccaaaacaagcccatgagctgcgcggcaagggcaaggaggagctgctgcagcagctcaaggagctgaagcaggagctgagcggcctgcgcgtggccaaggtcaccggcggcgcccccaacaagctgtccaagatcaaggtggtgcgcaagggcattgcccgcgtgctgaccgtggtcaaccagaagacccgggacgctctgaaggaggcgtacaagggcaagaagtacgtgcccctggacctgcgcgtcaagaagacccgcgccatccgccgccgcctcaccaaggcgcaggccaacgccaagactgagaaggctgccaagaaggcgcgcgccttcccgcagcggaagtacgcgctcaaggcgtgaaggccttggaagcagcccgctgcagccgtgcaggcacacctctaggca

SEQ ID NO: 8238 - DNA, 577 bp, Chlorella sorokiniana
  unsure (1)..(577): unsure at all n locations; Clone ID: LIB3602-104-Q1-K1-E6
gctccatgcagctcacatccccctggcagggcaccggnacagtatcaaatgctagtgcgtatgttgctactgtacacgcgtcatacaaaagggagcgctgaagcatgggcgggtgcgacctgtcaccccatctgcactacatgccgccggcgcgagctgttcaaggacgaggtgcgggcgctgggccggctgctgggcgtgccggagcagttcattgcgcggcaccccttccccggccccggcctggcggtgcgcatcatcggagacgtcacggagggcgatcgcctggacgtgctgcgcgaggtggacgaggtgttcatcaacgccatcaaggagtgggggctgtatgacaagatctggcaggcctttgccgtcttcctgcccgtacgctccgtgggcgtgcagggcgaccagcggacgcactcgcacgtggtcgcgctgcgtgcggtgaccagcagcgatggcatgacggcagactggtaccccttccagcccgacttcctgcgctacgtgtccaccaagatctgcaacacagtgcgcagcgtgaaacgggtggtgtatgacgtgacctccaagc

SEQ ID NO: 8239 - DNA, 574 bp, Chlorella sorokiniana
  Clone ID: LIB3602-104-Q1-K1-E7
ccgggcccgccgctcagcctcagctgccagcagtttctggcgcgcgtgcgtgcggcgcccaggcctttgccatgaacttggctgacgatttgacccagcacaagctggccttcctgacccaggtgggcggcgtgcccctggagcgcgccctgtcggccagccacctcaattacctcaagtctggcgtgaccgcattggcaggccgctacttcctgttgaccgagcacggcgtgccgctgccgcggcacaaggacggcggcattgggctgagctatgcaattaagggccgccatgccctgctgcgcctcttgcgccggcacgacagcgggcagcgcttgccgaccaatgatgatgccgcgctggcctacattgagcagtggctgaaggcctggccggagacggagagcggacagcggtggcacctgggggagtgactgccatgatgctttccctctgggctgcccaatatcgttgcagtccaatgatttctttgaatgtgcaggtcacacgctttgattttaccagtgcttacctacatgctatctgtctcaacctacattgcctgcgctcgcat

SEQ ID NO: 8240 - DNA, 476 bp, Chlorella sorokiniana
  unsure (1)..(476): unsure at all n locations; Clone ID: LIB3602-104-Q1-K1-E8
ccaccttcctggnacccaaggtcgtggcgctgcgactggctatgacactgctgtggccctgcccgccgctggcgacgatgaggagtacctgaaggagaacatcaagtcggccggcgcaatgaagggccaggcagtgttctccattgccaaggtggatgctgccaccggcgagattgctggcgtgtttgagtctgtgcagccttccgacactgacctgggagccaaggcccccaaggacgtcaagatcactggcctctggtatgctcagctttcgtaagcgctgccagcgcccgtcgtttggagaagagaattacagctttgtcgctcgacctgtttgtcagacgtagaactgctcatgtaacataagcgcgcanaaaaaaaaaaaaaaaaaaaaaaaaaaaaaaaaaaaaaaaaaaaaaaaaaaaaaaaaaaaaaaaaaaaaaaaaaaaaaaaaaaaaaaaaaaaaanaggggggg

SEQ ID NO: 8241 - DNA, 579 bp, Chlorella sorokiniana
  unsure (1)..(579): unsure at all n locations; Clone ID: LIB3602-104-Q1-K1-E9
gnaccggtgcagcagtacatggccgcgcaggcaggctgcgcgttcaaaacgtggccacctttgccccctttgacttcggcctggcatggcgcaagggcgccaacaccagcctggtggatgcatatgacagcctgctgctggcgctgcaggaggacggcactgtttcgcagctgcggacaacgtacatcgatgtgccgcgcaccgagtgcgagagcaatgtgaacgaccagacctccatctcgtttgaccaggtggcaggcctgtggatcattctgggcgcgggcgtgggcgccgccctgctctggctgatctgcctgcggctgtggaagcggcggcggctggcgcagaagcgagcgcgtgcggcggccgaggcggcagcagcggcagccaagctggggcttgaaggcgggcctgatcctctggtgcttggcgagcacagcggcgccgcaaatgggcagcaggccaagccgcggcatcaccagtacaaggcaggggtggccttccggcagacggtcagcatttacggtgcacagattggcacacaccgacgagaggctgaggcggcggcggcggcagcac

SEQ ID NO: 8242 - DNA, 415 bp, Chlorella sorokiniana
  unsure (1)..(415): unsure at all n locations; Clone ID: LIB3602-104-Q1-K1-F1
cacaaggcttcagcggcccagtttgggttcagcgccccagttcggattcaagcggcccaagtttggagggaaattcggcaaatggaagtgacctccccttccccttccttcctggaccaatctgccgcctgctctgccgcctagtcgccggccttctgtttcttggcgccctgcgtttagcgggatggaacactctggttggcctctgtattactgtaatgcttagctctgaaaaaaaaaaaaaaaaaaaaaaaaaaaaaaaaaaaaaaaaaaaaaaaaaaaaaaaaaaaaaaaaggaaaaaaaaatataaggggagccaagntaaaaggacccaagcttgcgaaacgcatacctctaatataatgtcccttaaattgaataaacctaaacgaaatttaaaaacctgtggtttag

SEQ ID NO: 8243 - DNA, 454 bp, Chlorella sorokiniana
  unsure (1)..(454): unsure at all n locations; Clone ID: LIB3602-104-Q1-K1-F10
gccgcancgcggtggcgttcgggcgccattctttccagcctgacctggtgcgccgcgtcgcgctgggcgcaccatacaaccaatacgaccgcaacacgttctacgcacaggggccggagggctacattgactatccttttctggaggatacgccggagggcaaagctttcctggccaaggcgtgaggcgcagcgccgctgtggcagcagtcagcaaagcttggtgccgccgccgtcgcctgctgccctggtgcacccagagcactgggtgccgcacacacccacgtgcggcagagaagaactgattgcaattggaaggcgacagctgcagctgccccgtgtgcgctgtgtgtgacaatgaggcctgcaagccgttattgatgaatcatccgacaaacagatgcccatgcatgccttctctctgctgacactgtccatttcattccacagctcgg

SEQ ID NO: 8244 - DNA, 582 bp, Chlorella sorokiniana
  unsure (1)..(582): unsure at all n locations; Clone ID: LIB3602-104-Q1-K1-F11
ggcagaaggctcgatgcgctggcgagtggcgggcgagnaacaaggccatgttgtggccctgtctgtcgtgcagcgcctgcgcggctgcaaggtcatggccgcctacagctccggcgccctgtacctgctggacggcagaagcgggcagaccgcccaccgcatcatgcagtttgcggtgcagcaagacagtgggcggcgcagcgcggctgccttcccagtgctgggcctcacggtctgccccaccgacacagctgtgtttgcgctgagcgggcagcaggatgtggtcgtgtgccgcgcacacttcctcaagaacgcagaggtccgcaccctggcacggctgagctttggggctcccgaccgtgcagccgcagctggtggtgaggcagcggtggcgcctgccggcacagcacgagcggcaggggcacctgcggcggtgcaggtggccctctccagctgccacagcggcctcctgtactgcaccgacaccagcagcccgggagccctgctactgctggactacaccacgcaagacattattaagacgctggtggccccactggctgaccgcggcagcgcactcac

SEQ ID NO: 8245 - DNA, 385 bp, Chlorella sorokiniana
  Clone ID: LIB3602-104-Q1-K1-F12
tccgccctctctttgttcattcccctcgggcctatgagccggttctctcgctgacgcctcctcgcctcctgacctgcttgctttgttggcttgaccctgcttttcgcccaccctgtgattgtactacttcttttctcctttagttcgatgtgcccgcggctagcgcctgtcctgcactcatgccccgtctgaaaaacaaaacaaaaactgcactgcatgtcactttgcatttccttgcacctcggcatctccttgtgctcacccttggcgctccctcgtccttacgccgtgttgctcgctgacccctgtcgctcgatccctgcctggctgacttttgattctcgctgaactgcacccaacagcaagacgcacacatgtaacgaac

SEQ ID NO: 8246 - DNA, 161 bp, Chlorella sorokiniana
  unsure (1)..(161): unsure at all n locations; Clone ID: LIB3602-104-Q1-K1-F2
agcgttcgnacagtcctttgttgtgcgggcggtgctggcgcgcctgctagtaggttcccgctttcacgagttcaaagcgcagtacggtcgtacgctggtcaccgggtttggcagtctgtacgggatgcctgtgggcgtggtggncaacaacgggattttgt

SEQ ID NO: 8247 - DNA, 498 bp, Chlorella sorokiniana
  unsure (1)..(498): unsure at all n locations; Clone ID: LIB3602-104-Q1-K1-F3
gcggcaacccggnaccgatccatccgacgtggcgcgtgcaggacggcaaggaggttgcacgctgngacgaccatgctggcgtgccacgtgcctgaagttctcgccgcgcaaaatgctctgggcatctgcttgcagcgccctggccttttggatcccagacatggcgcggctgcagcagctgcagcaggccaacccgcagccggccgcggcgccgccagcgatgatgcagcagcagcagcccatgcagccgcagcagcagcagccgcccatgcagcagcagcagggatggcagcagccggggccaccgccgcagcagaggtgggcgggtcagacgccgcagcagccacagcagcagcagcagccgatgtatcggacgcagccgccgccgccaccatccggagggtggcgatagtgctgttgaggctctacctggacagtttattgatggtttctcgtcctcatatgtcactgaaatgttgcactgtatgttcaatacgc

SEQ ID NO: 8248 - DNA, 554 bp, Chlorella sorokiniana
  Clone ID: LIB3602-104-Q1-K1-F4
caaaaaaaaaaaaaaaaaaaaaaaaaaaaaaaaaaaaaaaaaaaaaaaaaaaaaaaaaaaaaaaaaaaaaaaaaaaaaaaaaaaaaaaaaaaaaaaaaaaaaaaaaaaaaaaaaaaaaaaaaaaaaaaaaaggggggggcccctttttagggaccccactttttattcccccgtgccttcgccggtttttaaccttttttttggggccccctaattttcttttcctgggcccgggttttaacaccgtgggggtttgggaaaaccctggggttcccccattttattgccttggggaaaattcccctttttccccggtggggtaaaacccaaaggggcccccccgatcccccttccccaccatttcccccccctattgggcattggggccccccctttttggggccttttaccccggggggggggggggtttccccccaggggcccctttttttttgccgggcccttaccccccgtttttttctttttttcccttttttttttggcaagtggcccggttttccccgtaaaatttttaaagggggggttctttttgg

SEQ ID NO: 8249 - DNA, 549 bp, Chlorella sorokiniana
  unsure (1)..(549): unsure at all n locations; Clone ID: LIB3602-104-Q1-K1-F5
cgcgtggtgccctccgccacacaccctccggctttngaaaggccaacttcctgacctgcacgctgtcgtgcgaccaccgcgtggtggacggcgcggtgggagcgcagtggctgcaggccttcaagtcgtacctagaggacccggccaccatgctgctctaagccaaccaccacgctggcatgctgcttggcagcctgccgtggcacatcggcctgccctggcctgcgctgcacagcaccgagtgaccagcatcggctggtcagcggcggccaagccagcacggctgcgccaccacgcaccgcctcagttgcccctctaccttgcacacgtttcagtcctgatccgttctgttacccgtctctgtgcacccccctgaacagcttgtgtgtggttgctccgctgtctcgcgcctttcggagctgcgctccgcctggccccacctgatggtgttccttgtcccgcatcattttctgcttctttcctgcgcactgcacggncacgcaccttcgcctgccttactcacattttggtgtaagagcgcttaccana

SEQ ID NO: 8250 - DNA, 580 bp, Chlorella sorokiniana
  unsure (1)..(580): unsure at all n locations; Clone ID: LIB3602-104-Q1-K1-F6
ccccgccgccgctccaaactcacccgccgggccttctccnatcgccgaaacaggctgcaagaagcggaatcgtttttcgatgccagccggacggaggccttccttttgactgtgaacgccaccgactttcaccccgctcgctgccccggcaagctgcccgtcagctccggcttgttcggccagggcagcagcagcggcagccaagaccagatccaggtcaaccagatactgggcctgctggtcgtgctgggcgtcggcatggccgcgtcaggcctgctgatgctgtggagctgccgctcgcgccgcaagcggcagtggttgcgacggcacgcgcgtgccatgctgctgccgctgtggacctgctgtgggcggcaggcaggtggcaagacggcgcctgcaccagaagcgccagcccctgccggcagcgacacctgatcgatagtttaatattgcccagcgaatggcagctgccacggagaatagcttaagcatgccttgctgcagcgctgagcctggtttgtgttgtagttgcggacatttacaagcggtggcagctttgcaagtgtgaacctgacaagag

SEQ ID NO: 8251 - DNA, 577 bp, Chlorella sorokiniana
  unsure (1)..(577): unsure at all n locations; Clone ID: LIB3602-104-Q1-K1-F7
cccagnaggcaccaccatcatcttccccggcaccggcaccggcggctgggagtcggcgctcaccaacaccctgtcccccggcgacaaggtggtgaccttccgctacggcctgttcagccacctgtggatcgacatgatgcagcggctgggcctggatgtgactgtgattgagggccgctggggcgatggcgcatacgaggacaagctggctgaggtgctcaaggcggacaccgagaagaagatcaaggcggtgtgcgtggtgcacaacgagaccaccacgggtgtgaccagcgacatccctgaggtgcgccgcaccatggatgcccacaaccaccccgcgctgctgctggtggatggcgtcagttccatcggcgcgctggacttccagtttgacaagtggcgggtggacgtggcggtgacgggcagccagaaggcgctgtccatccccaccggcctcggcatggtctgcgcctcggacaaggcgctggcggccatgaagacggccaccagccggcgcgtgtactacgactttgccgacatgctgcgcaccaaccccaccggcaacgtgccgtacact

SEQ ID NO: 8252 - DNA, 229 bp, Chlorella sorokiniana
  unsure (1)..(229): unsure at all n locations; Clone ID: LIB3602-104-Q1-K1-F8
ggcggctggggatcccancgctagcagcttgcagggttgcctctggcgagtgcacatagacttactgggaacgagcaaagcagtcgggacctcgccgctgttgagccgagtgggtgggtgcacagcatgctagcagctgcggcagtgacatgcctcccattcattcaagtgtagccatttcttgctgtcaccagtttgccaggagcgtgtaaatgtgaccattgccaac

SEQ ID NO: 8253 - DNA, 241 bp, Chlorella sorokiniana
  unsure (1)..(241): unsure at all n locations; Clone ID: LIB3602-104-Q1-K1-F9
cagcccccgccgctcccccgncagcaaacgcacgcagcatgcgcacgtcggcgccccaccccatgccggggccgcgtctcatactagcccttctgttccttccccccaggcattttattgccacctccccttgctccccgctttgtattgtttcgttttgtgttttgtcgttgcgccacaacgccaccacctgatcgcacacacttgagatgcagcactgcctgtaagtgatgaagagggt

SEQ ID NO: 8254 - DNA, 527 bp, Chlorella sorokiniana
  unsure (1)..(527): unsure at all n locations; Clone ID: LIB3602-104-Q1-K1-G1
gtgcgcaggccattggccccattgccacccccgnagtcatccactgggcgcctggcctccccaagacccgctccggcaagatcatgcgccgcgtgctgcgcaagattgccagcaaggaggaggaccagctgggcgacacgtccaccctggccgaccccggcgtggtgcaggtgctgctggagctgcgcggcaagtaaactgcgatagtatgcacttacgcgagtgacaccggcagcccggctgcccgcccgcccaacagcgatacacagagccggccccccacgaacgggcggcggttgaacgagccacccctaacctcatgcaccctgaacccaatgcctttgcctgtttccgtttccctgccgctccgctctctgaccgctcagtctctccgggggctttgtcgcacgcactcgagttttccccagtggggggcgcggaccatgcgcccgcccctcgagccccattttgtccttcagccactgtagattccaggcccagagtacccccactgttgtaacaattgg

SEQ ID NO: 8255 - DNA, 230 bp, Chlorella sorokiniana
  unsure (1)..(230): unsure at all n locations; Clone ID: LIB3602-104-Q1-K1-G10
gcgggggcgggtggaggctgagaanacgccgtgcagnaagaggacgaggagctgcgcaggcgcgcgagtgggacgagttcaaggacgacaacccgcgcggctggggcaactcaaagctgcggccctgcgcttgaaccgcgcgccaaccaggcgtgcccgctgcctctcgaccccttgatgcttacagcaattgtgtatgcaacagtgtacagcttcgtgtaagcatggng

SEQ ID NO: 8256 - DNA, 568 bp, Chlorella sorokiniana
  Clone ID: LIB3602-104-Q1-K1-G11
cccagcggccctcatcgcgaaccattacgccgtgaaggcgcgcaggttggcgcgcgcgacatcttcacggtggagcaggggctgggcatcggcacgcgggcgcccctgttcaaccgcatggaagcgcagtccactcgcttcttcaagctcacgcccggcaagggcaagcgggagcccgtcaccctggtggcgcacggcaagtttggcaacaccatcggcgacctgcctgcttatgatgccttcctgctgggcggcccctactctgtgcgcggctacaacattggcgagctggcggcggcgcggcggtacgtggaggcggcggccgagctgcgcgtccccgtgctgggccagcagctgtttgcgttcgccgagtttggctccgacctgggcagctcagccgaggtgcggggcaacccaacggagtactaccgccgggcgggggccggcagcagcgtgggcgcaggcgttcgcatcggcgctgtgcgcgctgaggcgatccgggacaacaactcgggcaagaccaacgggtggctgtcctacggagagcgcgtttgagcggacgaacttg

SEQ ID NO: 8257 - DNA, 537 bp, Chlorella sorokiniana
  Clone ID: LIB3602-104-Q1-K1-G12
ctccgcagaaaaatgtggaaaaaaaaaaaggggggggggggggggggggaagaaaaaaaaaaaataaaaggaaacaaaaataaaaaaaagggggcatactaaaaaaaaagggggggtttggtataaaggtaaattaagatttcattgcctttctttcgacaaccttatttttatttaaatcccccctaatttcaggggggggggcctgggaaaacatcgccgttactggaaataccttggtggaaccaaatttcatttcgttgggctttatcaacttttacgcggcctgaatggtgcgtggtacgccccctctggtcgccctttataaccattgggccccctgtttgcccaatggatgacgccttcacttggcgcttttttcccgccgggtgctttgtttacttgccatgggcttgttcccctttccttcgcctttcccccctttcttttaggttgcgggcttccttttccccccccattttctggtttccgggccccctttctgaatcgggttttccctttagggggcccattaag

SEQ ID NO: 8258 - DNA, 351 bp, Chlorella sorokiniana
  unsure (1)..(351): unsure at all n locations; Clone ID: LIB3602-104-Q1-K1-G3
nccaacttctgggtggnctacgcccccaatccgccggcatcggctactaagctgtttccgtcgcttgactggcgccgcccgctcgcccgcccgctgagtttacggccactcgcggcaacaggcagcagcggcgtctgtactttctgactcctccggcgattgctggtggcgcaccttgcttgctttgatgcttgcttcgggggcttaggcaccctcccatgcaacacatgaacccccaccacccctgccaacccaagtcttagcctgtgtttgcgcgcggtgaaggcaatgagaagaacagacccttgtaccctgcctcgctgctgcgtttttgctgcaagacatgagcct

SEQ ID NO: 8259 - DNA, 350 bp, Chlorella sorokiniana
  unsure (1)..(350): unsure at all n locations; Clone ID: LIB3602-104-Q1-K1-G4
ncgtgctgtacctgnaaaaagtgctgctcagtttctgggtgcgcatgtcagcggacggacgcaggagtgcgaggttctgctgccggcggtggccacgctgctgcgtgcatcgccaggggaataccgcctgctgcgagaccacctgcaacgtggtggggccagctggctgcccgccctgccctcgttgatgggcggggcttcgtgacaacgagtgcgcaggcaggcaatgtgtggctgcactaggcaggcttctgagggcagcgtgacggcagttcacggcgccacagccggcagggttgtgccggcagagagccctgttctgatttttgcgacatgtaacagacagggtt

SEQ ID NO: 8260 - DNA, 444 bp, Chlorella sorokiniana
  Clone ID: LIB3602-104-Q1-K1-G5
gcggcggcaagcaggcggcggcggcggcggcaagggcaacagcgcgcccaagatcgcagcttcgctgtccaggtggactgatgacacgctgtccaacgatggctggctcatgatgtcctttgtcgtcgccttgtttgcagcccccggcgtggcgctgctcctgtggccctatgtggtggacacggctgtgagcattgctgacgtggccaaggcctgcaagcccagcaaggcgggcgcctgaaaccctccctgcatggcagcaactgcagctacaacggcggcagcgcctggcttgtaatgcaccaatgcaccacacctgctctacactgcgcgctggcagggtaaacccatcagtggctgtgccttcattactcgtttcacatttttcagtaccccttcgctacccgtcactcctttcatttataccgggtaaaacactgctgc

SEQ ID NO: 8261 - DNA, 530 bp, Chlorella sorokiniana
  unsure (1)..(530): unsure at all n locations; Clone ID: LIB3602-104-Q1-K1-G6
gcggtggctgtggcctcatgtgaacgcggcagggcgnagaccgcctcacggcgccccgctggagctggtgcagcccgagacgctgcgctggaaggcgtttgagccggtgctgctgctgggcaagcagcgcttctccaacgtggacatccgcatccgcgtcaagggcggcggccaggtgtcccagatctacgccatccgccaggccatctccaagggcattgtggccttctaccagaagtacgtggatgagcagagcaagaacgagatcaaggacatcctgctgacctacgaccgcacgctgctggtggccgaccctcgccgctgcgagcccaagaagttcggtggccacggtgcccgcgcgcggtttcagaaatcttacaggtgaaggctgccccgtgggacggttgggcgcctctggaggcttcttctgcgccgctggcgtggcggcagcggcgtctgcggcctaagcagctgccctggagcagcatgccctcagcgaaagcaccatgagtacaccttgcctgtgtaac

SEQ ID NO: 8262 - DNA, 574 bp, Chlorella sorokiniana
  unsure (1)..(574): unsure at all n locations; Clone ID: LIB3602-104-Q1-K1-G7
ccctggctggncagccgcccgccgccgtgctgggcggccccgccctgcaggggagggaggcggtgagcccagcaaggcccagattgctgccgagcggcgcgcccgcctgcaggccaccgctgcacagctgaccatgacgctggcaggtgtgatggacggagcggcaccgggcgccgacgctgcactgaaggcactgatgggcggcatgtgagcgacagcccggccctcgccttttgagacagaggccttggcgcccttgcgaatcccaagtgtacctacaccctacagcagcagtgcagcaccgccccaagctgctgaggcgactatgcggttgccagccacgaggccacaccgcccattccagtgtcgcaagtttgctgccgcggctctgctgtaccatgcccccttgatgccagctcagcagatgctggcctttgttttcataacccagccaactgcccgatgatactccacggcggcccttgccatctttcagccatgcaaaccggccgccttttcttctgcccgtgcgttgcttccgtgcatttgaatacttccctccaatcgccgcctt

SEQ ID NO: 8263 - DNA, 580 bp, Chlorella sorokiniana
  unsure (1)..(580): unsure at all n locations; Clone ID: LIB3602-104-Q1-K1-G8
gcgggctgcccagncggcagcagcgcccctgctccagnactgcgggttgtggagcctactggggccaaggtggcggcgctggtgcaggccatcacagcgcggctcagcaggctggctgacctggctgctgagctggacggcctgcgcctggccttccctgctcttacagacgtggcgtgcagcgctgacggctctgtggcgctctccttcatcaacctggatgccgaagtcaagtttggggccacgctgcgcctgccggccagctatccgctgggcgcggtgcaggcgaagccgcgcatctggtttgacggcgagggccaggtcagcgagcagcgcattgttgcagcggtggcagcggcgcccaaggcgcccaaccgcctgcgtgccatctgccggcagctgagcctgctggcacgcgaggcgctgccgcggccggctgtggcagctgaaggggacggcacattccatgcgggttggaccaaccccttgttcggctctgcgcccccggtgtctgcccagtcgtgaggaattgaaacctgtcgtctgtaatagttggacgttcattttttggtttgggggc

SEQ ID NO: 8264 - DNA, 589 bp, Chlorella sorokiniana
  Clone ID: LIB3602-104-Q1-K1-G9
tccggcgcacacgctgtacaaggcgtacctgggcgactttgcggcgtttgtgcaccgcgtgggcggcaccacgggggaggtcatgggcgagctgctgtcgttcgaggccgaccgccgcgcgctcaacatcacccttaacagcatcggcacggagctgacgcgggacgaccgccgcaagctgtacgccaactttggcctgctgtacccgcacggacaggccgagctggcagtggcggaggactttgaccagatacgggcggccatggagaagtgcccgccttaccaggccatcttctcgcggctggggctgggagagacgcagatgctggacaagattctgtacgaggaggaggtgcggcagctgatcaacacgtacgagcagcagttccactacggcgtcttctacgcctacatgcggctgcgggagcaggagatccgcaacatcatgtggattgcggagtgcgtggcgcaggatcagaagagccgtgtgcaggacggcattgtgtttaccttctagatagtcccgcacagtggctgccacattcacccagctgcgccgctcagatacaacagctgcagttttgcttgt

SEQ ID NO: 8265 - DNA, 564 bp, Chlorella sorokiniana
  unsure (1)..(564): unsure at all n locations; Clone ID: LIB3602-104-Q1-K1-H1
gccaagggcaggctngaaaaaacatgggccaggctctgcgcgagctgggctnacaagcgagagagtatgtgatttcaacaaaggtattctttggcactggcagcaccgctcccaacaccactggcctgtcccgcaagcacatcatcgagggcacccgggcctccctcaagcggctggggctggactatgtggacctgctgttctgccaccgtcccgaccccgagacgcccatcgaggagaccgtgcgcgccatgaactggtgtatcgaccagggctacgccttctactggggcacaagtgagtggagcgcggagcagattgaggaggcgtggcggatcgcagagcggctcgacctgattggccctgccatggagcagccgcagtacaacatcttccaccgcaagcgggtagaggaggaatatgcgccgctgtacgccaagcacgggctggggctgaccacttggagcccgcttgcctcgggcgtgctcacaggcaagtactcgggcggcctcatcccggagggcacccgcatgaccctagagcgatacaagttcctgcaggaaa

SEQ ID NO: 8266 - DNA, 574 bp, Chlorella sorokiniana
  unsure (1)..(574): unsure at all n locations; Clone ID: LIB3602-104-Q1-K1-H10
tccggcagcgacaacttcacccacattctgcgggggcgtggggcaccaacgtcgatggcaagcagaagacatgtatgcgctgaccgccatgaagggatcggccgccgcttctccaacatctgctgcaagaaggcggaggtggacctgagcaagcgcgccggcgagctgtctgccgagggagctgggagagcatcatgaccatcgtggccaacccccgcgcctacaagatccccgactgggtcctgaacaggcagaaggacgtcaaggacggccgctactcgcaggtgacctcctccgcgctggacaccaagctgcgcgatgacctggagcgcctgaagaagatccggaaccaccgcggtctgcgccactactggggcctcaccgtgcgcggccagcacaccaagaccactggccgccgcggcaagaccgtgggcgtggctggcaagaagaagtaagcagcttcttgcgggcgcggcctgcggcacgggcggatgctggcggctgggtgacggcggntggcgcctcccgcgcagcaaccccactggcagagcccgcggcagcagggggatccaca

SEQ ID NO: 8267 - DNA, 403 bp, Chlorella sorokiniana
  unsure (1)..(403): unsure at all n locations; Clone ID: LIB3602-104-Q1-K1-H11
ttgcggaacaaatcagnagccagcgcgcggtgggggggtgcgcttgtctgcgagcaggcttaacccagccagctctgcccagtttgggcctctatcgtaagggtgcactttgcagttttccccgaccaatcgggcacctgccagccatgccaatgcctcttacctccccaccccgagggcgggggggttggccatgtgcaatcacgctccagttttgcctgcttcggtacgttgtccaattatccttgctgtctgcttagcggcaccccatctccttgaccacccatttgatgacctatgccatgcctcaaaagcccatttagcgctagcgttttccccctctgcgtagcgaacgtgtttctgcgcctcgctttacacaagcctgtaagttggtggcaatgag

SEQ ID NO: 8268 - DNA, 306 bp, Chlorella sorokiniana
  unsure (1)..(306): unsure at all n locations; Clone ID: LIB3602-104-Q1-K1-H12
tcaccacaccgttgtcgttagtggacgcggcgccttagctggcccctacttctcccgctagacgccaccggatgtttccacacccacctacccctgcttcttaacccgcccagccacaccacgggggggggggcggggggcgccnccaatagacccccccacacannantatttctctgccgcgtcgaagtgagagagcacgttttcttgggacagaccacgccctgtctnnctgcatgccgcgcaggnctgcggcactgaacaacgtacactatgaaccctggctgccaacgcgccccgcgcctc

SEQ ID NO: 8269 - DNA, 59 bp, Chlorella sorokiniana
  Clone ID: LIB3602-104-Q1-K1-H2
aactacgcctagcacgcgagcggccggtctcatagtaccgaaccaacctacaccgtccc

SEQ ID NO: 8270 - DNA, 566 bp, Chlorella sorokiniana
  Clone ID: LIB3602-104-Q1-K1-H3
ctccgggaagcaaccacacatctggggactacgccgcttgtggagaggtcaatatcacgaccagtacaagcatcaatactttggatcagacaggggaaggggggaagcagcatgcctcgcatgcgcagcaggcgcacaggccatccgtacaatcctgggagagagagacactgctttgctgattgcttcaggagtggacgtttatcctaccatttctcatctaggggtgcactagcgtgggcacagccagcatgacgaggagcctgctgaagtggagcagcacggcagcggcgcagcgataacggtcgctggggttctgcccacctggctggctcaagtacctgctgactttccgttcaggcacttttgttgttccctgcccaccccctttatcttttgtgaagctaacccgctttagcgatcctttcagcccaccatttgattcgtttgcaataaccactgtggatggacttttgatctgcatgccttgacaccacaccctttcgtcatcccgcttttttctgtaccaccctttgcttttactgaactagtgatacatggggcgc

SEQ ID NO: 8271 - DNA, 561 bp, Chlorella sorokiniana
  unsure (1)..(561): unsure at all n locations; Clone ID: LIB3602-104-Q1-K1-H4
ggctgccanaaaagctggngnattgagatgacgccaagctgcgcgccttctacgacaagcgcgtgtcgcaggaggtggacggcgaggccctgggcgaggagttcaagggctacgtcttcaagatcatgggcggccaggacaagcagggcttccccatgaagcagggcgtgctgaccaacggccgcgtgcaggtgctgatgtcgcccggcgaccagtgcttccgcggctacggccgccgcaacggcgagcgccgccgcaagtcggtgcgcggctgcatcgtgtcccaggacctgtccgtgctcaacctggtgatcgtgaagaagggcgagcaggagctgccgggcctgaccgacgaggagaagccccgccagcgcggccccaagcgcgcgtccaagatccgcaagatgttcaacctgaccaaggatgacgacgtgcgccactacgtgaagatctacggcaagaaggtggagaagaacggcaagaccaccatcaagtgccccaagatccagcgcctggtgacgccccaggtgctgcagcgcaagcgccggcgggccgccatca

SEQ ID NO: 8272 - DNA, 565 bp, Chlorella sorokiniana
  Clone ID: LIB3602-104-Q1-K1-H5
gctggcaggggggaagcgaccagcagcaggccgtgcccttgttgcccgccgcagctgcgcaggcggcggcagaggaggcagaggttgcagctgctgctgctgccgcggccgcagcagcggccagggccccagtatcgtctggaacctggtggcagcgggctgtgagagggcacgacctgtcgccagcagcagagcaggcgtctttgcaagcggtgcccgtggctgtggccaccccaccagccctgcgcccggccgcaagcaggagcctcccggatctgtcgccgctcacggcagcccccttggtagaaggcccggccgtgcagcaggaggcagctgggcggcagcagctggggcaggagcagggggagcagctggaggggcagcagcagcaggcggggccggcatccaggcccggttcggctgccgccatgtccagcggcagctcagcaggcacagcgggcacagcagggcgctctcccagccgcagcaagcagccgcgctggcgcctgctgccccgcccgcccagccggcctagcgagtaagcgccctttgcgacttgtggttg

SEQ ID NO: 8273 - DNA, 549 bp, Chlorella sorokiniana
  unsure (1)..(549): unsure at all n locations; Clone ID: LIB3602-104-Q1-K1-H6
cgcgtggtgccctccgccacacaccctccggctttngagaagccaacttcctgacctgcacgctgtcgtgcgaccaccgcgtggtggacggcgcggtgggagcgcagtggctgcaggccttcaagtcgtacctagaggacccggccaccatgctgctctaagccaaccaccacgctggcatgctgcttggcagcctgccgtggcacatcggcctgccctggcctgcgctgcacagcaccgagtgaccagcatcggctggtcagcggcggccaagccagcacggctgcgccaccacgcaccgcctcagttgcccctctaccttgcacacgtttcagtcctgatccgttctgttacccgtctctgtgcacccccctgaacagcttgtgtgtggttgctccgctgtctcgcgcctttcggagctgcgctccgcctggccccacctgatggtgttccttgtcccgcatcattttctgcttctttcctgcgcactgcacggccacgcacctccgcctgccttactcacattttggtgtaagagcgcttaccana

SEQ ID NO: 8274 - DNA, 578 bp, Chlorella sorokiniana
  unsure (1)..(578): unsure at all n locations; Clone ID: LIB3602-104-Q1-K1-H7
gnaaaatgtgggcaagggcggccagcggtggtacaagaacatcggcctgggcttccgcacccccaaggaggccattgagggcaactacattgaccacaagtgccccttcaccggcaatgtcagcatccgcggccgcatcctgtcgggcaaggtgaagagcaccaagatgaaccgcacgattgtggtgcgccgcgactacctgcactacatcaagaagtaccagcggtacgagaagcgccacaccaacatctcggcgcacatctcgccctgcttccgctgccacgagggcgacaccgtggtcatcggccagtgccggcccctgtccaagacggtgcgcttcaacgtgctgcgcgtcatccccgcgggctctggcgccaagaagggcttcggctccttctaagcaggctggactaagggcctcttgccttgctggctgaagccctcgacagcagcagcagcagccccagcacggcatgcaagcgctgcagacgccctgctgccctgagtaagcgccgccatgtgccggcggtggcagcagcaccgcccgccttgcatacacctgggccccttagatgccg

SEQ ID NO: 8275 - DNA, 502 bp, Chlorella sorokiniana
  Clone ID: LIB3602-104-Q1-K1-H8
tccgcgcagtcgcgggtagtgaccgccatgacgctgctggagaaccacctgttcaggtaccagggccacgtcagcgctgcgctggtgctgggcggcgtggacttccgcggcccccacctcttcacggggtacccgcacgggtccaccgactcgctgccctactgcaccatgggctctggctcgctcaacgccatggcggtgttcgaggcggggtacaaggacgacctaaccaaggaggaggcgatggagctggtggcccgcgctatcaggtcgggcgtgttcaacgacctgggttcgggcagcaacgtggacctgtgcgtgatcaccaaggagggcgtggagtacaagcgcaactactagctgctgcagggcaagacgtaccagcggcagttcccgcagcggtttgcggcggggtcagtgccggtggtgcgggagcgcgtgtactacattcggcgggtggtcactgtcaccgagggcgagcccatggagatggagagctagc

SEQ ID NO: 8276 - DNA, 602 bp, Chlorella sorokiniana
  Clone ID: LIB3602-104-Q1-K1-H9
tccgctcagctccacttcaaaaaaaaaaaaaaaagagaaagaggaaaaaaaaaaaaaaaaaaaaaaaaaaaaaaaaaaaaaaaaaaaagaaaaaaaaaaaaaaaaaaaaaaaaaaataaaaaaaaaaaaaagggggggcccttttaaagggtccaggtttactttacccttacttccaaaggtcttaacttttttctatgggggcacctaaaaaaaaatttcgtggcccccatttttaaacccttgggaattgggaaaacccttggggttccccaatttattgcgctttaggcccatatccccttttcctcagttggggtaaaaccgaaaaaggccccaaccggtacccccttctaaaccgttccttaacctgaatgggaaatgggacttccccttaaccggccctttaagctcggcgggggtgtgggtccccctcattgggccctctacctttgctagccccctagggcccgctcttttcccttttttcctttactttgtggcccccttttcgggtttccccctaaaagttttaaggggggggttcccttaaggtttcctatttaaggttttccgggccctggcccccaaaaattttggtt

SEQ ID NO: 8277 - DNA, 446 bp, Chlorella sorokiniana
  unsure (1)..(446): unsure at all n locations; Clone ID: LIB3602-105-Q1-K1-A1
ggngcgagaccccgagactcaggccaanacaacgcgctgcagcaggcggtgatgaagattggcagctcgctcagcggccagggcggctcgggcggcgagggncggcgagaatgtgcaggatgccgaggtcaaggacaagaaggagtagaggagcaatatgaaggacagccttgtggaggaggagagcagcatggaagatggagcgatgctgcagaccggagctgagaggagcagcttcaccccacccagcggccgcagcagctggcccggcggccgggcggctggcactcgtaacctgccctccctcccacctctgccctctgtccgtgccctccctctcccatcccttcccctcccaaccctgcctcgctcccctgcccctatgggcgcgccgccgctgcatgcactgacgggcgggattacacgcccccggtgttgcctggcga

SEQ ID NO: 8278 - DNA, 540 bp, Chlorella sorokiniana
  unsure (1)..(540): unsure at all n locations; Clone ID: LIB3602-105-Q1-K1-A11
ctggctgttcctgtccctggccatcctcttctggctgctggctggcggcgtgggctaccccgnccagacctcccgcgtggttgccggcggctggggcttcatggtggctgctgtggccttctacgacggcaccgccgccctgatgaaggatgtgtacggcaagcagatcctgcccgtgtgccccctgaagcccgtcaacaaggtcagcctgggtgacttcggcaccaagcgctttgtggacgccgagaagcaggccgcgtaaatgcgcgctgctgcgccatgcgtgcccttgctgcttgcggcgctcggccctcgggcctgcgctgctgaaacccaaccccctctgcctctttacttgcaaacccacgacccgcttccctgaatttggtgccctcacttcttgcttgcgtcggatacatacccagtccgcccaaattttcacggtgcgccgcccatgttgcccacacgccctccggactttcgttgcctgcccgctgccctggccgtgacattttccccttgttaagcccagcagcggac

SEQ ID NO: 8279 - DNA, 69 bp, Chlorella sorokiniana
  Clone ID: LIB3602-105-Q1-K1-A12
cccgggtgcgcacccacgccatccgcaaaaaaaaaaaaaaaaaaaaaaaaaaagggggggggggggggg

SEQ ID NO: 8280 - DNA, 548 bp, Chlorella sorokiniana
  unsure (1)..(548): unsure at all n locations; Clone ID: LIB3602-105-Q1-K1-A2
gccctgggcgtggttgccgtcggcacgcttgcactggccgccgccgccacgtacaagtacgcctacaagcatgagccgctcccaaagtgaacctgcggatgcccgactttgcggccctgcgcggcaagctgcccgccgtcaagatgccggcattcaagctgcccgcggcgctgcagcgcaagcccgccgcccaggcgtgagcgcctggagagcaggagccttgtgggccgggactgccggccacgattgctgtgcgcagcgcagtccctgcccctgcggcaccccttatccgcccaggcagccctgcggagggatgacacatgcattccaggcatcttccacttgactgtcaaaggcaagctttcggtgacgctgacgcaccaccctctgtgtgctgctgctctgcgcgggcgcgcccccgcccgcgtccggcttttccctgtaacttattcgtttgtgcagcgcgcattcgtgcctgccccgctaactgcccccgcggcctccccttgcttttnacaacctgccaaccaatacatcgctcttgcacg

SEQ ID NO: 8281 - DNA, 582 bp, Chlorella sorokiniana
  unsure (1)..(582): unsure at all n locations; Clone ID: LIB3602-105-Q1-K1-A3
cggcggcagcggtcngaaatgcagggatgatgacttgccggccgtgaacccaagttccggtctgcaaccgagatggtgtggcccgccaccaagcacaagacgcttcgcatcgggtgcaaaagcgctggaaacagcgctgctgcacaacgtgcagctgcgggaggcgctggtcacgcagctgggctttgctgttaaggaggtgcgcatgtctcccgaccacctcaaggccttcatccagtgggactcgattctggggcagggcgcagcggcgccgctggagcgcgagctcgcacgcatggcgcccaagctgcgcacagaggtggccagagtgctgcgggcgcgcaacgccccgcacctcgtgtttaggcgggacgcccccactgccaagcagcaagagctggaggacatctttgctcagctggatgctgaggcggcagcggacgcagcggcggcagaggcaggcgcagcggcggcagaagcgagcgttgcggcggcgccagcggcgggcagctccggcgaggggcggcaggaatgagagcacattgctcttgtttacaggcttgcatgctgtgcataatcatt

SEQ ID NO: 8282 - DNA, 570 bp, Chlorella sorokiniana
  unsure (1)..(570): unsure at all n locations; Clone ID: LIB3602-105-Q1-K1-A4
gctcnctacgnaccctggcacacaaccccgnagtgcagtgagcgactggcttcctgcttccctcgggcagttcgagcgcatctgcgtgttggccgccgtagcgccggcgccggcgccaccgcacggtagtggtccctgatgccttgctgacgaaacgattcaccaaccatccgcagcctgagcaagatccacaagcacgacgagctgagcgagagcgcggagcacatggagcgcgccngaaaagtactggcacagcatcttccgcaaggcgtggcttagccgcgtgcacgacggggacgtggtggacgcccgcatgatgcgcgtctaggcagtcgagacgcgtctaggcctggaggcagccccccgcctctgtgccacaccatgccaatgttaattgaaccccgccaacatacagcaacttcgagcgagccactcacaacaagacggcagcagctggagcgcgccctgttaggaagccgccgtgcccagctgcatccaactactggcgagatgatgccacaaacgcatcagccgtgtgcttcatgtgaagtgctcccttaatgaatgaca

SEQ ID NO: 8283 - DNA, 573 bp, Chlorella sorokiniana
  unsure (1)..(573): unsure at all n locations; Clone ID: LIB3602-105-Q1-K1-A5
ctcggcgcagggaatcctggnccacaacagtgcgctcagggccgtgcccagggcccctgcgagcgccgccccgaacaaccctcgccccgacacgcctgtgctcgctgcaggcggctcatcaaggagctgaaggtcaaccacgaggcgcagacctcggaggcgctggcccgcaactgcctgctcatccgcgagctcaacaccaacatcggggcggtgatgcgggcctacaagagcatcggcgacagcttcgaggcgtacatggacacacagcagcagctgcaacagcagcagcagcagccgcagccggatgggggcggccaggaggtggcacctcagcagcagggggcgccggggcaggctgcccagccgcccgcccggcagccacaagcgcagcagcagcaacagcagccgcttggcaacagcggcagcggccaggatgagctgcaggagcaggagctggccagcagccagcagggggcggtggagatgatgggggatgaggacgggcaggaggagacggcggaggacgcggccgtgccgcaggcgcctcccgcttagacacttagcacctgc

SEQ ID NO: 8284 - DNA, 507 bp, Chlorella sorokiniana
  unsure (1)..(507): unsure at all n locations; Clone ID: LIB3602-105-Q1-K1-A6
cagcagcgcacttgcacccgcncccacgctgtgcttngaacgagcattttgatgggccccgcggcatcaccagcagctgttttttgtgtacttgctctttcccctccctccactcaaccccgccaccccacatctcatcgccacgacacaaacagccccctcccccatgtttgaatccacccccagaactgttttgtttccccgccgcgccagccgcgccggcgcccctctgcaactggcgccggccggctctgtgccaccttgttaccgtcccacctcgatcgtttccaaacctatcggcgtgcaggctgtgctcacccgctgttcatgcgcctgccacccagtttgattcctatcgttatgttctcctccgcagcccaaccgcacattgggacgcccgaatggcctcccacctttgccatttttccgtagcagcagccggttttgtgagcgtgagcaagtctgtgcatgtgcattcctccctttgtaaacctgtcgcagctggca

SEQ ID NO: 8285 - DNA, 567 bp, Chlorella sorokiniana
  unsure (1)..(567): unsure at all n locations; Clone ID: LIB3602-105-Q1-K1-A7
gtggccacccagnacgggccctgcagcgcgcgtgcatggctgttccgggcggcgcggtgctgtttgccagcgtcaacggcgtgcacctggggacgcccagcgagctgcagaagcaggcggccaagcaggaggagaagcggcacatggcccccagcgaaacagagctgaagagcggcgcgctggccgaggtggcggcggcgcagcaggagcagcgcgcgcggccgcagctgcgccgcaagaaagcaaaggggcccaacccgctgtcggttcagaagccgaaaaagctaagaaggcggcagcggggactggcggtgccagcggcggcggcggcggtggcggtgagcccaagcagcagaagcagcagcaggcagcggcagctggtggagagggcggcgagcagcctgctcagaagaagaagcggcagcggcggcgcggcaagggcgctgcggcgggcggcgctggtggcggcgctggtagcggcagcgattgagttgcagcgtggtggtcagcctgctgcgtccattgcgccaactgttctggcttgaaattcacaggtgtttgctctgt

SEQ ID NO: 8286 - DNA, 579 bp, Chlorella sorokiniana
  unsure (1)..(579): unsure at all n locations; Clone ID: LIB3602-105-Q1-K1-A8
tccgccgcaccctggggccgcatggncttcttctcgcgcctgggcaagctggtgggcgtgcccgtcatcaacaccaatctggtttgaccgcaagctgtccacggtggaccacctgctcttctcccgctccccgctcctctccgtctacgccgacatgagcgtgacgtgcaaggagtactacgaccccaacaagtccatgctggagctggtgtttgcgcccgccgagaagtggattgggcggtcagacgaggacatcatcgcggccaccatgggggagctggagcggctgttcccgggcgagattgccgccgacggcagcaaggcgcgcatcctcaagtacaaggtggtcaagacgccgctcagcgtgtacaagacggtgcccgagtgcgagccctgcaggcccacgcagcgcacgcccatccgcaacttctacctggcgggagactacaccaagcagcgctacctggccagcatggagggcgccaccttcagcggcaagctctgtgcgcaggccatcgcggaggactggaacaccagcagcgtcaagcccagccaggcagcagccaaggagccggctct

SEQ ID NO: 8287 - DNA, 569 bp, Chlorella sorokiniana
  unsure (1)..(569): unsure at all n locations; Clone ID: LIB3602-105-Q1-K1-A9
gnagccgggcagcatggnaccaggnacccatcttcagcaacttcaagctgcccgcccatgagcccggctaccccggcggcatctttgcgccctttgtgcccggcagcctggaggagctgaaggtcaaggagatcaagaacggccgcctggccatgcttgccttcatcggcttcaccatggctgcccaggtgacgggcaagaacccgctggcggcgctgcgcgagcacctggacaaccccctgggcaccaccatcttctccaaggccgtggtcgtgcccggccaggcggtcgtgcccccctgcgccatccccgacaccatcgagttcaacggcatcactatcccggctggctgcttcctgcactccctctggccttgagcatcacataaggccagagctgtaactcttggtggcggcgtggcgccggccagctgagcggcactcactagcgtcggcggctggggctgcgccacgcggccattttactccccaccgagatgagaacttatccctttccttgctgctctctactgtaatgcttcgcccgtcaaaaaaaaaaaaaaaaaanaa

SEQ ID NO: 8288 - DNA, 575 bp, Chlorella sorokiniana
  unsure (1)..(575): unsure at all n locations; Clone ID: LIB3602-105-Q1-K1-B10
cggtggcgtgcctgcggcagagnaggtgggcgacaccgccaagcagctcaacaacctgctgtcctgcgagacggcggtgcccagcggcaaggcgcaggagtggaaggagaaggatgagatcgccgacctgttctccgcctacgtctccaaggaggctgcgcgggagaagcaggacgcggtgcagcgcatcctgggcctggccgacgccgaggcggagggcctgcgccgcatcgtgcaggagggcggctggaagctggcggcggaggagcagcaggagactgccttcttctgaggcggccaactacctgcttaatatgaggcagcctccagctacctgtgaggcagccgctgcccgcctttgccaagtgcactgactgcttggacagcaaccagagcagctgccggggtgccctgcccagcccctacagggtggtgcaaagccagcactcagagcgccgcattcggcgccactcgccgccccagcggcttgcttgcctttcataccggggccggcccgcgccattgcgcgccgccgccccgctgcccctgcccgattttattgcctccttttcgcc

SEQ ID NO: 8289 - DNA, 458 bp, Chlorella sorokiniana
  Clone ID: LIB3602-105-Q1-K1-B11
gacaaaaaaaaaaaactaacaaaactggtggaattgggggacagtgcaaaaacaaagcaaaaaaaaaagaaaaaaactaaaacacatcaacagaaacaaaaacggggcaggacagagggcgcaggcggcggtgactgatggcccgaggcagtacagcgcccattgcaaaggcccagcgacttatacagggcgagctgtgagactggctgcggctcccgcctgacagctgccggctggggcagaatgacgatctgcgggcctggatcattgagctgcacgggccggttagcccctggcgccctgatctggacctaggcgacaccttgcaccttctgatcgtgtgcctcggagcggggggccgcttgggaccggcccaggtcacctttgctttaccctcgccggtgtacttgcacatctactacagcggccttatctgtctggacatcctatacgacggg

SEQ ID NO: 8290 - DNA, 549 bp, Chlorella sorokiniana
  Clone ID: LIB3602-105-Q1-K1-B12
ggcggctacaagtaccaccagtgccaggggggggggcggcatgtgcccaccgtggaagagccggagcccaccatctaccgcatgaagctgtgggccaccgacgccgtgcgcgccaagtccaagttctggtacttcctgcgcaagctgcgcaaggggaagaaggccaacggccagatcctggggatcaacgagatctttgagcgcaaccccaccaccgtgaagaactacggcatctgggtgcgctaccagtctcgtaccggctaccacaacgcctacaaggagtaccgcaacaccaccctgaacggcgctgtggagcagatgtaccaggagatgggcagccgccaccgcgtgcgctccccctgcatccagatcatcaagaccgccacgctcacggggtcccagtgcaagcgcgcggccacgcagcagctgcacgacagcaagatcagcttcccgctggcgcgcaaggtgctgcgcccctcgtcccgcaagttccgcaccaccttcaaggcggggcgccccaacgtgggcatctactgagcgcctcgcccc

SEQ ID NO: 8291 - DNA, 83 bp, Chlorella sorokiniana
  Clone ID: LIB3602-105-Q1-K1-B2
gaaaaaaaaaaaaaaaaaaaaaaaaaaaaaaaaaaaaaaaaaaaggaaggacaaataaaaaagaaaaaaaaataaaaaacaag

SEQ ID NO: 8292 - DNA, 286 bp, Chlorella sorokiniana
  Clone ID: LIB3602-105-Q1-K1-B3
ccctgcgccatccgccgaaccatgccacttcaagaggatcactattccggctggttgctccctgcactacctgtggccttcgacatcagataaggccagagctgtaactcttggtggaggagtggcgcgcggtcagctgagcggcactcactagccggggtggcctgggagctgcgctcatcggccattgtatgcacacccagaaagaactaatgcctttccttgctgctctgtactgaaatgcttaacccgccaaagctgaaccagggcgccagcaaagaccaac

SEQ ID NO: 8293 - DNA, 570 bp, Chlorella sorokiniana
  unsure (1)..(570): unsure at all n locations; Clone ID: LIB3602-105-Q1-K1-B4
cctgcgcctgtgggncatcaccaccggcgccaccacccgccgcttcctgggccactccaggtcgtgctgtcggtcgccttttccgccgacaaccgccagattgtgtccggctcccgcgacaagaccatcaagctgtggaacaccctgggcgagtgcaagtacaccattggcgagcccgacggccacaccgagtgggtctcctgcgtgcgcttctcccccgtgacccagaaccccatcatcgtgtccgcgggctgggacaaggcggtcaaggtgtggagcctgaccaactgcaagctgcgcaacaacttggtgggccaccagggctacgtcaacaccgtgaccgtctcccccgacggctccctgtgcgcctccggcggcaaggacggcgtggccatgctgtgggacctgtccgagggcaagcgcctctactccctggacgccggcgacatcatccactccctctgcttctcgcccaaccgctactggctgtgcgccgccacccagtcctccatcaagatctgggacctggagtccaagtctctggtggacgagctgcgccccgagctgccc

SEQ ID NO: 8294 - DNA, 573 bp, Chlorella sorokiniana
  unsure (1)..(573): unsure at all n locations; Clone ID: LIB3602-105-Q1-K1-B5
gcagctggcacctgtcacagtcgtaagggcacagtcgagtcaccatgactcgcgtgtcggttcttgctgatgcccntgaaactatgtacaatgccgagaagcgcggcaagaagcaggtgctgctgcgcccctcctccaagtgctgatcaagttcctctcgctcatgatgaagcacggctacatcggcgagtttgagtttgtggacaaccaccgctcgggcaagattgtggtggagctgaacggccgcctgaacaagtgcggcgcgatctcgccccgctacgacattgcggccaaggacattgaggcgtgggtgggccgcctgctgccctcccgccagttcggccacatcatcctgaccacctcccagggcatcatggaccacgaggaggccaggcggaagaaggtgggaggcaaggtcctcggcttcttctactgagcggccttgttggatgcgccgcagcagccacggtggaccacagccgtggcggatgcagcacggccggcgcgcccggccgcggtgtttgctgcagcaccggcggcagccctgggtgctgcccccctcttagattgctg

SEQ ID NO: 8295 - DNA, 263 bp, Chlorella sorokiniana
  Clone ID: LIB3602-105-Q1-K1-B6
gagagattgaactgccgttctgagacgaatccaatcgattggtgggaagacggcgggcagccccaaaccgagtgtgcccgcctacctggcacacatccgcagggccggctagcatttgcggagctgcgccgatgtgtcgtgcccgactatgtgtggcatgcatctgcaagctgcccatgcatgactggcgactatgcaccttctgacgcggcacgtgcaagcatctgtaagcaaagtgttttaaaaaaaagaaaaagaaattg

SEQ ID NO: 8296 - DNA, 535 bp, Chlorella sorokiniana
  unsure (1)..(535): unsure at all n locations; Clone ID: LIB3602-105-Q1-K1-B7
ccctccctgnaccacgcccagtccatcgtggctgtgctgctgacccagctggtgatcatgggcgccgccgaggcgtaccgctacagcggcgagggccccgtggagaccagcggcgactccctgtaccccggcggcttcttcgaccccctgggtctggctgacgaccccgacaccctggctgagctgaaggtgaaggagatcaagaacggccgcctcgccatgttctccatgttcggcttcttcgtgcagggcctggtgaccggcaagtcccccctggaaaacctggctgaccaccttgctgagccgtctgtgaacaacggcttcgcgtccgccaccaagttcctgcccctggcctgaacgccgtcgtcaacctggagcgacctgggcatcccatattaacggcggccagccggttttggacaagcacacacaacatatgagattcccaacctccctgcgcactgcttgtaacaatcctggctccctcttgtacccttgacccgcactcgggcgtggatatgtaacgttccgcggg

SEQ ID NO: 8297 - DNA, 426 bp, Chlorella sorokiniana
  unsure (1)..(426): unsure at all n locations; Clone ID: LIB3602-105-Q1-K1-B8
gtngaaggcaaggtgtacgcgntaaatcacaaccgctgcaccgcacagcacggcacagcctggggcgcagctgccgcaccgcacagcccggcacagcctggggcataaggatgcctgcgcccggacgcagcagcctgctcaagtattggcagccctgtgcatgatgcagatgccaccaggcagtgccgcctgctccacccacaacgactgatctgttcacttccgcgtccgccccaccccaatttgttcgcactggctcagcatttcatccccttgctccgcccttccgcccccattttcccttcggctctcggcacccctgttatgcatcggattacaaaaaaaaaaaaaaaaaaaaaaaaaaaaaaaaaaaaaagaaaaaaaaaaaaaaaaaaaaaaaaaaaaaagggggcggcgggttttaaa

SEQ ID NO: 8298 - DNA, 587 bp, Chlorella sorokiniana
  unsure (1)..(587): unsure at all n locations; Clone ID: LIB3602-105-Q1-K1-B9
gcttgagcacagtgggcgctggnacacctgngtgacgaggcgtaccttcgtcgtgtcatcatgccacttgagacgctgctcaccaactacaagcgggttgtggtgaaggacagcgcggtgaatgcgctatgctacggtgccaagctgatgattccaggactgctacgctacgaaaaggcatcgagctggacgaggaagtggtgctgatgaccaccaagggagaggcgattgccgtgggtattgcgcagatgacaaccagcattatggctacttgcgatcatggttgtgttgcaaaggtcaagcgagtcatcatggagcgtgacacttacccgcgcaggtggggccttggccccatggctcagaagaaaaaacagctggtggctgctgggaaactggacaagtatggccgccccaccgaggccactcccaaggaatatttgcgggcgcttgggcaggatggaggcccacaaagcacagcagcaggagctgcggcggagggtggcacagtcgggcaacatacaacagacgcggcggcccatgaaggcaatgaggagacacaaaaagagaagaagaagaagaagaagcgg

SEQ ID NO: 8299 - DNA, 238 bp, Chlorella sorokiniana
  unsure (1)..(238): unsure at all n locations; Clone ID: LIB3602-105-Q1-K1-C1
nacagctgcccgttggcctccctgcacccggttttgctcccttcttgcttccacaacccgcttgcagcaacgttgctcgtgcactgctcccagcagccggtggtgctcaacgatggggtcacccggacacccgacctccgctgttgttgtttcattccagcattgcatgcccacgttgtgttgtttccagagccagtcagcctgtggaccaggcccagcctctgtaacccaagcaagc

SEQ ID NO: 8300 - DNA, 571 bp, Chlorella sorokiniana
  unsure (1)..(571): unsure at all n locations; Clone ID: LIB3602-105-Q1-K1-C10
ttcagnaccaactagcgaggcgcgggtgcccagcagcaagcgccggggcgcgggctcggcggcagcaggggacgcatcagagggcgcagcagccggcagcggcaagagcggcaagagcagcaagaaggagagcaagcggncgaaagaaggcggaggcggcaggggagggtgcgggggagccggcggcggcggcggacgcccagcagcagcagcagggggaggcgcaagcggagggccagccagccaagaagcagcggatagtgattgagccggcggtggcgcagagcgggccggtctatccattcgtgcccaccccagccaccggctggtggggcgagaagcggtttgtctctgtcggctgcctcgagggcctggacaagacggcggccgaggcggcgcggcggcgcatgacgttcaacgaagacgaccaggccgccatctacaaccgggcgcaggccaagaagacgcagggcaaagtggggctgggccagggcactggcactgtcaaggtcggcggcgtgaagtgggagggcaagaaggtgacttttgaggagccagagggcggcgctga

SEQ ID NO: 8301 - DNA, 367 bp, Chlorella sorokiniana
  Clone ID: LIB3602-105-Q1-K1-C11
ccggttctgtatcaacagccaaccttgtagttgacgcgcataatcgacgatttcactctttggggcccttccccgcgttgcgtgcttcgcttgcttgcctgctggtgtgtgtgctttgtgtgtctttggtcccgcctgcctcggtccctcaagcaggccgccgtgcgtgctgctcccttctcgactcgtctcatcgtacccacattctttttgcaacgattgacgcccgcgttttgcacaccgttaacaccactgtagcaaaaaaaaaaaaaaaaaaaaaaaaaaaaaaaaaaaaaaaaaaaaaaaaaaaaaaaaaaaaaaaaaaaaaaaaaaaaaaaaaaaaaaaggggggggccgttttaaaaga

SEQ ID NO: 8302 - DNA, 499 bp, Chlorella sorokiniana
  Clone ID: LIB3602-105-Q1-K1-C12
ctttggcctgcgctgtatacagtgaagaggcggagggcgacaagcgccaggaggggtgcacccgccgatacaccctcaacctgggcaagcgggtgcacggcatcaccttcaagaagcgggcgccccgcgccatcaaggagatccagaagtttgcggccaagcagatgggcaccaagggggggcgcgtggacgtcaagctgaacaaggcggtgtggagccagggcatcaagaacgtgcccaaccggctgcgcattgtggggcagcggaagcgcaacgaggacgacgaggactctgaggagatgttctccctggtgaccctggctgaggaccagaacaccaagaagggcgtggttgtgctggaggcgtaagcgcctgccgcacgccgcagcaccaaattgacgtcacctcccaccgcagcagccgcactctcccgacttccctgcacgcgttgcagcagcatgtaacgcgcgcgctagcaaaaaaaaaaaaaaaaaacaaa

SEQ ID NO: 8303 - DNA, 329 bp, Chlorella sorokiniana
  unsure (1)..(329): unsure at all n locations; Clone ID: LIB3602-105-Q1-K1-C2
gcccgccgccaccaaccacactcccaccttcgccgggnggcgccacgaggctgcttgggagcccctgtggcagcacacacggtgcaggcctctaccaggagcgcttgctctagtcaagcaagtcaagctgttgccctgtgaagagaaaatggttgtaacagaccgccaaaaaaaaaaaaaaaaaaaaaaaaaaaaaaaaaaaaaaaaaaaaaaaaaaaaaaaaaaaaaaaaaaaaaaaaaaaaaaaaaaaaaaaaaaaaaaataaataaaaaaaaaataaataattatataaagtaaaattaaattaaataaattaggggttatgtttt

SEQ ID NO: 8304 - DNA, 632 bp, Chlorella sorokiniana
  unsure (1)..(632): unsure at all n locations; Clone ID: LIB3602-105-Q1-K1-C3
naaaaaaaaaaaaaaaaaaaaaaaaaaaaaaaaaaaaaaaaaaaaaaaataaaaaaaaaaaaaaaaataaaaaaaaaaaaaaataaaaatatataataaataatatatttaaaaaaaaaattaaattttaattaaattaaaaattattttaaaatgaatttaattttttttaaaatataaaattggggggacttgttttgggtggggaaaaaatttttttttgcgtcaattttgaatattttttttgttggttggggctgtatcaaaattaattttcagagtggccagtctttttaaacgattgggatctgataatttttttggttccttaattttttgttggttttggttgtttttttttttttttgttcttttgggttgctttgaggggtacgttctcttttttttttgttttcttttctttttttttttgtttttgtttgttttttttttcttttttttgtttttttttttcttgttttttttttttttgcttgtttttttttttttttttttgtttttttttttttttgtttttttttttttctttgttttttgttttttttttttttgtgtttttttttgtttttgtgtgtgtttttttgtttgttgggttttgttttttttttttt

SEQ ID NO: 8305 - DNA, 569 bp, Chlorella sorokiniana
  unsure (1)..(569): unsure at all n locations; Clone ID: LIB3602-105-Q1-K1-C4
cgnagacccgcggcccttctggggattcctgggnanactgtgcgaggggctgggatacggccgcccccgcatccggctgcccttctacctgatctacttcatcgccctgattgtccagtacctggtcgtccccctgctgcgcctgtttggcaaggagctgcagagtgacttcacgcccttccgcatcgcgctgtccgccgccaaccgcacttttgcttgcggcgctgcctaccgagactttggctacgtgccaaaggtgcccatggacgaagcgctgaagcgcacgctgcgccacttcagccacctgcacgccggcaagcagaaggagggctgaggccccggctcgctggctggctggctgctgcacagcggtggaccgaggcgccgtttctgaccacccgtgccctgcttgatggctgagccatgcggcagtgcacacactacatctagatacgccgcagcccctgccacagggtgcgcccttgcagctgactgcttnttttcctccttgcaaatcaaccgtcaatgcctcgctttgcttgcattctctacacatgtttagtttgctc

SEQ ID NO: 8306 - DNA, 102 bp, Chlorella sorokiniana
  unsure (1)..(102): unsure at all n locations; Clone ID: LIB3602-105-Q1-K1-C6
naaaaaaaaaaaaaaaaaaaaaaaaaaaaaaaaaaaaaaaaaaaaaaaaaaaaaaaaaaaaaaaaaaaaaaaaaaaaaaaaaaaggggcgggccgttttaaa

SEQ ID NO: 8307 - DNA, 576 bp, Chlorella sorokiniana
  unsure (1)..(576): unsure at all n locations; Clone ID: LIB3602-105-Q1-K1-C7
nttcccggccggcctgctcacccccgncaggcattggtggttgcgaatccaagctatgccgggctggagccccagctggagagcgggctgtaccgcaacttcacaaacggatccgtgatttggggattcgtggaggcgatgatggtggaaggtctggagcggcagctggctctgtgcgactccggcacagccccttcctggtgctccgacacccagctgctgtcccagctgcgcacggcgctcgaccacctgtggagcacgatcgtgaacaacgctgacgtggccttctccgaggtgtggagctggaagtttgaaaacggcggctaccgcaccgcctccctggcggagacctctgcaaccagcacagagagcaatgcagttcagctgtggagccatgccttcatcgctgttcccggtcccagcggcggtacactgctggagctttgatgtggccactggcggctggggatcccacacgctagcaagcttgcaaggattgcctctggcgagtgcacatagacttactgggaacgagcaaagcagtcgggacctcgccgttgttgagccgagtgggtg

SEQ ID NO: 8308 - DNA, 551 bp, Chlorella sorokiniana
  unsure (1)..(551): unsure at all n locations; Clone ID: LIB3602-105-Q1-K1-C8
ggcaactggncggtggcacgcgtngaccgcgaagnaacgcggcccagcgggcgcgtgtgggcctgggtgctgtgggaggctgacgtgcctgttccggaggagagccgaaagaaagccggaccactgcgcattgtgtgcaaggcgatggacgcggcaagcaacacgcagcccgagaatgttgcttcaacgtggaacttcaggggcctcaactgcaactcctggggcaacacaatcgtgcggctggagtgaggccgcttggctgcgggagcatgccgcggcggcgggaggtgggaggcacagtctcctgtctgactgtctcttcaaggcggcagacggcagagagcggcagctgccgcggcacccggtgtatagtgcagcttctatgcgaggcaagcagggcagcagccagcgggcagctcggccggggcggcgttctgcgcctcagctgtgtggcatgtataggcatggcgcggcagtgtgtgcgaggaaatcaaacctgcctgtgcaagctctgtaccactcctgttcatattgcgaagcaaccttgagtc

SEQ ID NO: 8309 - DNA, 557 bp, Chlorella sorokiniana
  unsure (1)..(557): unsure at all n locations; Clone ID: LIB3602-105-Q1-K1-C9
nggccaggcgggcacaccggatcctcgcacccactcgccgccaaagcagccgccgacaggcagccgttcctgccgcccagcccctttggaggcgacctgcggctgcggcatgtgcagtccatgccgccgcacccgcctgggccgcccgccgctggcccaccgccgcagccgtttgacgcgcctgctgagacgcgcagtgcgccgcatgagcgtgagctgcaggcggcgctgggcagcggcggcgcacacatgcctgctgagctggacccttactgctcccgattcatgtctgggctggtgggcgaccaggaagaggcggggtgaaagctggggcggtacgaccccgccttgtgttgccttgtgttccccctgttctccttgcactctgtcgcatcctttttacgcagccatgcactcaaccaaccgttttgaatgcaactctattcattctgttgctctcttcatcacaccctgtcctgctcaggctactgtttgactactgtaagtgtgcagtcccnaaaaaaaaaaaaaaaaaaaaaaaaanannanaaaaattg

SEQ ID NO: 8310 - DNA, 410 bp, Chlorella sorokiniana
  unsure (1)..(410): unsure at all n locations; Clone ID: LIB3602-105-Q1-K1-D1
gncggcgtgatgcgggnagctgacacgacgtgcccgncggcacggtgctgngagagttccgcaagggcttcatgtttggcgagaagctgctgcggcccgccatggtcaaggtgtcctactcggacgccccggcagccgccgccgacagctctgccgacgatgccgccgcctccggctccagcgactgagccgtgaactgacccccagcacctggcacccgcgctgctcactgtacagaacctcccctgcttttgctgccctctctcatgctgccgcctgctcttgttgtgtgatggaaagccttcctgccgccgcctctcttcccgcccgtccccttctcaacccaccccatacacctgccagtcagttgcatccgccttgcattggaggctattcgaagcatttgtttg

SEQ ID NO: 8311 - DNA, 557 bp, Chlorella sorokiniana
  unsure (1)..(557): unsure at all n locations; Clone ID: LIB3602-105-Q1-K1-D10
cggcggctggnaacccatccctgctgacccgccagcagcagtcacggcggctgtgtatgcggagttcatcaacagcggcctgatcggcaacaccacctggcgcggcgcccntgcaagggaacctcagtacgccgccaccggctgccagcagattgtggcgggcacaaactatctgctgcagctgaacatcacgtgcctgattcctcccgagaggatcaactatggcaccgtggcgctggctgtggaggtgttccagccgctgcccaacagcaacgatccagtggaggtgaccgacatggccatcgttgcggagaccatcaacggcgttgagattgacgacgacctcatggctctgtttggcggagattctgccgaggctgctccgggcccctcccctcccgtcgagctgggcgcgtctggctgggcctaagtggcacactcagtgtgtggcaggcggtcgacggccgctgacgaactagttggcatgctgcaagccgncggccgcccagaacacacgcggntggttatgttntngactgcgattnctgattcttcat

SEQ ID NO: 8312 - DNA, 577 bp, Chlorella sorokiniana
  unsure (1)..(577): unsure at all n locations; Clone ID: LIB3602-105-Q1-K1-D11
gcctcccaggcgtgtgcctgtcgtgggggggcgcgtgcccttctggggggggcccatctactgcctgccgccctgcacgggccggggcaccaacccgggggatatggacggggtgaccgcggtgcagcgcctgcaagccgactttgaccgcaagcgcgggctgggcgtgcccaccctgatcatgggtcacgagccatacctgcgggagcccggcaacgcaaccaatgtggggaccttcctgaagtgggccaacgagcagcccaacacctgggtcctcacctaccagcagctcatcgcctactactccgcgccgggcgggacctccatcttcgatgtgatggacgagttcccctgcgacgaggcgtanagcatggcccattcgcacctggcccagcctctgagcctctccgcaagctagggctgccacaggcagggcgctgcctatgcaacgccaaggccactggcgccacagttgctgccgttgctgtctgcttccatgccgctctccacgtcttgcagacgcactgtgctcccccattattgcgcagctctattactgcaaccctcatttctcttc

SEQ ID NO: 8313 - DNA, 611 bp, Chlorella sorokiniana
  unsure (1)..(611): unsure at all n locations; Clone ID: LIB3602-105-Q1-K1-D12
cccgggtgcgacccagcctcccgttctcacgncgacggctgcccttttttttttggggggtttttttttttttttttttttttttttttttttttttttttttttttttttttttttaccaggagggggtaacagagggttccggaaaacgtgaggagggtacaggggggggggggggcccacaagaggggcaaggggcgggggggggggcaatttcaacccacccaatacacaaacaaattgcaagcgtggggccccgtaaaccttggggggggggcctattggggaaacctttttaaagcaagggggactgtgaaaacctaaaacaaggggggtataccggatgcggcaaacacaaggggggttggaacaaatttgggtaactaataccggggcaagggaaggagcattttcaaacaaaagggggggggcccgaccacaaacaacaaattggagcaaaaagcaaaaatgcaaacttgggggaacgcaagccaaacccccttttttncaagtaaatgggcaaacgggggggggggcaaccaaaggccctcccttccaaggaaatgggcaaaagaaaaaccgggttatgggggccgaaaaagggggggggg

SEQ ID NO: 8314 - DNA, 539 bp, Chlorella sorokiniana
  unsure (1)..(539): unsure at all n locations; Clone ID: LIB3602-105-Q1-K1-D2
cggncgcgtggggccaggnagtgtgcacccgcgnagtcaccctcaacctgggcaagcggctgcacggcatcaccttcaagaagcgggcgccccgcgccatcaaggagatccagaagtttgcggccaagcagatgggcaccaaggtggtgcgcgtggacgtcaagctgaacaaggcggtgtggagccagggcatcaagaacgtgcccaaccggctgcgcattgtggtgcagcggaagcgcaacgaggacgacgaggactctgaggagatgttctccctggtgaccctggctgaggaccagaacaccaagaagggcgtggttgtgctggaggcgtaagcgcctgccgcacgccgcagcaccaaattgacgtcacctcccaccgcagcagccgcactctcccgacttccctgcacgcgttgcagcagcatgtaacgcgcgcgctagcaaaaaaaaaaaaaaaaaaaaaaaaaaagnaaaaaaaaaaaaaaaaaaaaaaaaaaaaaaaaaaananaaaaaaaaaaaaaaaaaaaanngggggg

SEQ ID NO: 8315 - DNA, 582 bp, Chlorella sorokiniana
  unsure (1)..(582): unsure at all n locations; Clone ID: LIB3602-105-Q1-K1-D3
ngacgtacgtagcagtacactgcgccactttatccaccccgcgccacccatccatgcatgccatgccacgcaaacaccacgctgtttcagccctactatcgccgtactctccgttggcacttacaactccccgccctctcgcccgcaccgccacctgtccctggccctctctcccccaacaaagtgcgctgatttttgcgtagactgaaatccccttgcagattcgatgccgcgcactccccaagtgccttgcgtgcagggccgccgcctgcgtacaactcttgtgtcgccccacacccaacaccaacaccaaccccacccaaacacgccacccgtccaaccccatcccgcctcacccacccaggcacccgcgcctcattcctactagttggcatgctgcaagcgtgcggcgtgctagcctgccccgttgctcccggccagccgcacagcccccctgcatgcaccaacgctcctgctcatcgttccgcgggcccttcgaaccagacggaccctgccctttcacacactgccacccataccccctcgagcgtccaaccattcctgcagttgcaccccgtctct

SEQ ID NO: 8316 - DNA, 558 bp, Chlorella sorokiniana
  unsure (1)..(558): unsure at all n locations; Clone ID: LIB3602-105-Q1-K1-D4
cggngccgctggcatcgnacgcacagnaccttcagaagggctctctggtgggcagcgacaacttcacgcacattctgcgtgtgctgaacaccaacgtcgatggcaagcagaagatcatgtatgcgctgaccgccatcaagggtatcggccgccgcttctccaacatctgctgcaagaaggctgaggtggacctgagcaagcgcgccggcgagctgtctgccgaggagctggagagcatcatgaccatcgtggccaacccccgcgcctacaagatccccgactggttcctgaacaggcagaaggacgtcaaggacggccgctactcgcaggtgacctcctccgcgctggacaccaagctgcgcgatgacctggagcgcctgaagaagatccggaaccaccgcggtctgcgccactactggggcctcaccgtgcgcggccagcacaccaagaccactggccgccgcggcaagaccgtgggcgtggctggcaagaagaagtaagcagcttcttgcgggcgcggcctgcggcacgggcggatgctggcggctgggtgacggc

SEQ ID NO: 8317 - DNA, 403 bp, Chlorella sorokiniana
  Clone ID: LIB3602-105-Q1-K1-D5
cttgcctgtgtgaagtaaatctcacctgggcaagtgcggcaagggcacgggcagctttggcctgcgccacaccaagacgcacacgctgtgccgccgctgcggccgccgctccttccacatccagaagagcacctgcggctcgtgcggctaccccgcggccaagatccggaagtacaactggagcgtgaaggccatcggccgcaagaccaccggcaccggccgcatgcgccacctgaagaacgtgcagcgccgcttccgcaacggcttccgcgagggctctgctgccaagaagatcgctgcctaaacagctggtgtctgcagctacgcggcagcacgttgagccagctgtgtagcaggatgtaacaccgcgacacacaaaaaataaaaaaaaaaaaaataacaa

SEQ ID NO: 8318 - DNA, 375 bp, Chlorella sorokiniana
  unsure (1)..(375): unsure at all n locations; Clone ID: LIB3602-105-Q1-K1-D6
cgtggnggcgcagcaggtggngtgcttccaggcgcacgcgagcgtggtgtgcagcatggccatgcaccccagggcgagtgcctgctgaccagctctgtggacggggccatcaaggtgtgggtgtgaaaccacgctggggcaggacgctcggcccagctctttgcggcggcccatgtgtgtgtgtgcgcacatcacttgccggctgccctcgtttttctacgagtcctcgcaagtgccctgtacaatgcgtctgctcctgctgtgaagttgccctgcattgatttgcttcgttatcgggccttcaaagtcagactgttgtttcccatcatcaccattcctgttctactataatccagcttgtcaatcatatcatgt

SEQ ID NO: 8319 - DNA, 457 bp, Chlorella sorokiniana
  unsure (1)..(457): unsure at all n locations; Clone ID: LIB3602-105-Q1-K1-D7
tgnaagtgtgaggacactagtcgcagcaaccacggcaggtcaagaagcatagcaacacactttcaaggcacaggcaggaatcactggcacacaacacggggactctcgctcgggggtaatgaaaatcgggagcacagaaccagtgcaaacacaacaccccggggattgcctggcacaactgctatgacactgtaccgctagctaacccaaccctgagcccacccccgactgctgcgccccttccaatcatgtgtgcgccctccacagccgtgcgtctctgccccttggtctgtccctgcttgcnctggttctgtgctcccgattttnattacccccgggcgggagtcccngtgtgtgtgtgccggtggttcctgcctgtgccttgagcgtgtgttgntatgctcttgacctgccgtggttgctgcgacttgtgtccttacactttctcggccgcgtg

SEQ ID NO: 8320 - DNA, 568 bp, Chlorella sorokiniana
  unsure (1)..(568): unsure at all n locations; Clone ID: LIB3602-105-Q1-K1-D8
gcgcgnacctgcatggnaccggcaccagctggnggagctggcgngacggcgcttcatggccgcgcagatggagcagcagcggcgcaaggggctgggcatcgcgcacccgccccccaacggcaatgctgaggagggagagcagaagctgtacagctttgcggagctgttcaacgccatcaaggtggaggacttctcctcctacatctccaagctgaccacgccgcgcgagctcatgctcttcatgacggagctgctggcccgcatcgaggcgcacccagacaaccagctgagcgcacaggacatggagattgcggtgtcgcgcgcactggagcaggcggtgtgagcacctggctgcagcagagccaaattgctgtggctctgtgggatttgtgttgagccaccagttcagcggccgcccgtacccgtgccccttgtcccacgcctcacctgtctttactttgcgaggtgcggggctgggcgaaccccagccttcaccttgcactcccattcagccgaccatcatttattgcgtcgcacctgttgctcgtccccttgctgcttttggcct

SEQ ID NO: 8321 - DNA, 379 bp, Chlorella sorokiniana
  unsure (1)..(379): unsure at all n locations; Clone ID: LIB3602-105-Q1-K1-D9
gcaagtgcgagtgaggcggcacccttgctgcctggncagcactcgtagcccagtcctccacttgcgcgccgccaagccccagcagcccctacaagccaccaactccgatcggcatggcatgcctgctagcgtttcatcccttctcaagttgcctccaacctgtgttgccgctcatttgtcctctctctgagtgaagggtataccactgttttccttcccccgtccaccctgcctgctcgtacctgcgtctgcaccaagagttgaacttacattctgaagagacctcgaagaaaaaaaaaaaaaaaaaaaaaaaaaaaaaaaaaaaaaaaaaaaaaaaaaaaaaaaaaaaaaaaaaaaaaaaggggcggcgcgttttaaa

SEQ ID NO: 8322 - DNA, 365 bp, Chlorella sorokiniana
  unsure (1)..(365): unsure at all n locations; Clone ID: LIB3602-105-Q1-K1-E1
gctgctgctgcgttcctttcctgctgncaggnagtacatgcagtggctggacgaggtgcagcgctttgtgcagtgatgccatgcagcctgatgataacgcaagacagcacgcatggccggaggctgcccgacattgagccaccagtttagttgcaaatgtcctgttcttacaaatattcctccagacagagagcccgccagcgcactcaagctgggaactaaactggtggctcgttggaccgttcatggcaatgcacggtcatgtagcaaccaccaaagcaaaaaaaaaaaaaaaaaaaaaaaaaaaaaaaaaaaaaaaaaaaaaaaaaaaaaaaaaaaaaaaaaaaggggcggnccgttttaaa

SEQ ID NO: 8323 - DNA, 299 bp, Chlorella sorokiniana
  unsure (1)..(299): unsure at all n locations; Clone ID: LIB3602-105-Q1-K1-E10
ggcatggcggcaggnacagctcaggcgccgccacgtgcgcagcaagctctcggctttgacgacctgctgggcggtgccatttcgcagccgcagtcatcgccagcccggccgcagggaggacccctgggaggcctggggctgggtggcgcagcgatgggcggtgccggcacgggcggccagaagctgccgactccgcccgccaagaaggatccgtttgcggacctgctgggctgagcaagacactggtgcctgcgcatgcatgcccctgtacctttggattggctgtaagcatggtgtgc

SEQ ID NO: 8324 - DNA, 583 bp, Chlorella sorokiniana
  unsure (1)..(583): unsure at all n locations; Clone ID: LIB3602-105-Q1-K1-E11
cggncgcgtgggcggccgcgtgggggccgtctgtgcccagtgcgtgacgtaccgctgccaccactcgtggcggggcgggtgtggaggcggcggcgcgcggatttgcagcagaggtgcccgctgatgtgctggcggagctgccggctgtgttggagcctccgcaggcaatggaggctgggctgggcctgcccacctctggccccacagcccaggagctggaggccgggcagcagctggacatgatcggcagccctgccaccaaccaagttggcacctcccccgccaaccacgagcaagtgctggccgcgctgctgcagcagcaggcagcggccacacccgagggcgggccgccatccaagccgccctccatggcagctttggcggctggcaggcggcggagccagggggacaggccgctcagggcagcaagccggcgcagcatgcgcagcaggcacagcaggcacagcaggcgcagcacgtgccgcaaggcaaggctggcgctgcggttgctttcgacaacgaggctgccaacctggcaggcggcgaggaatgaacgcttgcttcgtgtcaaatgaatgcagcg

SEQ ID NO: 8325 - DNA, 569 bp, Chlorella sorokiniana
  unsure (1)..(569): unsure at all n locations; Clone ID: LIB3602-105-Q1-K1-E12
tccgcctncttcggtgcctctgtgcccttcgcgctggggggctggctgccattgagttcgctgccatggccggcgctgagtccttccgcggcgctgctgagcccgagaagcgcgtctaccccggcggcgccttcgaccccatgggcatgtccaagggcaacctggatgagctgaagaccgggggagcaagaacggccgcctcgccatgctggcctgcctgggcttcgctgcccagcacgccgccaccggcgccagcccgctggaggccctggcctcccacctggccaaccccatggccgtgaactttgccaccaacggcgtgtccctgcccctggcgtaagcgcgcccctgtagcagcggctgtacccagcacccgcggcgcagcagcagacggggggcccatgtgtggcctgggtgtctctgcccgtgtgggctgtacgcttgttcctatttgctctcctgttgctcattgctcctgactgcacacccgggnaagattcaatcaacccctcctgctaccatgtggctgtaaggcacagctaaccnaaaaaaaaaaagggagggaaggg

SEQ ID NO: 8326 - DNA, 574 bp, Chlorella sorokiniana
  unsure (1)..(574): unsure at all n locations; Clone ID: LIB3602-105-Q1-K1-E2
ggccagggncgctccctcaaagcctgcttcaatggncgggtgacctgcggccggcacgcatcggtcccatgcggccgattcccgagcacatccccaagccagactactacctgactggctaccccgcctcggagatggagagccggcagcagcacgcagtcaagatccgcacagagaaggatgtcgccggcattcgggaggcatgccgcatcgggcgcgaggtgctggacctggcggcagcggccatccggccgggcatcacgactgatgagattgaccgcattgtgcatgaggccaccattgcggcgggcgcctacccctcgccctacaactacttcaacttccccaagtcggtgtgcacctccatcaacgagatcatctgccacggcatccccgaccgccgcaaactgcaggagggcgacattgtgaacgtggacgtgagcgtttactacaagggctaccacggcgacctgaacgagacgtttgttgtgggggaggtggacgaggcctccaagcagctggtcaaggtcacgtacgagtgcctgcacaaggcgattgcgatttgcaagccggg

SEQ ID NO: 8327 - DNA, 498 bp, Chlorella sorokiniana
  unsure (1)..(498): unsure at all n locations; Clone ID: LIB3602-105-Q1-K1-E3
gcagcaaccccaaggagcccagcgcagcgcagncccgcccatcctcgccccaggcttccgcactggcatggcgggccaggcaccgcagcgcaaaatcgccttccgcagcagcatgattgagccggagctgcccttctcgtttaggagcagcatgacggacccaccgctgtgctcctaaacaggtggcggatgcatgtgcgcacatgctcagcacactgctgcacgggctaaaattccaaacaccatgttgcggttggctgaccaccgccaccgatgttgtataagattaggtaactgtcgagcaaagaccgattgctgtgctctagcgcatcagcagcgtgctctcccctgcaattttgagcccttgtacactgccgcctttgtaccactcatgcacatctgatttgtgatccatcgcctccccatcccatgccctcatgtctaaatccaaccgtgctattttgttcaccctgttgccttgtaaactagccagcggag

SEQ ID NO: 8328 - DNA, 574 bp, Chlorella sorokiniana
  unsure (1)..(574): unsure at all n locations; Clone ID: LIB3602-105-Q1-K1-E4
ctctgcggcggcaggcctggnatgagacgtgttcctgcaccccaactccaccctgcactccaccgcccccgagtttgtggtgtacgccgagctgatccgcaccgccaagcggccatacatggcgggtgtgacggccattgagccgcagtggctgcccgatgtggcgcccccgctgtgcaccttctcgcagccgctggccgagcctgcgcccttctacaagcccgcggcagacaaggtgctctgctggcgcgacgtcacctttgggcggcacgactgggcgctgccgcgctgcacagcgtcgcacccagatgccacagagcgctgcgccgtgttcgccgctgcgctgctggagggccgcgtgctgcccagctttgtaggcctgcgtgccgggctggcggtgccgccgtccatgctgctgcggccagagatgcgggtgcacaagcgggcctccgacctgctggctgcgctgaccgccgcccgcgtcgacagccgctccgcactcgcggccaagtgggcgcagtcgcccggcttcctgcgccacgagctcagccagtgcatgcagaagggctgcgcc

SEQ ID NO: 8329 - DNA, 596 bp, Chlorella sorokiniana
  unsure (1)..(596): unsure at all n locations; Clone ID: LIB3602-105-Q1-K1-E5
naaaaaaaaaaaaaaaaaaaaaaaaaaaaaaaaaaaaaaaaaaaaaaaaaaaaaaaaaaaaaaaaaaaaaaaaaaaaaaaaaaaaaaaaaaaaaaaaaaaaaaaaaaaaaaaaaaaaaaaaaaaaaaaaaaaaaaaaaaaaaaaaaaaaaaaaccccaaaaaaaaaaaaaaaaaaaagagggggggggctttttttggggtgtccccttttttttccccgttttttgggcggatttttttttttttttttgggggccccctttttttttttgttgggggcggggtttttaccccctgggggggggggaaaacccctgggtttccccctttttttttgtttgggggggttttccctttttttccgcgggggggttaaaaggagggggggcccccccttttcccttttttaaaatgggggcccctttttggggggggggggccccccctttttgggcctttttttggggggggggggggggtttttccccccggggtccttttttttttttggggcctttttccccctttttttttttttttttccctttttttttccccccttttggggtttttccccccattttttttttgggggg

SEQ ID NO: 8330 - DNA, 200 bp, Chlorella sorokiniana
  Clone ID: LIB3602-105-Q1-K1-E6
ctcaggttagtcggcggtgtatggggggtgggtccggcccagccccaatgcccagtatcaggggcagcagtgaggcggggccggcgcacaacagccctggccacggcggctcgcaagctggcttgccggccccacacttgtcagggcaggtaggctcgcttcaccttggcaccagccggggggggggggggttctctctc

SEQ ID NO: 8331 - DNA, 521 bp, Chlorella sorokiniana
  unsure (1)..(521): unsure at all n locations; Clone ID: LIB3602-105-Q1-K1-E7
ggcagccacgnaaagattgagcagcgggtgcgcgagaggccaagccgccaagncatgggcgtgcggcacgtcatgaacctgggccatggcatcatgcagggcacccccgaggagaacgcggcccacttcttcaagtggccaaggagctgcgctatgccgacctgtgagaccacagcgcgcacagcatgcacagctcggcgtgacacagcatggcgcagtgtgaagcggcgcagccaggcatgcaggagatgcaccgtcatgcacgggcaatgtatggcaccagccgcaaaccatcttcgtagcctcgccgctgcccctacagcctctgcccacctgtgcttggcagcgggcgcgacacattggtcgcacgccctagccccccattccattgtttcattttgctccgctcctcccctgccattcctacacttggtcttttacacaagtcgcaagctgccggcacacaacccaaaccaatgaatgctgacccccaggcccaaatgtaatgcctctacctatca

SEQ ID NO: 8332 - DNA, 548 bp, Chlorella sorokiniana
  Clone ID: LIB3602-105-Q1-K1-E9
ggcgcgcaggacaaccccatcgatcacgccctgcacgatgctctgaagctggagcgcggagagaagcctgagacgagcgccttccctgagaccctggacgacgcgctgtctgctgcacagatgcgagacctgccagatagcccaatcgccgccgcaaccactgcgctgggcggaagcggcggaagcggcggcggcggcggcaaccccggcccgggcgggaaccctgggccagaaggggaagtgccgccggttgagggcttctcagccaaccccttccacacccagcagacccgcgccaagctgtaaaggggctctggggcagtggacagccaatgattgatctggagcctctggcgagagtgtgcgctccaacagcagagcgagcttcacctgtccagagcgcatcgagttgcagttgcagcagtttgctgttttctgccgcatgtttgcttggggaccacctaccggctgtgctttttcttccttggtttggatagccctgcctgcgccacaccggactggggattgcttcagcctttatgtgtctc

SEQ ID NO: 8333 - DNA, 361 bp, Chlorella sorokiniana
  Clone ID: LIB3602-105-Q1-K1-F1
gggcaagctgctgcctctggccaagccggcggcggcgctggagaagtggcgatcactgcggagatgaagaaggagagcgcgtacggcaagctgcgtgtggagcggatgaacgcccgcatggtgggcgtccgcgccaagcgcgccgccgaggctgctgctgccgagaaggacgcgtaagcgccctgcgcgcagccgcgactggcagccgcctgtgcggccgggggcgcggtggcggccggcgacgcggcggggggcaggcgatccccaggcccgcccgctgtggagcgcagcgcagcgcagcgcagcatgcatgccagttggccagccgtgcgcgctgccgcgcccctgtaacacacccctg

SEQ ID NO: 8334 - DNA, 414 bp, Chlorella sorokiniana
  unsure (1)..(414): unsure at all n locations; Clone ID: LIB3602-105-Q1-K1-F10
gtgtttggcccacggnaggaggcggctactacttgctggcgctgagcagcctgccgcaagccctgtttgagggcatcgagtggagtacatctactgtgctggcaaccagcgtggccagtgcactgcgcgaaggcctgagtgttgctcccttaggcactctgccccagctgctggatatcgacacactagcggatttgcagcgctgggttgccctccagcagcagcagcagcagcagcagcaaaatgctgggccgatccagcaagcaccacggaagttacgaagcttgctggtacaagcggcgcagcgtatcgtgcagtagccggcaaatgctcctcaataaccaatcgagcagcactgcactcgttccctgtcaatcgtcagttggctgatttgcattttatcgacatagcang

SEQ ID NO: 8335 - DNA, 581 bp, Chlorella sorokiniana
  Clone ID: LIB3602-105-Q1-K1-F11
cgcgctccgcaaaaaaaaaaaaaaaaaaaaaaaggggggggggggggggggggaaaaaaaaaaaaaaaaaaaaaaaaaaaaaaaaaaaaaaaaggggcaaaaagttatggactcttaaattgtcaacaagttgggggggtcttttttttgtggctctttgtttttgtttcccttgggtttgccctttttctggcgcccctttttttgggggggcgtggggagtgtgggtccaccctgggggctcctcctcggtgtttgcccgttgttggccccccttggcgcttttctccccctttttgcccctctttgggggagcccccccccttcgcgccccgcccttgccccactgtgccaaaagggccctgcgcggtagttgggggcccccccgtgggcccccccctttttgggggggtttggggttggggcccttttcccgttgtttagccccctttttgccctttctttttgcgccccctttttcccttttttttttcctttgcttccttcccttttttggcctttttcccgggttttctttggggggggttctcggggggctcccgggggggttggccccgggg

SEQ ID NO: 8336 - DNA, 579 bp, Chlorella sorokiniana
  unsure (1)..(579): unsure at all n locations; Clone ID: LIB3602-105-Q1-K1-F12
catgcggcgacgcgtacgccaccgtggtgtcgcgggaggcctgcaanaagccggtggacatcccctttgagctggcgcccgagagccagacggagcagctgcgcctgcgcctggcggtgcagaagcggaccgagcggctggccatccgagagaagagcgcaaccgcaagaagaccggtgagcctggacggcctgccgcgctccgagtcgtccgactcatctgatggcgagaaggaggcgatgcgacaggcacacactgcctcccctgcctctgcctctgaagagctgcagcgcctgcactccctgtcaccataagctggcatcggctctgagagtctcagcgcagcaggtgcacagctgacgctcggcccgcagcctgcttggtcgctagtcagggcacagagttcacaccagcgcaatgcccagcggccactgggccatcctgttcttttgtagcacatgcgagcgcattttgcgaggccatacatccgcagatcagcgacgtctcttccaatccacccaacactgcttttcagaaccttttttcagccacttgccctaactgggcaggctccgtctg

SEQ ID NO: 8337 - DNA, 580 bp, Chlorella sorokiniana
  unsure (1)..(580): unsure at all n locations; Clone ID: LIB3602-105-Q1-K1-F2
ngagccggcgcttcgacttcacgaggnacggcctgactacctgggcaacccctccctgatccacgcccagtccatcgtggctgtgctgctgacccagctggtgatcatgggcgccgccgaggcgtaccgctacagcggcgagggccccgtggagaccagcggcgactccctgtaccccggcggcttcttcgaccccctgggtctggctgacgaccccgacaccctggctgagctgaaggtgaaggagatcaagaacggccgcctcgccatgttctccatgttcggcttcttcgtgcagggcctggtgaccggcaagtcccccctggaaaacctggctgaccaccttgctgagccgtctgtgaacaacggcttcgcgtccgccaccaagttcctgcccctggcctgaacgccgtcgtcaacctggagcgacctgggcatcccatattaacggcggccagccggttttggacaagcacacacaacatatgagattcccaacctccctgcgcactgcttgtaacaatcctggctccctcttgtacccttgacccgcactcgggcgtggatatgtaacgttccg

SEQ ID NO: 8338 - DNA, 574 bp, Chlorella sorokiniana
  unsure (1)..(574): unsure at all n locations; Clone ID: LIB3602-105-Q1-K1-F3
ccccgcgtccggcggagtcaaggtggtggcttcatggtgacgaccaaccgcaaaagnatggcgagggaaagaagtttttgattcggcggtcaaggcggtcaagtcctggcagcacctgcagctggggtggaactgcaccacggcgccggcgatgcagaatggcgcaaccatctgttccgcaacccagactgtggtgccctggagcgtgctgcccgcccaggtggtctactgcaacgagtcggccgctgagtttggccctggcaacaagggccgccgctttgctgtgggcctatgctcgctgaacgggcaccagctggcgggcgaggagcgctttcaggtcgagctgcatgccgacggctctgtgtggtacgacatcttcctcttctcccgccccgacacgctgctggcctgggcctccctgcccgtcgtcaagctgcagcagatccggtacgtcaacgacggcattgcggcagtggccaaggctgtgaaggcctgaagtgcgccttgtcataacacggcttggtagcagggcagcggccatgcctgcaacagccatggagcaacctgcccgact

SEQ ID NO: 8339 - DNA, 576 bp, Chlorella sorokiniana
  unsure (1)..(576): unsure at all n locations; Clone ID: LIB3602-105-Q1-K1-F4
ctcccacccccggcatgagcgatgacatcaagcgccagctgtgcggnctgacggcacnctcatcgagtggaaagccagctgcgcggctgagcagaggttagacgccaagcgacagctgtgcagctgagcagcggttgatacggcaagaaccgcgctgagtttatactaccctcaacagatatgaatctgcatcagtgagagacgagagctgtctgtgcctggccgagttttgagtttctgctgccacgaacgtgcctttatctgagcggccaggagattgtgtcagacttttgtgtaacgatccaacaaacaaaaaaaaaaaaaaaaaaaaaaaaaaaaaaaaaaaaaaaaaaaaaaaaaaaaaaaaaaaaaaaaaaaaaaaaaaaaaaaaaaaaaaaaaaaaaagggggggggccgttttaaaagaacccaagtttacttacccgtgcttgcaaacgtaatagtttttttataggggcacctaaattaaattaattggccggggtttaaaaacgtggggacggggaaaaaccttggggttccccaatttaatggctttgaagaaaatcccctttt

SEQ ID NO: 8340 - DNA, 211 bp, Chlorella sorokiniana
  Clone ID: LIB3602-105-Q1-K1-F5
tttctcagcttgaggccatacacagctgctgttgccggccattcacttctgctgcaccgacgcccccttgttgttgtgcacgtgccgatgatttttgtaacaccacccccggtcaaaaaaaaaaaaaaaaaaaaaaaaaaaaaaaaaaaaaaaaaaaaaaaaaaaaaaaaaaaaaaaaaaaaaaaaaaggggcgggcggttttaaaagaac

SEQ ID NO: 8341 - DNA, 543 bp, Chlorella sorokiniana
  unsure (1)..(543): unsure at all n locations; Clone ID: LIB3602-105-Q1-K1-F6
cggncgcgtgggcagcggccccgtggtggccatcgctctgngaggcaaggacgtggtggcccaggcccgcaagatcatcggcgccaccaaccccctggcctccgaccccggcaccatccgcggcgcgtacgccatcgacattggccgcaacgtgatccacggctccgactctgtggagaacgcgcagaaggagctggcgctctggttctccgagggcctggtggacaacacccccgtgctgcgcggccagatctacgagtgaaccgcgcacagcaggctgtgagggcgcccaagcactgggcgcctggcagctagcagcggcaggcttgcgcccgagactcggtccggctccaaaaattgaatcgaaaaagctgacttgtcacattccattctggtccccttgtttcatgctgcatgccccacttggaattggcaagcaggaaccaatcagccttttgttacaaactgcgaacaaaaaaaaaaaaaaaaaaaaaaaaaaaaaaaaaaaaaaaaaaaaaaaaaaaaaaaaaaaaaaaaaanagg

SEQ ID NO: 8342 - DNA, 556 bp, Chlorella sorokiniana
  unsure (1)..(556): unsure at all n locations; Clone ID: LIB3602-105-Q1-K1-F7
caccaacgaggccttcgactggctctcgccgccctcaagtcacgctggaggaagttgtggcgaacaccgagctgctgaccaacatcctggcctaccacgttgtgcctggcgtcgctgcggccagcactgacctcaccaacgaccaggtgctgcccaccctgctgggccagaacgtgactgtggccatcggcgctgacggcgtgtcgatcatctccgctaacccggccgcgctccccgccaaggtcatccagcccgacgtggcctctggggatgcccagggctcgatcattcacgtgattgatgccgtgctcctgcccgagctgtaagcagctgtgcggttcaccgaatgttgtgtctgtgatgatacacatgtgagcggtgcatgtgtgggcaggccgaattggcccgcccgcccacggcgccgccccttgatgccaccagtcccccatttcattctctcaacctagcgcggtcctctgccccccagcccacccacccatcctctggatttctcccaccatccgttcattgcaattccctagcnccctgcctgccg

SEQ ID NO: 8343 - DNA, 582 bp, Chlorella sorokiniana
  Clone ID: LIB3602-105-Q1-K1-F8
ccactggtagcagctcgggtgcacggcgcccgcttgcaagctgcatgcgctgctgcgctaccccagacagtgcacggctgcccaagctgcttggctgagaggttgcacctgcgcccgttgcgctgcgcaagcgcgccctgccggccgccgcgcccgcctagccgcctaacccaccccgccgcccgcccgctgctccgcttgtgagagccgccggctgcggcactgtatacctttttgcccgctgtgtgttcgctaccgcctcccctcctgtgcatgcctcggctcccgctcgatctccctctcgctccaagttcccgcatttgtttctcactcaccgccccattccctcttctttgcacccgtcgcttgtcatccggccgccgcgcgccgcgtatcacgttttgtgtctgattcctgcagttcgcacgaagcctaccgcccttccttgtgtgcacccgctctctctctcgccgttcccctaacgcttcccaacccccttgcttgcgccccaggccggcggcctggcggtgaccgcacgcccaccctgttgaggcaagggccccgcagcccccagtcaattgt

SEQ ID NO: 8344 - DNA, 554 bp, Chlorella sorokiniana
  Clone ID: LIB3602-105-Q1-K1-F9
gcggccccgctcttcaggccacccacttcaaccgcgtgtactgcggcaagtgccacctgacgtacgtgtacgacaaggagggccagaccgcctaagcgccccgctcccccctgcggatgcacgcttagcagcagcacacgcggcgggtgcgcccggcatgccggcacaccagccacggagcggcggggcgtccctggcagcggcgcagcgcctgcaagcccttctgttgtgttctgtgccgctgtaatacccctgctgcaaaaaaaaaaaaaaaaaaaaaaaaaaaaaaaaaaaaaaaaaaaaaaaaaaaaaaaaaaaaaaaaaaaaaaaaaaaaaaaaaaaaaaaaaaaaaaaaaaaaaaaaaaaaaaaaaaaaagggggggccgttttaaagaaccaaatttaacttcccggggattgcaaggaaaaagtttttttttggggcccccaaaataaaattaatgggccgggttttaaaaacgtgggaatgggaaaaaccttggggtacccaaattaaaacgctttgaaaaaaatccccttttcccaaggggggt

SEQ ID NO: 8345 - DNA, 500 bp, Chlorella sorokiniana
  unsure (1)..(500): unsure at all n locations; Clone ID: LIB3602-105-Q1-K1-G1
ccccgcgtccgccccgcgtccggccgcagctagccgtcggcgccagcagcccagctgaacgactcatctgtgcggccgctgggccgctgtgattcatttgcatcggcccatgagcggctgccttgcacgcatggtgcggcacggcctgctctgcggcccttcatacctttgtacctttctgtatcatcttgcagcaatggcagccggctgcatctttctaacatcgtcaccggcccactcgtttgtgccatgcccacctgcctccaacgtcacccttcatcaaccctcacccaacccatccacctgccacccatccactcaccttccctccgccacaacctctgccacccactcaccacccatcacccgctcaacgccctccatgcaccatcctccccatccaccaaatctgccaccccaaacgcacgtccgccgttgcaccacctgccgnccccttacccgcacccatnttncacccgncacctttnctgccgttcacc

SEQ ID NO: 8346 - DNA, 177 bp, Chlorella sorokiniana
  Clone ID: LIB3602-105-Q1-K1-G10
caaacaccagaatgaaacaccttgggggcgagctggctacgcctctgcctttggatgcacctgtaagcaaaagtttgcaaaaaaaaaaaaaaaaaaaaaaaaaaaaaaaaaaaaaaaaaaaaaaaaaaaaaaaaaaaaaaaaaaaaaaaaaaaaaaaaaagggcggacaatttaaga

SEQ ID NO: 8347 - DNA, 577 bp, Chlorella sorokiniana
  unsure (1)..(577): unsure at all n locations; Clone ID: LIB3602-105-Q1-K1-G11
tccgggcgacagtcagccgtgcgcactggtggcttgggggcgtgcagcgcaggcagnaagaagtgcagcagctgaacactcgccagaacagcggcggggcgggcggagggcgcaggcggcggggacggatggccagcggcagtagagcgcccagcgcagtggcgcagcgacgtatacagagcgagctgcgagactggctgcagcacccgcctgacggctgccgcctggtgcagtatgacgatctgcgggcctggatcattgagctgcaggggccggagagcccctgccatccgcagctgtacctaggcgacaccttccacctgcggatcgtgttctcggagcggtacccgcttgaaccgccagaggtcacctttgtgccaccctcgccggtgcacccccacatctactccaacggccacatctgcctggacatcctctacgacgggcacaacggcggctggagcccagcgctcacaatcaacaaggtggcgctcagcctgcgcagcatgctggccagcaacatgcgcaaggagcggccggcgggggatgccgactactgcgcacgcatgcgggggcg

SEQ ID NO: 8348 - DNA, 458 bp, Chlorella sorokiniana
  unsure (1)..(458): unsure at all n locations; Clone ID: LIB3602-105-Q1-K1-G12
cactagttctagatcgcgaacggccgccctttttggggtttttttttttttttttttttttttttttttttttttttttttttttttttttttttttttttttttttttttttttggggggaacaaaccattggggaaaaaaaaagtcctgggccccaaacggcaaaaggacccaaagaggggggggggcaaccgggccttaaaaaggggctggaaacctgggacgggggggggaaggggggtccaaacaaaaaggagggggttggaaaaaacttttcaggggaaaaccccctggggaaaacgggggggaaggggggacaaggagggaggggggggaagaaagaggggcccccntaaacccaaaaaaagggggcgggggaaaaaagggggcggggaagggggcggcatggggtccaccccccaacctccctttgggggggcaaaattgggggaggggg

SEQ ID NO: 8349 - DNA, 568 bp, Chlorella sorokiniana
  unsure (1)..(568): unsure at all n locations; Clone ID: LIB3602-105-Q1-K1-G3
ggctngaanacacccccggcgaggtgtctgacaccatcgccaagaggccaagagggcatgaccccctcccagatcggcgtgatcctgcgcgacagccacggcatcgcccaggtcaagtccgtgaccggctccaagatcctgcgcatcctcaagggccagggcctggcccccgagctgcccgaggatctgtaccacctcatcaagaaggcggtggccatgcgcaagcacctggaggccaaccgcaaggacaaggacggcaagttccacctgattctggtggagtcccgcatccaccgcctggctcggtactacaagcgtaccaaaaagctgccgcccaactggaagtacgagtccgccaccgcctccgcgctggtgcagggctgagcgctcgcctcgcgcgtgagctgacggctgcagccacggctatctccaactggtgtgccagcaggcatcaccacgaagcagccgcagctctccagctggctctgcctgcgtttgcagcccctggcttgatgtgctgctctcttgcatgcatgcgccaagcgcatgtgtaaagctgctgcagacc

SEQ ID NO: 8350 - DNA, 571 bp, Chlorella sorokiniana
  Clone ID: LIB3602-105-Q1-K1-G4
tccagcagcagcagcagcagcagcttctgtggactcttgcaccggctcccggctccctgcaccacaatgcgcgcctgcctgctgctggtggtcgcgctctgcgccctggtgaacgtccagggccgcgccctgtcccagaccgatgcgctgactgccgcgccggctcctgcgccagccctggatgagggcgcggtgagcgcttcgggcgctcccctgttcaccctcgaggaggtggcggcccgcaacagccccgagagcgcctggattgctgtggagggcaaggtgtacgatgtgaccgagtttgcgcccacccaccccggcggcgccggccgcatctacgccattgcaggcaccgatgccacggagcggttcatgcgccagcacggccggccctccatgcagtgggacctgctccagaactacctcatcggcgagctggccccctccacctaagctcagaaccagctgaagcagcagatgagctgtgccacgagtgtctctccgcacccactactcagccagctgctccgccgccaccgccgccagcggcaatgctcacacccgccccttg

SEQ ID NO: 8351 - DNA, 524 bp, Chlorella sorokiniana
  Clone ID: LIB3602-105-Q1-K1-G5
gaagactccgtgaacgcggaccccttcaacccaactcaagtgcccaaccccgagctgggctaccccggcggccccttcgaccccctgggcttctccaaggcaacttcaaggaggcccagactaaggagatcaagaacggccgcctcgcgatggtggcgtttgcggccttcaccatccaggcccaggccaccggcaagggcccgctgcagaacctgaccgaccacctgtcggcccccttctccaacaactggaccaccaacattggccactgcatggtgcccacctctgtggacgtccagggcctgaccatccccctgagctgcctgtggcccggccagcagatggtgtaaggcggcggcagcagcagcaggggcggcagtgtgcacccacctgcaccgccgccccagccccggccccgcgtgtaactggttaccctccttcgtcccatttccttgctccgcccgccgccgcggcgtgctagcgcacccgcccgggcacctttcccgttgcacctgagaagaaaa

SEQ ID NO: 8352 - DNA, 523 bp, Chlorella sorokiniana
  unsure (1)..(523): unsure at all n locations; Clone ID: LIB3602-105-Q1-K1-G6
gnctactacacgcananaaggcgacgcgctctatgcctttgagctggcgctggctctgcagaagctgaacatggacaagctcaaggcctgccactcgctggccgacaagtcggatgacttccaggcccaggatttcctggaggacgagatgagcgcccaggccaaggtggtgaaggagctgggagactatgtgtgcgagctcaagcgcgtgggcaagggccacagcgtcttccactttgatgagaggattgaccagggaggcctgactgctgcggcgtgagctgaccaggcagcaagttgcaaagggcgcagctgcagaaatggcctgcaagcccagcggcgccagcagggcggcaggcgtcggcggcggcaggcgtcggcgtggcatacgcactgatgcccacctgccacacaccactagcttgcgttgaatgatggttgatgaagatggcaacaaaaacagctgttcaatgttccattccttgtaaagcagcgagcattaaaaaaaaaaaaaaaaaanaaa

SEQ ID NO: 8353 - DNA, 163 bp, Chlorella sorokiniana
  Clone ID: LIB3602-105-Q1-K1-G7
cccagcgtccgcccacgcgtccgtaaaaaaaaaaaaaaaaaaaaaaaaaaaaaaaaaaaaaaaaaaagagaaaaaaaaaaaaaaaaaaaaaaaaaaaaaaaaaaaaaaaaaaaaaaaaagggggggccgcttcccaattctaaaacactatttttaaaatcgc

SEQ ID NO: 8354 - DNA, 188 bp, Chlorella sorokiniana
  unsure (1)..(188): unsure at all n locations; Clone ID: LIB3602-105-Q1-K1-G8
aaccccccctgtaggggggcgttaaccctcctgggtgtgttgtttacccccanngtaaccgttacattttccaaccccttancccccgttcttttcctttttttcctttcttttttccccactttccccntttttccccttcaacttttaaaatctnncctccttttaantttccctttttatttttt

SEQ ID NO: 8355 - DNA, 392 bp, Chlorella sorokiniana
  Clone ID: LIB3602-105-Q1-K1-G9
gtaagcacttgcaccgtggtgaccccgccgcagtagccgccgcagcagcagcacagcacacgagaagaaacccccccccccaactttcccttgcttgtacgttcctccgctcttgttggccgtcccgcgggcgccagccacaatctgatttttcgctcagcgtgtgtgccacaccatgtgtaacgacttgcccgcaaaaaaaaaaaaaaaaaaaaaaaaaaaaaaaaaaaaaaaaaaaaaaaaaaaaaaaaaaaaaaaaaataaaaaaaaaaaaaaaagaaaaaaaaaaaaaaataaaaaaaaaataaacttaaataaaatgaaatgtaaaataaaataaaaatggaagggaattggaaaaaatttggagtggaaaaacttagggggggtgg

SEQ ID NO: 8356 - DNA, 566 bp, Chlorella sorokiniana
  Clone ID: LIB3602-105-Q1-K1-H10
tccgcctcattgacccacggcagccacttgggcggggggggtgcgtttcccgggtgcagaaggagtacaaggcgatcctcaaggagccagtaccacagatcaccgcgcacccagcacccaacaacctactgggagtggcactaccttctgggagggcagcaagggaaccgactttgagggggggggctatcatggcaagggcatctttccggggcagtacccatacaagccgcccagcatcctgatgctcacgcccaacggccgggttgcagtcaacaccaagctctgcctcagcatgtgggacttccaccccgagacgtgggaaccccatgtggagcgtgagcaccatcctcaccggcctcctgtccttcatgggcgagacgcagcacaccacgggtgccattagcaccccgcctgcctagaagcggaagctggcgcgcgagtcgctggcgtacaacgtgcgcaaccccaccttcaggaagctgttccctgagtgggtgaagaagcactaggaggcgctcaaggcgggccagcagcaacaggggcaagcccagcagcaacagcag

SEQ ID NO: 8357 - DNA, 386 bp, Chlorella sorokiniana
  Clone ID: LIB3602-105-Q1-K1-H11
gcctccggtcttaccagctgccgcatgtgtgaggggcggcgctgtgtgtggggcaccctctcatgtgtgaggcggaaaactttcgctcctggctgagcaatcaccaacaaagctggggtgtgatgcacctggctgcccaaactacatgccgccgcaatggcgggcgcagcaacaatagtgaggggggggggctgcagcgcgccaccatctttgttgccatgcccccctttttgtggccgtaagcccctttcccctgtgtgcacctcgtctgccccattgcagttcaaagcactagtacccacttttccgctgaaatcgaccatggccccctttgctgagccactctctttcaatgggcagcccctgagtgtatgtttttccagctg

SEQ ID NO: 8358 - DNA, 581 bp, Chlorella sorokiniana
  unsure (1)..(581): unsure at all n locations; Clone ID: LIB3602-105-Q1-K1-H2
gntctacctgttctccctggcggtngaagagtaccagattgtggacttcttcctgggcggctccctcaagnacgaggtgatgaagatcatgcccgtgcagaagcagacccgtgccggtcagcgcacccgcttcaaggcgtttgtggtggtgggcgactacaacggccactgcggcctgggcgtgaagtgcgccaaggaggtggccaccgccatccgcggcgccatcatcctggccaagatggccactgtgccggtgcgccgcggctactggggtaacaagatcggcaaggtgcacaccgtgcccaccaaggtcaccggcgagtgcggcagcgtgaccgtgcggctgatccccgccccccgcggtgccggcattgtggcggcccgcacccccaagaaggtgctgcagatggctggcattgaggactgctacacctgctcccgcggctccacccgcaccctgggcaactttgtgaaggccaccttctacgccctggccaacacctacggcttcctcacccccgacctctggcgcgagaccgtgttcaccaagagcccgctgcaggagtactccgacttcctgg

SEQ ID NO: 8359 - DNA, 575 bp, Chlorella sorokiniana
  unsure (1)..(575): unsure at all n locations; Clone ID: LIB3602-105-Q1-K1-H3
gncctccacacggcctgcgcgcaatgctgcacgccctgtcgcactctcgtgtgctgccggccgccccgtcgggcgcgagccgagcagccgtcgtcaggctccgtggtcggcgcgccgtgatcactgccgttgctgagaaggacaaaggcgtagccagcgatgtggacgagggcggcgtgagcgagtattgcagcattgggcccgatggcaagcgtgtcaagctgacgctgggcgagaaggagcagctgttcctggaggctctgtccagctactactacgacggcaaggcgctgatcagcgatgaggagtttgcgaacctcaagatgatttggtgtggaacggctccaaggtggcggtgctgagcggcgatgagcagcggtacctggaggcgcacttggcgtacaacgcgggcaagcccatcatgagcgacgccgactttgacgcgctcaaggtgcagctgcgccagaccaactcggtggtcacggcgcagggcccgcgctgcagcatccgcagccgtaaggtgaccagcgacgcgagcgtggactacctgaagctcacgctgatcaacctgcccg

SEQ ID NO: 8360 - DNA, 572 bp, Chlorella sorokiniana
  Clone ID: LIB3602-105-Q1-K1-H4
tgccaattgaggtcgtctgctagcagcagctcgtcaccatggcggcagtggctgaggagcttcgcaaggagaccgtggaggatgtggaggaggatgttgatgatgaggtcagcagcgacgacgacgatgtgccggacctggatgaggccggcgaggagggcggcgcgcgcggcaagcagagccgcagcgagaagaagagccgcaaggccatgcagaagctgggtatgaagccggtgcccggcgtgatgcgcgtgcagatccgcaagagcaagaacatcctgtttgtgatcaacaagccggacgtgtacaagagcccctcttccgacacctacgtcatctttggcgaggccaagattgaggacctgtccgcccaggcggccggcgcagcagcagagcagttccgcatggcggaggccatgggcgcggcgggtgccggccccgcgcccgcgcgcgctgccgaggctgttgaggaggaggaggaggagggcgaggaggtggacgagagcggcgtggaggccaaggacattgagctggtgatgacgcaggcgggcgtcagccgcagcaaggcggtc

SEQ ID NO: 8361 - DNA, 585 bp, Chlorella sorokiniana
  unsure (1)..(585): unsure at all n locations; Clone ID: LIB3602-105-Q1-K1-H5
gtgctgctcacctgnaaagctgctgaggcggttaggcagcaaggtgtgtgctgggcttgctgccatttcttgcaaacacaacaggtgtgctgctggtggcgtgcaagacacaaacgaagtgcacatccggctgaattattccttgttctcgcccctgccctgcaggacgcgacgcacttccggagaaccaaggacccccagacggacaaggaggtgctggagccgtgctcgccaggagagcagggcgcgttcgcggccacgctgcagacgcttgcggacaaggggctggcggggatggtgcacccgcccaagatcacgttccgcgactttgaaaagtcgctgctgcgcgcgcggcccaccgtcagcccagacgagatgaagagctacgaaaagttcaccgcagagtttggagaggagggctgacagcctggcgcacaggctcccgctcgccgaagcagcagagtgcgccagcggtagcagcgctgcctgctgcagctgcacgccgcggcggcgaacacggagcgcccacacgcagcattgaccgctaagcacactgcagcagttctgtaacattgaccgcaaaaa

SEQ ID NO: 8362 - DNA, 577 bp, Chlorella sorokiniana
  Clone ID: LIB3602-105-Q1-K1-H6
gcccggcccctggtggctgcgccccgcccgctctccagtctgtgcgcacccaggcagtgggcaacgtgatcagcgacattggcaagtacctcagcgaggcggcctcgcagatcttccacccgcagaccgactccgtgccctgggagaagagcggcaagcccttcaccggcaagattgtgcaccacgaggaggtgtcgcgcctgcgcgcgctcgaggcggctgtggatgccgctgtggccgacattcagaagtcgattgacgaggcgccggagggcggagagacgcccaagcagagcgaggtgggcgacgtggtgaccaccaccatccagcgcgtgtttggcaacaacttcaagggcgatgagacggagcccaaggtctggatcagcggtggctatgcgtcccgcggccggaaccgcagccagcgcgagctgcgccacgagtatgaccgcctcacccgcttccagtcggtcgtgaagaaggtggccgccgacgtggagcagtcgaacaaggacatgtgaacacagcgcgcccagcacagcacgctcggcatggcacgcccagcatggggcgctgcagc

SEQ ID NO: 8363 - DNA, 574 bp, Chlorella sorokiniana
  unsure (1)..(574): unsure at all n locations; Clone ID: LIB3602-105-Q1-K1-H7
cagaggcctctcgggtcatcatccgagaatactaccagcggctgacgctggacttcgacaccaacaagcgcatctgcgaggaggtggcgatcatccagtccaagcgcctgcgcaacaagattgccggcttcaccactcacctgatgaagcggatccagcgcggccccgtgcgcggcatctccctcaagctgcaggaggaggagcgcgagcgccgcatggacttcatccccgacgagtcggccatcaacaccgaggccattgaggtggacaaggacaccatggacatgctgcgcggcatgaacatggcgggcctgccgggcgtgtccgtccagcaggtgggccgcggcgacttccagaagcccggcggcttccagcagcgccctccccgccagtgagcgtaccccaggaggagcggcgtggcgcggcggcggcagcccacccgcggcagcagcagcacaccagcggcagcccaccacagcggcgatgcgcggccgggcggacccttancaccatgacgcccggccagctgcagccggcgccgcgcctggtgtaacgaacctttcccgcgagcaaa

SEQ ID NO: 8364 - DNA, 268 bp, Chlorella sorokiniana
  unsure (1)..(268): unsure at all n locations; Clone ID: LIB3602-105-Q1-K1-H8
tccggcacgccggcgcatgacagcgcacgtggcgagcctgncggccgccctccgcgcacccgggagctgcatgcttcatgcccccaacgctgctgtgtttgctcatactcactccccactgcaacggccacgggagggggcacgggcgctgctgacgctgcgccgccgctgccccctgcccaccgggggtgtgaactgcgcccgctngacctttttccctcgctnagtgtttctgttgctttgctgttccttggggtgtgacgccctt

SEQ ID NO: 8365 - DNA, 577 bp, Chlorella sorokiniana
  unsure (1)..(577): unsure at all n locations; Clone ID: LIB3602-105-Q1-K1-H9
cccagcgtccggcgggcgggtgcttacggcgctccanaagcgcgtgcggtgcgctgctgcatgagcgacgcaggcagcagcggccagcgcaccaccgtctatccagacctgggtgccatcactagggagattctgtaccaccacagcctgctggagccagaggagtgacctgcacctgctgagtacggtacctgcacagcctgctggagactacgtagcgaaatgcttcaagtttagtaccaccgcaaatgctttccctgtagcaggagcagtgacgtgttttcacacgccggctgctgcactgtttgatgtttcacccaacttgctctttgccctggcttgagcagccaacgcatgggtttactgcttttcctttttgcctggcttaagcagccaacacataaatgtactgctttccctttttgcctggctccaggagccaacacatgactatactgcttgttcagaatactgttaagctgtgccgttgctgtgcaggaaggttcacttgtgttttcatatcggccaaaccacggcagtgcgttttgcaatctcggccaaccacagtggttcattg

SEQ ID NO: 8366 - DNA, 506 bp, Chlorella sorokiniana
  unsure (1)..(506): unsure at all n locations; Clone ID: LIB3602-106-Q1-K1-A1
gcgccgctgcctgggncaccgtggnggagctgtccgccgctgcctccccgccagggtgcccaggccagcagcgaccctctggaggctaagcgcgtggcggactgcgagaccgacccctcgcagcccgagtgccgggtgtacgatgactgagcgtagtccgcgtgggctgagcctaggcagcagctggccaaccctgttctagcgcccctcgagccgacgaagcttcatcgcagccgccggctgggatagcccgccgggctgccaggccgccgccccgccccaatccgcttggccaaacatccgatcctccttgaattcagcgcaatgagccagcttcagcagcagtgctcctcccccgtctgtccatgaggcctttttcggcgccctgctgttctgtctgtattccttcctctcttgtgcctcgccccctctccccgatatgtatcaggaactgagctgcttgatcccaattggttgctttgtggtccggtaacacagcggtagat

SEQ ID NO: 8367 - DNA, 464 bp, Chlorella sorokiniana
  unsure (1)..(464): unsure at all n locations; Clone ID: LIB3602-106-Q1-K1-A11
cccgggtgcgaccagcgtccgcccagcgtgcgcccactctccgctggggtggtgggcctgctcctattactgtgtggtagactctctatcacaaaacagtgctgcataagcaccttgcttcaactctactaaacaagggggcctaccctaaccacatgctgacctgatctttccctaagacatccaactntgtgagagggtggggcgcataataaaaaaaaaccaacaacctaagaataccaagggggagaagttacaaaaaaacggggcgggaagatacacaaaacacatgtggtggcaaaaacatgaaaataagagctaatcatggtagataatggctgatccttattgaggggaataatntttatgcgcgcggggggtgtctccgggaagaaatttttttattttgagccaaaatacagaaaagtgcagctgttgggtacaacgggggaaggggtaaaaac

SEQ ID NO: 8368 - DNA, 580 bp, Chlorella sorokiniana
  Clone ID: LIB3602-106-Q1-K1-A12
gccgcgtccagttgagccgcttagttgacaccggggagggcgacgccaggtacggctccaactttatgaaggtgcgggcgctggggctgacccagtacgacgcaatcattctgctggacagcgacgtggcggtggcaggcgacctctcgccgctcttctcgctacccaccgagtgggggggggggtgggaccagcccaaggtcctgggcaggtttggcccgcacctccagggtatcaacggtggcatgctgctgctgcggccctgcaaagcagtcatgcggcacatgctggcagtactggaggcccagcccaagctgcgattctcgcatggagcggcagagcaggactttttccactggtatttcaagtacacgggcatgcggctgccacttgagtacaacacgatggcatcagacagcctggcgggcaaccgcacgctgggcgggcgggaccctgttgtggtgcacttcacgcgcaacaagcccttccacggcccgcagcctggccggccagggcaccaattcctgtgcagactcgaagaatggactgagggtgttgcgccagcagcggcagctgtggt

SEQ ID NO: 8369 - DNA, 503 bp, Chlorella sorokiniana
  Clone ID: LIB3602-106-Q1-K1-A2
cgtgcggcgtgctagcctgccccgttgctcccggccagccgcacagcccccctgcatgcaccaacgctcctgctcatcgttccgcgggcccttcgaaccaacggaccctgccctttcacacactgccacccataccccctcgagcgtccaaccattcctgcagttgcaccccgtctctaggcagtgcctaattatttcttgtctttccaattccaggcgatcgccgccgctgtctcgcccccttcttttccctcggcacccactcttcttccccccgccgcgcacagcaactgggaggccgcgcgagcggagctctgcccttgcgccggccccatccccaacgcaatgcatgcctacagtcatattcccatgttgtccgcgttttctgtaattcatggcttctaaaaaaaaaaaaaaaaaaaaaaaagaaaatagagaaaactgatgaaaaaaaaaaaaaaaaatgaaaagggacggagagggcaaccagggaaaccggggtg

SEQ ID NO: 8370 - DNA, 571 bp, Chlorella sorokiniana
  Clone ID: LIB3602-106-Q1-K1-A3
gcagctgccccatgcggcacggctcaggcctgtgtgcgcggcaagggcggcatgattgtgggcgacctgcccccctacaaggccttccccatgggcggcaccaactgcgtgcgcggctacatggagggcggcaggacgctcatggctgcaactagtgtgagcgggtctgcgagagctgcggataccgatggtgtcccccatcaaagccactatcttttgagactggagctcatacctggacagcgtgcgtacggggactggcgactccaaggaggcacgcggcaagcccggcagcaggtatggctacggcgcatgggtgcggatagacacgtccatcgggccgctgcggctcgagtatgccatgaacgaccggcagcacacgcgcttccacctgggcataggcacggctggctagatgctgcggcagcggtgacggcagcatcatcagagtagcagcacacaagcggaaaagtcgcgtagccgctggctctgatgcagttgtttacatcagttgtgcacagcgctgaccactctggcagtgatcgttggatactctctgtctgaacatttc

SEQ ID NO: 8371 - DNA, 315 bp, Chlorella sorokiniana
  Clone ID: LIB3602-106-Q1-K1-A4
cttcctgggctggttcgcgccctccacatcaagggcccgctttcggcggcgagtcgctgttcggcgccttcctgcctcctgctggagaacctggccaacttcccccagggccctgctctggactccaacttctgggtgctcatgatcacttggcacatggggctctttgcttgcctgttttggggcctcatcggcgtgaacgcccgccgccagggctacttcgactgagcgctgccccatttggctcccagctcggattcattgctcaaacttgccgtgtacacgccatgtgccctgttgtaacgctctacgcat

SEQ ID NO: 8372 - DNA, 564 bp, Chlorella sorokiniana
  unsure (1)..(564): unsure at all n locations; Clone ID: LIB3602-106-Q1-K1-A5
canaagctcggccctcacttacgggacgcaaagcggncgagcacatggggcggcggccggcgcggtgctaccgccgagacaagggcaagccctaccccaagtcgcgcttctgccgcggcgtgcccgaccccaagatccgcatttatgatgtgggcgccaagaaggcgggcgtggacttcttccctcactgcgtccacctggtcagctgggagaaggagaacatctcgtccgaggcgctggaggcggcccgcatcgcggccaacaagtacatggtgaagaacgcgggcaaggacgccttccacctgcgcgtccgtgtgcaccccttccacgtgctgcgcatcaacaagatgctttcgtgcgccggcgcagacaggctgcagacaggcatgcgcggtgcgttcggcaagccatttggtgtgtgcgcgcgcgtgggcatcggtcagatcctgctgtccatccgctgcaaggacacgcacgctgcggtggcggaggaggccctccgtcgtgccaagttcaagttccccgggcgccagaagatcgtggctagcaggaactggggcttca

SEQ ID NO: 8373 - DNA, 582 bp, Chlorella sorokiniana
  Clone ID: LIB3602-106-Q1-K1-A6
ctgcttgcatcagtcctgcgctgcatttttccccacggttgcagtttgctggcttctacagcctttgatttgctggtgctcacaacctgtgtgcgcaggagatcgccgacctcatgatgcagtgcctgagcctggagccctcgcagcgccccacggtacgcctctcagagcgcactccagtttgggctgtgtttccttgccgcacagctgcatggcgttgtgccgccgctgcgtaaatttgcaaaaacacaacccagccgctgcacctgctgctgccctcgacctcgcccctgcatgtggcccttccttcccccgccaagcaggcagcccaagtgatgcagcggctggagggtgggcgaggcgcgctcgaggcgggctccgtggtagtgccagtgaggctctctggagggcggtcgtctgccgacggtgggtcgcgcggcgcggaggtcagccaataagggcggctgctgccgctgagagcgaagcgaacgtcgcaataacctggactgaacatgaacgagcaagggcaaccgtgccccctggcagtctgaacacaccccaacaacaacgcatgcttttcca

SEQ ID NO: 8374 - DNA, 131 bp, Chlorella sorokiniana
  Clone ID: LIB3602-106-Q1-K1-A7
cagcacatctgtgaccacgcctcgctgtgcatccctttatggcccccaccctccaaactaaatgctgtacctagactatcctgccgttccctctgtgacgccacacttgagtgtaaccaaccgacaggcct

SEQ ID NO: 8375 - DNA, 550 bp, Chlorella sorokiniana
  unsure (1)..(550): unsure at all n locations; Clone ID: LIB3602-106-Q1-K1-A8
tccgcaggcaccggcaggaacctgggcatcaacgacccctgcctgttctctgccatcaccattgtggttcaccgatccgtgtgctggctgtgtctctaccgtgtaccacctccagcacattagaccgctgcgctgntgaccgcgcagaacgacgatgcacttttgcctgactcctcttagcgggcgcccaacattagggcgggccgcgcggcttatgcccacgggcctgcctggcaaattttcctacttctgtgacaccttgtacgagctgtgtaccctaaatccaaatttcaccctgagaagacaactcgctatgtaccacccttgtgtgaacaccgaccctgtagggctcctgacccaacttactggactggctgtctaacaacggactgctaaccaccaaggtgcattaccggacaaagcatgactgcgtgaccaccactctggactgtctttgtatcggggaccctagctagcctatactcctcgacagtgtgcccgtcgcctacctgttaaccaacgacttcctcccctttagggtcnttatggg

SEQ ID NO: 8376 - DNA, 482 bp, Chlorella sorokiniana
  unsure (1)..(482): unsure at all n locations; Clone ID: LIB3602-106-Q1-K1-A9
tccgcacgtgcacacaccaggctgcaccggcacctggtgcagctgcacctgctgctggcactccggtgtgtcaaaccaaccgtggggtgcgttgtgagcggtgctgctgccattcgcagtgggtcgggtacccttctgctgtcattgcaacccaaccaaccattgtgggccaggctccctgccgggctgttgcatattctggagagcgcccaatagcgcctcccatgctgccttgataggcagctgccttgttgttatgctgctgctgctttccttgttctcctgctctctgccccccgtcatgcacatgcccgtcctgctcctatccccctcttgtgaggttcacacttgcaaagctgccaccgcttgtgaatgtccgcaactaanaaaaaaaaaaaaaaaaaaaaaaaaaaaaaaaaaaaaaaaaaaaaaaaaaaaaaaaaaaggaaaaaaaagggggagagaaaaaaaagggagggggg

SEQ ID NO: 8377 - DNA, 579 bp, Chlorella sorokiniana
  unsure (1)..(579): unsure at all n locations; Clone ID: LIB3602-106-Q1-K1-B1
ncgacatcaagtgcaggtgtcccctgnccgcgtgctgaccatcagcggggagcgcaggaggagaagcgggaggggtcagaggaggagggcggcactctgcgggtggagcgctcctttggctccttcatgcgccgcttccgcctgccagacaacgttgatgtggagggcatcaaggccagcacgcgcgacggcgtgctgacggtgacggtgcccaagacggaggagcccaagccaaagtcgatcgacgtgtcggtggagtgaatgccattcgcaagccagtggcatgacgaaaccagaacgtaaggagcgcaccgcagcacacggttgctgcaggttgtgacgcacatgttgaagataaaccctcatgatctcagaatgaatgactctgtcacgcacagtttcgctgcgcccgcattgaggcgcggctgccccctttcatgttggacccatccagccgtcattccgattttgtttggcccctcctgccggctaccgttgctctgtgtgttagcctgaacgccttacaatcatccaggccttgttgtatggaaaccaccttccggtagtggtgcaatgctt

SEQ ID NO: 8378 - DNA, 580 bp, Chlorella sorokiniana
  unsure (1)..(580): unsure at all n locations; Clone ID: LIB3602-106-Q1-K1-B10
agcgggtggccatgggcaagaagctgcgctttgccgcagnagacatcaagnacaacggccactccatcgagtgccgcatcaacgcggaggaccccttccaaaacttccgccccggccccggccgcgtggtggcctacctgccgcccggcggcccccacgtgcgcatggactcgcacctctaccctgactacctggtgccccccaactacgactcgctgctgggcaagttgattgtgtggggcgagaaccgcgacgccgccatcaaccgcatgaagcgcgccctcaacgagatggtggtgcacggcgtgcccaccaccgcgcccttccactgcctcatcctggagaacgaggagttcaagaagggcaacgtcgacaccggcttcatccccaagcaccaggagacgctcacggagccccccaagatgaaggacatgagcattgtgtgggaggccggcaagcgcaacgcggggcgccgcaagcacgcgcgcgcgtaagcagcccgncacccgcgcagcagcattgttgaccactgttgttaccctgcgtntgggcccgctgtgggcagcgctggggtggtgcc

SEQ ID NO: 8379 - DNA, 547 bp, Chlorella sorokiniana
  Clone ID: LIB3602-106-Q1-K1-B11
gtctcttgcatatgcagccctgctgcacccactggcggcctctatgccactaccctactaccctggttacaagggcagctgtcatcaacaagtccttgtgacacctgcgcactgggatcaacaaccttacccagggggtgcaggaggcacgcccacacatcccgtaccgtgattgcaagctgtggcgtatactgcactccaccctgggaggcaacaccaataccgcaataatatgataccgacacggccagtatccaccacatggctggaggcagaccacaaaacacactgacactcgcctgtcgctccaacaaggacaagagccccgccacggccaacaacgtgtaacacatttctgcgctgctgccccgctcccaggctggacattgcagtagctccacctcgcgcggtgcgcagcaggaacgagggtcgcacagccgggaagtggtaagagcaagaggcgcagctgcgctcccagctgctgctctgggaggacgagaatggcatgctggacaaccagctggctgagaaggaggccgccctgcga

SEQ ID NO: 8380 - DNA, 519 bp, Chlorella sorokiniana
  Clone ID: LIB3602-106-Q1-K1-B12
tactatccgcttttcactaacaatctcgagccctgaccttactggtctctggcgttcccacacttttttggacacgggggggggcaccccatgctcggtcctctggggccgcctaggggtgcctctcctgtcaatatgtgcaccaaatgtgcgtattgacctcatgctgagagggggggtgctttactaccttatttctttacacacttaccctctgctggcggcctgccaagtagctgcccttctgcattgatgggccgccgggcattgtacattgcttccattggccgctgtgaggcgctctcctgtttgtccctaagctaacccactttcttaactgagtttcctgctgcacctacaaaggcttgcttatcaccctcacatactacacgctgtggcgcaaacactggtgcgccctcatcacctttgagcccacctatgctgtggcgctggccggctgtctagagcatctagctcacgggcgcctgcttgctaccctatacttcttttatctgcact

SEQ ID NO: 8381 - DNA, 525 bp, Chlorella sorokiniana
  unsure (1)..(525): unsure at all n locations; Clone ID: LIB3602-106-Q1-K1-B2
ggcacctgcagcagcgcctgcggcagcacctgcggcggnccgcccagctgcccacggcctgggccatgcagcccctgggtcgcccaaccaggacgccagcgtggcacgggtagccagcctgtccaactggatcgcgcccaccggcggcagcagcccctcgccccgcagccgcccgcccgcgatcgccgagggcgcggaggctccctagttgggggggccagagcctttggtcaagcgctggccacctggccccgcctgtattgtcacccatgacgcgtctgtgtcctgtttatctctccatcctgcccgattttttttctggtcccctcatctggcagcattttgaacccctaaccctaacccaaccacccccgattgctgacgcttttgctgcaactcgcctcacgacacaagccaagcggctgacgccctggcttgttgacgacctccccccctcccctttgtgtatgctaaacccctgttgctgcgggctccaagccctgcgctgtaaactccccatcgtgc

SEQ ID NO: 8382 - DNA, 555 bp, Chlorella sorokiniana
  unsure (1)..(555): unsure at all n locations; Clone ID: LIB3602-106-Q1-K1-B3
ngagtgccggaagaagggtaatgcagcaagaatgccggaggcgccacggactctcgcgcgcagtacgcgtccaaatggacagccgaggccttcaggcaaaaagggcgtggcgtgtccgcttgtgcagcttactctgcctcaactacagggtgggtgactatgcggtacatcaaggttaacgcccccgtgcacaaaggcatggccccacagttataccaggggaagaactggctgactttggaatgtgaccaatagagccgtgggcgtgcagctgcttatgcgggtaaacgggcggtacatcaagaagcgcatccacttgcgcattgaacacgtgacccccagccgctggcacgaggagttcctgccctgctgcatggataacgacgcggtgcggcacgcggtcaacgtgaaggggaagccgatgtcggtgctcaagctacagcccagggctctccgtaccgtagccatcatgctggagaacgtgaagatggtgaccatcacggtcataccctacgagattctctaggagggcgtgctctgaggcgtgatcggccc

SEQ ID NO: 8383 - DNA, 535 bp, Chlorella sorokiniana
  Clone ID: LIB3602-106-Q1-K1-B4
gcacaaaaggtctggagcaccaaactgatgtcctaactctggcactgcaccctgtgcgcggccaaaagactcaactgcaatccatgcgcctcgccaccctgtgtgcaattggcaacacaagaggtgaagggggtatactggcccaaaacatgagagcgggtgcaagcgagcactaccaggacaaggcaggcatgccagcccgctcaccatgggcaccctgattgcctgccgccccctgccttcaaccgctgtctgttaataacccgcctgcttggcaattcctttcagcttgataaccgtcacaacatggatgcaacaactgctgcgacggtaaatgcacttcggcactcactgagagactgacccacagtccggcaatgcggagtgcgtccctgacggttttgccatgcggcgcatgatctaagatgcacaagctgatgctgtggagcatcacacttctgatgcttcctaccctgtagcaaactttagttgattgcggcagcaatgatacagtctgctcattaaaaaacctgtt

SEQ ID NO: 8384 - DNA, 273 bp, Chlorella sorokiniana
  Clone ID: LIB3602-106-Q1-K1-B5
gcattgggcgcggacgcctgcctcaatagtatagtacacaccacaccagcaccgactggttcgggtgctcacagatgctgggccctgtctacctgcgaacacactgtaccgcgaccgggcgtttctactgcttgggagaagtggaccccctgccgggtactgaatggctggctgtctagggagcaagtgctaaacatctgcaagcacacggggctcagcacctagtctgacttacttaacgcaatactagacaagctttaagctggcactgcg

SEQ ID NO: 8385 - DNA, 407 bp, Chlorella sorokiniana
  unsure (1)..(407): unsure at all n locations; Clone ID: LIB3602-106-Q1-K1-B6
ngagcgagcagcctgggcgcgtccgggcggcctgcggcgactgcgagacctgcgccaaggcgaccaagagtgcatgtctcgcaaccgcatgcggccggctacctgtccttggacggaatgaatggacatgtgaccctgattcagccatgcccactcacttcttatcccagtccacaagcgtctgttcccgtgacagccctaacagccctcccttcggcatgccatgttcggcggcatgccatctgcggcggtcagcacactgcggctacggcagccgctgccgttttactctgagcctctagcctaccgtctgcattttgtgctgctgaatatttgcgttgccgcagcagaatcatgtcacagtcacgccaaacaaaaaaaaaaaaaatataaaaacaaaaaacaac

SEQ ID NO: 8386 - DNA, 581 bp, Chlorella sorokiniana
  Clone ID: LIB3602-106-Q1-K1-B7
ctctatgctgcacagctgtcaaatatgcacccactgtgggctcagcacgagacgtcacaagtcatgctggctatggagcggctgtctgcccgagtgctgggcgcgattactgccccagctctggtgcctggacgcgcactcccccctgactccgctgctcgtgtcgggcatgaaggctctgggcttgcccatcaggctaatgggcctgaaaagccccgaatggatgcacagagaagaggcagcagcgatacttaatatgcgtgctgcgactcatgggcggctacatgaacagcatgagcaacatgctggctccacccctgtctcccgcacacctcgaagagcaacgccggaagcatgatggcacttgcataccagggtgcccactttgtaggcttggactgcgctactctggttgaggttggtcctttacggaaagatgggcgtagagtgatggcaggcattttgctatgccatggaaacaagggaagaggtgcactatgcacagcggcctgttagaagtgcaaaagggcggtgccccatgccttgaccgatccggcagttaatacgcggctctgcctgca

SEQ ID NO: 8387 - DNA, 513 bp, Chlorella sorokiniana
  Clone ID: LIB3602-106-Q1-K1-B9
caccaaccacattgcctgactcaagtgcgggcccccactttttggctacgaccgcatacaatacctgcgcatccaaggccatgcacaacgcccatgccatcggggggaccctgcatgtgcacgtggggctcatgtctgatgctgagggctaccgccaaaaccgccgctcggacggtaccggcctgcaacgctgctaccccggtggaaacttccacctcatgatcctgaatgacgaccctgacaccctggctgaactgaacgtgaaggagatcaacaacgggcgccttgacatgctggccatgtttggcttgttcatccaagccatccagaccggagacgaccccatacaagaacctgaacgaccacctgcgtgacgcctacactaacaacttatacgccctgtactccaaaaacctggcgtaagcacttgttgtacgaacgtacgaggcccaaccgcgcattaggcgctccttgagaagacacacaatcctgtattaccgaactgccgcctgt

SEQ ID NO: 8388 - DNA, 574 bp, Chlorella sorokiniana
  unsure (1)..(574): unsure at all n locations; Clone ID: LIB3602-106-Q1-K1-C1
naaaaaaaaaaaaaaaaaaaaaaaaaaaaaaaaaaaaaaaaaaaaaaaaaaaaaggaaaaaaaaaaaaaaaaaaaaaaaaaaatggcgaacccaataaaaaggaaaaaaatattatttatggtaggcgtacaaaaaattaaattagtttggtccgtaaattggggggggtgcttttttgggggtccctttttcccccccgggtctgtccgcctcttgcctttttttttgttggcccgttggtttatttttggggcggccgtttccgaccgccttgccgggggaccccttggtttcccccttttttgggccttggcctgtttcctctttttcgccccggggctttgttatggatgcgccccccccggtccgttttttttgcacggggcctcgcgcccgttccttttgggtgctccctttttttgggccctttaaccgccggcttttcgtgttttccccccagtgggggctttccttttggggtttttttttagggctttccttttcggtttttccccttttttttttggggggggttggggttttttcccggggggttttttatgggggggtttt

SEQ ID NO: 8389 - DNA, 571 bp, Chlorella sorokiniana
  unsure (1)..(571): unsure at all n locations; Clone ID: LIB3602-106-Q1-K1-C10
ccgcacctcaanacctcagtggttcttcatcatctcctgcggcctgctgctcatcattgctgccggactggtggcccagggcgttgtgttcttcacctccgccggtctatttggcaccaccttcccctacgagtaccgcccctggtacaacaccatcctgtggaacacctcgggctgctgcgacatgtacaacaaccaattctggtccatgatgcgcgcgctgtttggctacacggaccagcccacgggcctcaacctgatgtactacctgctgtactgggctattgtgctgagcatcacgatctggaagtggtacaccggcaccctcaccgaccgccgccaggcccagattgacgacctcaagtcgtttgcagtccacctgggagagcgcatggacgccgacgccggcctggacaagggcaagcagctcaccagcagcagcagcagcggcggccggctcagcagcgacgtggacctcgagcttggcaagggggaagcagtttntgactccgcggaggcgcaggagggtgcttaccaggcaccagacagcgcccctgctgcacctgctgag

SEQ ID NO: 8390 - DNA, 566 bp, Chlorella sorokiniana
  Clone ID: LIB3602-106-Q1-K1-C11
ctcacccgtacgggcaaatttggaccaggggggaagcgtgccgatctatagctccactttggccgtgcgcaccgggacactggccagcgctgccgcctcaaatatgatggcgcagaggaaagggcacacctgggacacagctctggcgcttacctgagcgaaccagaactacttcatatgcgaagacggccggcaacaagggggccaggccgggctcatttccagagggcgagtaagccctgtgcagctaccttcagctgggcctggatgcggccaacgccgctgacagagcggggcaccgcaatcaagggcacgcaacaagtgcgtctaccggaactgtgacaagctgaactgccacatggacccagcaagcgcaccggatactacctggggcctacgctataacactccgaccgtgcaactgatttattgtcaatgctgcggggctaactgtcttgtgcgcatgccactgtgttagcatgagccgctcctagacttgccgctggatctctttctcggtgaatgaacctgcaatgaccttgagattgggaacatgcgacattgct

SEQ ID NO: 8391 - DNA, 440 bp, Chlorella sorokiniana
  unsure (1)..(440): unsure at all n locations; Clone ID: LIB3602-106-Q1-K1-C12
gcgctccgggcgccctcgctggcaccattggggcgcccaactgggctggccagcggtggctagacgcgccgcgctgctgacggggcctgcttgccgcagctgggctggcgctggctgggccttgcctgcaccggcaggcccatcatgtgcagccggcccaggggcatgcagctgcagccaatcaacggggggggggcacacgggggatcggcgctcacccacccacccaccaacagtgacgtatgctacagcgcgcaagagctgcggggcggcccaaccgaagatagcgatcgaccttcacccaacacatatagcccggaggtttccctgagtatcaccaacaggtcgtggcgcacacatcagcaaagacaacgcgcttttgggtatcttggtgcacaanaacacgggcagcgcgctcgcgccgccaggggggaagaacc

SEQ ID NO: 8392 - DNA, 510 bp, Chlorella sorokiniana
  Clone ID: LIB3602-106-Q1-K1-C2
ccacgctgcccttagacaagccttgtggtcctggcgggcaggcgcccaaacgagcggctcacgctaaaagtgcgcacctcggtccttggcgggcccccgcgtggaggcgattcagaacaacagcagcgcaaacgccacctgggctcgggtctacggctgcgcgccgctgcttgagatcaaggcacgcgccaacaatgccacatggctgcaacgcgtggcactacgtgcaggccatggcctggcgcaccggcaaggcctggaagaactgctgtaaggctcaccctacggcggagcgctgagcaccggccactaagccagcggcaatgcagcgggcgtcgcggcctgctgggccggtgccgtagcaacccacttcctctgcggcgcatgatgacgatatagcctgttctatgatgcggcactaattaaaattgtgtggggcggcgctgttctatagacagccaagtttatgaccgtgtgcttgccacacttaagctcttttatagagatacc

SEQ ID NO: 8393 - DNA, 564 bp, Chlorella sorokiniana
  Clone ID: LIB3602-106-Q1-K1-C4
gcctcgctggcgttcggcaccgccgagctgggctccaagtgctgatggtgctgggccacagctcgtgcggcgccgtcgccgccacctggctggcgaggccgaccccggcgtcatctcgtccctctattacaccatctacccggccgccaaggcggcacagcaacatcaacgctgccattgtcgccaacgtcaagcaccagatggcagcagctcaaggtgtcgcccgtgctgcaaggcctggtgaaggtagggcaagctcaagatcgtgggcggcgtgtacgacctgaccaccggtcaaggacctcaatatcgcctaaatgggccccatatgggcgggccgcggtcgaccggagcacacgcagcgcaggagcagtgctcggccggcggcggcggcggcgcgctgacggcgtgctggcgtgcgcattggccagggccgccctctgcttgaatcccttcaagacctctggctctttcatttcctcctctttcatctttccagccaccccttctgccattttcagtacaagctgacgcgccttgatggctcgcggccacagccctctg

SEQ ID NO: 8394 - DNA, 482 bp, Chlorella sorokiniana
  unsure (1)..(482): unsure at all n locations; Clone ID: LIB3602-106-Q1-K1-C5
ggagtccaagtctctggtggacgagctgcgccccgngctgcccgagcgctccaagaggcgcaggtgccctactgcgtgtgcctggcctggtccgccgatggctccaccctgtactccggctacaccgacggtgccatccgcgtgtggcaggtgggccgcgccatctaagcagctggccacggcggtcggtctcagctgccctgcgctgcagcaggtgctgccccagtggcaccccgcacctggctgtggcggcggcggcggcggcctgacgcacggcgcgcggcgcggcgccccccgcggcaggatttgtgacaggccctctgcacatcgaacgctaccatagacggtggaagagctaaagacgggagagtgttctgggcccggtcactgagatgcttgccgcggggtgggtgctcgctttcatgcgctgcggcgcggcgcttgcacctgcgctagtcgccagtgtaacagcccgtgctgca

SEQ ID NO: 8395 - DNA, 571 bp, Chlorella sorokiniana
  unsure (1)..(571): unsure at all n locations; Clone ID: LIB3602-106-Q1-K1-C6
ctgngnccttgnttcccntcgacaaaagctccaacagctccaatccgtatgtgccgaaccaactagctaggcttacacctctacctgcctccctcttgtgcccctccacctccctccccactctgggcacatgcccaccctgcctcgcgcatcctctaagcctcactccccacaccccatgatatttctctcccacacctgctcatgcgtccctcctaccggtgcactgctttcgcgtctccgcaccaagcaggccccatgccctcatcattccacctgcaggctgccctgccgacccgcctcttgtgcccctcttattcttgtttgtcaggccgcgtgttgcgcctcccctgtactctaccgcgctgacccgtcccccttgtgtatcgtagtcgcatagctcgcccttcctttgatttttttcgcactggacgcgctcgcatcggtatcccgccatccctttttcccctgctgttgacgctgacgtggtgatgcgtgcccgctgaagccgctggcacgctggtcatgtgtattcattctgtgaacagtcgacaagtttatgtaacaatgg

SEQ ID NO: 8396 - DNA, 379 bp, Chlorella sorokiniana
  Clone ID: LIB3602-106-Q1-K1-C7
gtactagcggcgaaatgagcagcctcttccccgagccgcccctccgcgcccgctgctgtgtgcatgcctgtcggcgggaggcgcctagctggcagctttaggggaggccgacgagcttgttgaccatgacatggacgacagcgagcaggccgagcagaccgagaggggcggccaccagccgatgcgcaagtggaccccaatacacgtctggcagcggtagagtgcaacgccaccctgagtgtcacttgcataaaatcgtgaggcgccacattgcaaaacccaaacttgaggcagtcggcaattcacgcggtgagcacccctagcagctgccgcgcagcggtaatcgaatgagggaaaaaaaaacaagatgcaattgaaa

SEQ ID NO: 8397 - DNA, 591 bp, Chlorella sorokiniana
  unsure (1)..(591): unsure at all n locations; Clone ID: LIB3602-106-Q1-K1-C8
gtgctttngagcacacatgtgggcatccatcccgggccaacacgtatgaccggcacaggtcaacatgcttgtcgcggcctcgggcgggacgcatggaaccctgggatgagaagccctgaagcccacccctactaggatttcttgcatacagctccatgccttgttcatcccgaccccatcaagtgcacctgaatagatgaccatcagttgcggagccgcgcggcctacctgggctatgtgcgcacactaccaatctaacaatcatcttaaaacgcactatggtgaccgtctatgccggcgcacacaactctgtgtctttacaagactcaactaccgccctgctgttgggcgagcccaaggtcatatgcaacatgctcaatacccagatcttctaaatgctgcacatctaagcgccatccttcacactattgagccgagccgcttatggccgctgctgcaaggcctgcctgcgagcccgcctcactaatagccggcttactgctaccctctcccgccactgctgctgggatctccaacattttgttgcatctgcgctggctgtgccgtcaaacgccactaggactgcttttt

SEQ ID NO: 8398 - DNA, 577 bp, Chlorella sorokiniana
  Clone ID: LIB3602-106-Q1-K1-C9
ggctagtattacaggatggacgagtagctgctcagcgcgggtacgggcctgtgcggctgcgggccggcgtacgtgtttgtcatgatcgaggccctgtccgacggaagcgtgcgtgcgggcctgccccgcgatattgcgcaccagctggcggctcagacgtgctcggcagcgccaagatggtgctaagaaaccggcaagtacccaggcgcgctcaaggacatggtcacttgacccgcatgtaccaccatcgccggcgtgcacgagcttgaaaaggctggcgtgcgggcgggctttattaatgcagtttactcggccacacagcggactgatgagctggccaagctgggcgcttgagccaattttttggacgtttcaggagacacctgcagatgcagcgcttgagcagttttctttgacgcctggagcgttactttggtgcagcacctttgtttgcggttcagcagctggacggatgtgcagcgtggcgcccggcaaagctgaatatgtgagcagttgtggttggggagagaagcggctagcatggcacatgtgcagcactgtacagcgcggcaggcac

SEQ ID NO: 8399 - DNA, 545 bp, Chlorella sorokiniana
  unsure (1)..(545): unsure at all n locations; Clone ID: LIB3602-106-Q1-K1-D1
ggcaatcacgggctgcacgttcacctgtttagccctatgcagctgcacgccgcctctctggcgctggttgactagctttatcgaacactagcgggggcttanagtgctctggggcttccaagcagcggcattgaagatcaaggactttggggactctatttctggccacagcggcgaaaccgaccggttcaactgccaggcagccatggccatcttctgctacctgtattacaacaactacgtgtagtccgccacaacctctgtgtgcgccgccatgagcgccgcgctgaagctgccgccggtgcagtatctggagctgatggagcgcctgtcaaacgtgctggtgggccacaaaatgctgccggtgcggctgggcagcgcgatagcgcagcacacgggcgcgtaactgacggtcggggggtgaccttgggagccccatggagcagccatgcctctctgtctttcttgaatctgctgtgtctctaaccaacactactctgcctgcctagatacccatgcctactcttttgaaactccgtgcatgg

SEQ ID NO: 8400 - DNA, 127 bp, Chlorella sorokiniana
  Clone ID: LIB3602-106-Q1-K1-D10
caaaaaaaaaaaaaaaaaaaaaaaaaaaaaaaaaaaaaaaaaaaaaaaaaaaaaaaaaaaaaaaaaaaaaaaaaaaaaaaaaaaaaaaaaaaaaaaaaaaaaaaaaaaaagggggggcgcgttttaa

SEQ ID NO: 8401 - DNA, 554 bp, Chlorella sorokiniana
  unsure (1)..(554): unsure at all n locations; Clone ID: LIB3602-106-Q1-K1-D11
tccggcctttacctacacgagcacagggcaaccatgaccaagnaacggaggaacggagggcgcaacaagcacggccgcggccacgtcaagcgcgtgcgctgcgagtcgtccgccgccatggtgcccaaggacaaggccatcaagcgcttcatcgtgcgcaacatggtggacgcctcggccatccgcgatctgcaggacgcctgcgccatcgacggctatgcgctgcccaagatctaccgcaaggtctactactgcgtgtctgccgccatccactccaagattgtgcgcgtgcgctccgtcaaggaccgccgcaaccgcgagccgccccgccgccccggctttggcgcccgccccgagcgcaagtgagcgtcggcatggccgcagcagcagcagccgctgaggagcagtgagggcggcgctctgcagccgcgcctcgtcctgcgatgagtcagcaccgcggggccgcccggcgcacggcacgccacccggcaggcagcttatttatgtgcgctgggccgcgcgccggcgccccgtgtaaatcgcgatatgcanaa

SEQ ID NO: 8402 - DNA, 589 bp, Chlorella sorokiniana
  Clone ID: LIB3602-106-Q1-K1-D12
cgcgctccgctagtttaaatcgccgacggccgccctttttttgtggttttttttttgcgagggacctgttaccagattggcaagcacaacgagtgcactagcatgctgccaaactgctgggggggtgcttagctggcgggtgccgtcgcgcgggtgtaaatctgctgcgcgcgggtcttgggcacctgggggaatcagccccttgcccagcagctccttgatggcggcgcgcgccaggctgccgttgatccgcaggcgggcggacagcaccgagggagtgatcatcttgtacttgggcacctcagtgagcagcttctcataggtggccttgtcgaagaggaccaggttgttcaccttctccttcagcttgcccttggaccatttcttcttcgggccctggcatgttccctcctggacctggcggccccggaggacctggcgggcctggcggtaagggcggggaccgcggcgatgactgaggggccccttggcactggacggcaccctgcagcggttcacgggcgggacaaccttgatggggggtctgctgagctgcggggtgcacgggccgtgcggcgtcacagcgggg

SEQ ID NO: 8403 - DNA, 569 bp, Chlorella sorokiniana
  unsure (1)..(569): unsure at all n locations; Clone ID: LIB3602-106-Q1-K1-D2
ggnccggcggcgggcagcagcggccaaggggcggntcagcagctgcagtggcacgccgcaggccgccgccgtgccagcttgcgcggaaaagcgaccgcggctgcagccgagcgcaaggccgcggcggcagaggcggcgcagcaggcggccagcgccgctgtgcgtgctgaggccgctgtgcggtcgcggcagcgtgcgcagcagaagctgtctgaggctctggagagggctcgcgcctccaccctcgcctcggccacagccgctgcactctctgcacccgccacccctgagcagccacgcggtggccctgccggtgcggccgtcgcatcgccagagctgtccccctcccaagcggcggcagcggcacttgaggcggcgcaggcgcgctttggcgacggcagcggcgtgactgtcgctcagatcaagaaagtgtggctggagtttgccggtttcggcaagaaggcgggcagcgacgccgcgctgcgcatggagtcggcactgtttgtcaaactttgcaaggagtgctacctggtcaacgaccggctgactgtggcgccagtcgaccttgc

SEQ ID NO: 8404 - DNA, 404 bp, Chlorella sorokiniana
  unsure (1)..(404): unsure at all n locations; Clone ID: LIB3602-106-Q1-K1-D3
gttctagnatcgcgacggccgctcgcngactanacgttgngagcggcgccttgccctccctgctgcgttggattatcattatcctcccgccgtgcatgccctctgctctccaccttgctagcgcccccgccccgccgcagttttgcgtcgtcccctcacatttcgttcgcccccgttcgcctcattcatttggttctgtccccccccctcctccccccacacaccccgttgtctgtactgctgctgccccctgcctnaccaacgaacgcccgacggcgtgcggtggcggcgtgggcgcggcatcccgccgctccgctcctgagaagactcccctcccccaccccaccccgnacttggnagcacttttctgcggnctggggngggcgtgccctgcctgctcggtt

SEQ ID NO: 8405 - DNA, 533 bp, Chlorella sorokiniana
  unsure (1)..(533): unsure at all n locations; Clone ID: LIB3602-106-Q1-K1-D4
ggnagccttcaggctgagagggaggcgtaaactcgtcacctggtggccgccaagaagacaanaggctcaggagagcatcaactcccgcctggcgctggtgatgaagtcgggcaagtacacgctgggctacaagaccacgctcaagacgctgcgctccggcaaggccaagctggtgatcatctccaacaactgccccgccgtgcgcaagtcggagatcgagtactacgccatgctgtccaagaccggcgtgcaccactacaccggcaacaacgtggacctgggtaccgcgtgcggcaagctgcaccgcgtgtccgtgctgaccgtcaccgaccccggagactctgacattgtgtccggcatgtaagcggcgcagcatggcatgcgtacccgggcgctgtctgagctgggactgcccctgtataagaaacagaggacaaaaaaaaaaaaaaaaaaaaaaaaaaaaaaaaaaaaaaaaaagaaaaaaaagaaaaaaaagaagaaaggagaaaagagaaaggaagggggggcggttt

SEQ ID NO: 8406 - DNA, 52 bp, Chlorella sorokiniana
  unsure (1)..(52): unsure at all n locations; Clone ID: LIB3602-106-Q1-K1-D5
naaaaaaaaaaaaaaaaaaaaaaaaaaaaaaaaaaaaaaaaaaagaaaaggg

SEQ ID NO: 8407 - DNA, 589 bp, Chlorella sorokiniana
  Clone ID: LIB3602-106-Q1-K1-D7
gcgcacgaataggtggcgttggctctattatgtgctgcttgcaacgggtcatgtgaggagaagagacatctggtgcgagggctggacgcggtcgcgctggccgccatacatgtgcatggtgaaaagacgcgggcaaggtacgcctgccacctgcgcgtgcgcgtgcaccccttccacgtgctgtgcatcaacaagatggtttccagcgccgacgacaaaaggctgcacacaggcatgcgcggggcattagcgaagccatttgctgtgtgcgcacgcgtgggcatccggtcatgatccgtgctgccccatcacgctgcaaggacacccacgctggggctgcctgagaggacctccgctataccaagttaagttccccgggcgccacaagatacatgctagcaggaactggggcttcactccctacctgcgcgacgattacttggagtggaagcgtgagggccgccttgtgaacgacggtgtgaatgccaagctgtttggcaaccacgggaccttagacgcacggcgactccggaccagattctcgagggtcctgcccgtctgtggcttgagccagtgcatgcctaaaatg

SEQ ID NO: 8408 - DNA, 508 bp, Chlorella sorokiniana
  unsure (1)..(508): unsure at all n locations; Clone ID: LIB3602-106-Q1-K1-D8
ggngcgacggntcctgntatccagcgggcagcaggcggcggcgggctgggtcaagagaggcagaagagagtgaccaagagagcgagccccgcagcagcagcggcagcagcagtgctgcatcgctgggcggcggcggcggcggcggcgaccccagtgccatgcaccgcgcgcagcaggcgcggtggcagcagcagcggcggcgcacacgcctgacggagagcgactatcgagacggggcgggcatctgagcagcgggggctgagctgctggagctgccctgctctttcgtggcagcgctgccttctgtttctgcccgtctggttgctgcccggctgcgctcctgcaagcgctgcgtgttgtatgtgcagcgtgcccttgagctggctcgctgtttgtgcctttgtgtgcggctgtcctgcccctgtggccgcgttttcgcaaaattttctgtcggctcccgctgggacgcgtggcccaattcctcatgttctgtaagcacctcggcttc

SEQ ID NO: 8409 - DNA, 73 bp, Chlorella sorokiniana; identical to SEQ ID NO: 3260
  unsure (1)..(73): unsure at all n locations; Clone ID: LIB3602-106-Q1-K1-D9

SEQ ID NO: 8410 - DNA, 580 bp, Chlorella sorokiniana
  unsure (1)..(580): unsure at all n locations; Clone ID: LIB3602-106-Q1-K1-E10
gtccaggtggnacagnactacgcgctggtgcccatggagcagcagtttgccgtcatctacaacgtgctgcgccggcacgccgaggagacgcccgaccacaaggtcattgtgttcttcaccaccgcgcggctgacgcagtacatggcagcactcatcgacgccgccggcctgccggtgctggaaatccactcccgcaagagccagtcggcgcgtngaaaaagcatcggcgcagttccgcaccgctcgctcagccatcatgttttcgtcggatgtgtcggcccgaggtgtcgactaccccgacgtcacgctggtgctgcagatcggcgtgccctcgtcccgcgagcagtacatccaccgcctgggccgtaccgcccgcgctgggcgcaccggccgtggcgtgctgctgctgatgcccgaggagcagcacttcctgcgccagctgcgcgacctgccgctggccgctgagtcggccctgcccatcacccagcaggacaatgccgctgtgcaggcggcgctggggcgcgtcattcgcgaccatgaccgcctgcctgaaatggcctatgcggcctggctgggcttc

SEQ ID NO: 8411 - DNA, 573 bp, Chlorella sorokiniana
  unsure (1)..(573): unsure at all n locations; Clone ID: LIB3602-106-Q1-K1-E11
cccgcgccgccgtcgnattctacggccccgtccgcgccaatggctgggccccttctccgagggctccgtcccctcctaccgtgagggcgagttccccggtgactatggctgggacaccgccggcctgtctgccgaccccgagaccttcgcgcgctaccgcgagattgaggtcatccacgcccgctgggccatgctcggcgccctgggctgcctgacccccgagctgctgcagaacaacggcgccgctgacttcggcgaggcggccgtctggttcaaagccggcgcttcgatcttcaacgaggacggcctgaactacctgggcaacccctccctgatccacgcccagtccatcgtggctgtgctgctgacccagctggtgatcatgggcgccgccgaggcgtaccgctacagcggcgagggccccgtggagaccagcggcgactccctgtaccccggcggcttcttcgaccccctgggtctggctgacgaccccgacaccctggctgagctgaaggtgaaggagatcaagaacggncgcctcgccatgttctccgtgttcggcttcttcgtgca

SEQ ID NO: 8412 - DNA, 93 bp, Chlorella sorokiniana
  unsure (1)..(93): unsure at all n locations; Clone ID: LIB3602-106-Q1-K1-E12
aaaaaaaaaaaaaaagaaagaaggggggggaaaaaaaaaaaaaaaaaaaaaaaaaaaaaaaaaaaaaaaaaaaaaggggggggcggctttnaa

SEQ ID NO: 8413 - DNA, 202 bp, Chlorella sorokiniana
  unsure (1)..(202): unsure at all n locations; Clone ID: LIB3602-106-Q1-K1-E2
ngatgtactcccttccctgctgcattagcacctgccccctctgctccttgttcctgcttcatgttcgacatccaatccccaaacaaatgctctcgctcgatactcgctcccgtcagatgacctcgccaacactgcctcctcgttctttcattaatcctgcccggcctgcgcggcccatgccccttgtaaatgctgataggtg

SEQ ID NO: 8414 - DNA, 237 bp, Chlorella sorokiniana
  Clone ID: LIB3602-106-Q1-K1-E3
ccccgctggccagcagtatgctagcggttgtgagcaaacccccctcgggtgcgccagctgccagcagcccataaccctggctggcacggtaaaggagcggcgccccggatgccccttttagcgaatcctgcatgcagactcatcccccgtgcttgcactggatctggccgtatgtgtatgcctttgctttagttgtatatattgtatgctaccgttgtatgtaagtgcatgcgtgtt

SEQ ID NO: 8415 - DNA, 575 bp, Chlorella sorokiniana
  unsure (1)..(575): unsure at all n locations; Clone ID: LIB3602-106-Q1-K1-E4
ngttctanatcgcgacggccgctcgcgatctagnactagtcgcgcgtgcccatcgtgtgcacgggcaacgacttctccaccctgtacgcccccctgatccgcgatggccgcatggnagaagtactactggaacccgactcgcgaggaccgcatcggcgtgtgcatgggcatcttccagaacgacaacgtgagccgcgctgacgtagagacgctggtggatgccttccccggccagtccatcgactttttcggtgcgctgcgcgcccgcgtctacgacgacaaggtgcgcgaatggattggcggcatcggcgtggagaacatgggcaagcggctggtgaacagcaaggagggcaaggttgagttcgacaagccctccatgcccctgtccacgctcatgcactatggcaacctgctggttgaggagcaggaaaacgtgaagcgtgtgcagctggcggacgagtacatgagcggcgcggccctggcgggcgccagcggcagcagcctgcccgagggctaccgcgctcggtagagagttcaagccaatgtcattattggcgttcgcgccatgctgcacc

SEQ ID NO: 8416 - DNA, 364 bp, Chlorella sorokiniana
  Clone ID: LIB3602-106-Q1-K1-E6
ctcgtttacatcaatccctgctaaccactaagttaccccggcagtctctactccctctgtctctcttgattatcctgctggcttgctcctacatgcacgaggcgctgctgcaacgccactccacactgcctagcaaattatgcattctgcggtagcctgaattttatgctgaccttgcttgccacttgtctcagactgtgcctgcacctgctgcacgccagtcggtacttgttgatgaccttgcataaaaaaaaaaaaaaaaaaaaaaaaaaaaaaaaaaaaaaaaaaaaaaaaaaaaaaaaaaaaaaaaaaaaaaaaaaaaaaaaaaaaaaaaaaaaaaagggggggcccgttttaaaagaac

SEQ ID NO: 8417 - DNA, 490 bp, Chlorella sorokiniana
  unsure (1)..(490): unsure at all n locations; Clone ID: LIB3602-106-Q1-K1-E7
gnctagttctagntcgcgnacggccgccctttttttttttttttttaacataccatttgttacacatttaagtcctggtaccagatcggcataaggacgcaaaaggcactgtacagtcgggccttgaaatgggtctggatacgttggacgtgtgggtgagtgggtgtgcgagcatgatggatgggtttggcagcagctttgcatggcatcagccgctgtgtgaagcgcgggtgaagggtggacatggagtgaggtgtgggaggtaagatgtgcggcggtgagcggaaggaaaggtggcgggtggaagatgggttcgggtgagggggcggcaggtggtgcagcggcggacgtgcctttggggtggcagatttggtggatggggaggatggtgcatggagggcgttgagcgggtgatgggtggtgagtggatggcaaaggttgtggnggagggaaagtaagtggatgggtggnatgtggatgggttgggtta

SEQ ID NO: 8418 - DNA, 517 bp, Chlorella sorokiniana
  Clone ID: LIB3602-106-Q1-K1-E8
taaaaaaaaaaaaaaaaaaaaaaaaaaaaaaaaaaaaaaaaaaaaaaaaaaaaaaaaaaaaaaaaaaaaaaaaaaaaaaaaaaaacaaaaaaaataaaaaaaaagggggcgctggggtgggtcgttccttcgggtttcccgttttgcctccccgttgctttccgcttttttttggtgtttttctcccggtccctttcggtgcgttgctcccgtggccctccgttttccccctgttggggcccccgggctgaccccccgggtttaccccggctttttgccccttcttccccctttccccctttgggccggttggggaaagggggcccccgccccgcccttttcccctttccccccgtttgcggggctttttggccccgtggccctcccctttttcatgccctttggccccggtgtttttcctttttccccccctctttccctttaccctccccttgccccttgcccccttttttttccttttttccccttccttttcggccgcttccccccgctttcc

SEQ ID NO: 8419 - DNA, 571 bp, Chlorella sorokiniana
  Clone ID: LIB3602-106-Q1-K1-F1
cgcatagcgggcttcacgttcacctgtctgcccatgcagctgcacgcggtctcgctggcgctgtttgcctcctttatcgcaccctttggcggcttctttgcttcgggcttcaagcgcggcttcaagatcaaggactttggggactcgattcctggccacggcggcgtcaccgaccgcttcgactgccaggtcgtcatggccatcttctgctacgtgtattacaacaactacgtgtcgcccgccacaacctctgtgtccgccgtcatgagcgccgcgctgaagctgccgccgctgcagcagctggagctgctggagcgcctgtcaaacgtgctggtgggccacgaaatgctgccggcgcggctgggcagcgcgatagcgcagcacacgggcgcgtcgctgacgggcggggggtgaccttgggagccccatggtgcagccatgcctctctctctttcttgaatctgctgtgtctctcgcccacgctctctccctgcctcgatacccattcctacccttttgaactcgcgtgcatggccgccgattttccgctgggcgtggcgccgctgtaaac

SEQ ID NO: 8420 - DNA, 583 bp, Chlorella sorokiniana
  Clone ID: LIB3602-106-Q1-K1-F10
ctttgtgctcgaccgcttgcattgcctcttgtcctcactccgcccgcctgtgacacgcccgtcgtgtggctgaccagtgaatgggactgggagcatcgcggctgacacccgaagccatgagcgcggccaagcagctggtggacagcacgatcagcgggaacaaggtggtcatctttagcaagacctactgcccttactgcgtgaagggcaagcgggcgctggagaagttcctgcccaagtccaaaatcaccgcgattgagctggatgggcgcaacgatggagcggcgatccaagactacctgctggagctcacgggcggccgcagcgtgccgcgcgtcttcatcgatggccagttcatcgggggcggcgacgacactgacgcgctggcccgcaacggcaagctggaggtgatgctgcgcaatgccggcgtgctctgagcagcaggaaccaattggcagctgttgatacacagagcgcactttgcacgggtgattgcctggttgcctgttgcctcacttgcatgtcaagaccttcaaaaggaccagctgctgttacacactcggcttttgtgacgaaaacaaag

SEQ ID NO: 8421 - DNA, 555 bp, Chlorella sorokiniana
  Clone ID: LIB3602-106-Q1-K1-F11
gccctgtctgctacccacccgctccctgccgagctcgtttcgcatcccttgcacccccgcctgcctcgggacgcaccctcccttcctgggcctcgggcctgtctcgcaccctcctacctgggcccttggccctgtctgctacgaccccacccgctgccgcactgcggcgcaccctgcgccttccccgcaccgacttgcactttggccctcttgctttggccgcccattgcctgccgtgccccgcccgcccgcctcatggggcgctccatgcagctcacatccccctggcaggctggctgagcgcttaggctggtcggctgctgcccgttggcctctttgctctcggttttgctccctttgcttccacaacccgcttgcagcaacgttgctcgtgcactgctcccagcagttgggggtgctcaacgatggggtcacccgggacacccgacctccgatgttgttgtttcattccagcattgcatgcccacgttgtgttgtttccagagccagtcagcctgtggaccaggcccagcctctggaacccaagcaagccgg

SEQ ID NO: 8422 - DNA, 441 bp, Chlorella sorokiniana
  unsure (1)..(441): unsure at all n locations; Clone ID: LIB3602-106-Q1-K1-F12
ctgggcggccgcctggggaggaggggggcgaccgaccgcgatcgctacatgtggccgctgggggcccaggcgtacggcctgattgaccacattgtgggcggcgaggaggccgtgttcaagattgagggctccacccgcgccttccccaagaccaaggagcantacgtgagacgggggggacgaggacttcatggacggcagccgcggcagcaggtttgtgaagccgctggagccgcataccgagaaggtgtccaccagcaagcagtgagccgtgggcgtggcgcctacggcaccgctacattctgcttcttctctccgcgcttcttctccttgccttcgtgcgacactgtccagctgctccctgtaactcattcactagcanaaaaaaaaaaaaaaaaagagaaaaaaaaaaaaaagaaaaaagaaaaaggaggggggggc

SEQ ID NO: 8423 - DNA, 575 bp, Chlorella sorokiniana
  unsure (1)..(575): unsure at all n locations; Clone ID: LIB3602-106-Q1-K1-F2
cagcgaggggngagaggggctgggcggcgtggcagggctggagccgctggccagcagcgaggatcaaggactgacaggcccgcgctacacgctcaggtgcggctgcagcaagcttggaaatgaacttaagcaagggtttgtgaaggcggttggcaggggcagggctggagccgctggcgagcagcgaggaccagggattgacggggccgcgcttcacactcaggtgcggctgcagcaagcttggaaataaacctttgcagtggcagggaagggtggttgcaaggggccaggacgcgtggttggcgttgcaggagaggtgtgggactgccatgctgtgctggcaatgctgccctgagtggggatgttgtattcagccaccaagttcactggcacatgcactggtgcacatgaactgagacccaactcattgcgcccctgcagtgacgaccatcctgatcgccgccctggctgtggttgcttgcacgagaccaggtgcctgttgtgtttcactaactaactaagttccacctcaatctgtccctgcagcgacgaccaccccgagtcgccgcccatcg

SEQ ID NO: 8424 - DNA, 533 bp, Chlorella sorokiniana
  unsure (1)..(533): unsure at all n locations; Clone ID: LIB3602-106-Q1-K1-F3
cggncgcgtgggattgccagccggctgagcggcccgaccgcaaccggcgccgcgggcggcagctggcagcctgacttgaaaccccncaaacccacacccaccctgatgcaagctgaggctccttccgctcccttccgtgttggtgctccccaattttgctggtaccacgtgcattgctctgcaagccgcttttccactccctgcgcctcgccgaatgttgggggcagcccacgtgttatatactttcagccaaaaaaaaaaaaaaaaaaaaaaaaaaaaaaaaaaaaaaaaaaaaaaaaaaaaaaaaaaaaaaaaaaaaaaaaaaaaaaaaaaaaaaaaaaaaaaaaaaaaaaaaaaaaaaaagggggggcccttttaaaaaaaccaaatttaattacccgtgcttgcaaagtaaaaattttttttttggggcccctaaattaaattcacgggccggggtttaaaaaagctgggactggaaaaaccctggggttccccaatttaatgcccttggaaaaaatcccctttttccc

SEQ ID NO: 8425 - DNA, 482 bp, Chlorella sorokiniana
  unsure (1)..(482): unsure at all n locations; Clone ID: LIB3602-106-Q1-K1-F5
cttgcctgtnagtgaaggtaagtctcaccatgggcaagtgcggcaagggcacgggcagctttggcctgcgccacaccaagacgcacacgctgtgccgccgctgcggccgccgctccttccacatccagaagagcacctgcggctcgtgcggctaccccgcggccaagatccggaagtacaactggagcgtgaaggccatcggccgcaagaccaccggcaccggccgcatgcgccnacctgaagaacgtgcagcgccgcttccgcaacggcttccgcgagggctctgctgccaagaagatcgctgcctaaacagctggtgtctgcagctacgcggcagcacgttgagccagctgtgtagcaggatgtaacaccgcgacacacaaaaaaaaaaaaaaaaaaaaaaaaaaaaaaaaaaaaaaaaaaaaaaaaaaaaaaaaaaaaaaaaaaaaaaaaaaaaaaaaaaaggggcgngccgtttttaa

SEQ ID NO: 8426 - DNA, 395 bp, Chlorella sorokiniana
  unsure (1)..(395): unsure at all n locations; Clone ID: LIB3602-106-Q1-K1-F6
ggctgacaagcactcgccgctggnagtgccggccgtggnagccagcagcaagctgctgattggcgccagcgtggcggccaccgctgcggcagccctctactctatctgaggttgcctaggcgtgagcactccatgcatgttcactggtgtcgggcatgccatcacttcactaagacacccccagaaacgaaccctcagccacccgtgtgcgagggcactttgatgccagactgcagggcggacggcaacaggcagctgagctgccgccgttgctggcccctgttggcaccttcgttgctgcgccctcctgttctccagctgaagttttccgcctgccgcttgtaattcacgccgcatggatgcggcaggcggcctatgtgtaaacgtctagatat

SEQ ID NO: 8427 - DNA, 579 bp, Chlorella sorokiniana
  unsure (1)..(579): unsure at all n locations; Clone ID: LIB3602-106-Q1-K1-F7
gcgccaanaagcgggcgtggncttcttccctcactgcgtccacctggtcagctgggagaagagacatctcgtccgaggcgctggaggcggcccgcatcgcggccaacaagtacatggtgaagaacgcgggcaaggacgccttccacctgcgcgtccgtgtgcaccccttccacgtgctgcgcatcaacaagatgctttcgtgcgccggcgcagacaggctgcagacaggcatgcgcggtgcgttcggcaagccatttggtgtgtgcgcgcgcgtgggcatcggtcagatcctgctgtccatccgctgcaaggacacgcacgctgcggtggcggaggaggccctccgtcgtgccaagtttaagttccccgggcgccagaagatcgtggctagcaggaactggggcttcactccctacctgcgcgacgattacttggagtggaagcgtgagggccgccttgtgaacgacggtgtgaatgccaagctgcttggcaaccacggcccgctggacgcacgggagcccggccagattttcgagggtcctgcccgtctgtggcgtgtgccggtgcatgcctaacatg

SEQ ID NO: 8428 - DNA, 572 bp, Chlorella sorokiniana
  Clone ID: LIB3602-106-Q1-K1-F8
gccacaccacgctggcgcgcctgctcacttccgcgggcgtttgtgcagcgagtattcactctgtctgccacgtgaccctgggcccccctgctgcagttggagcagctgactgtggagggtcagagcgactatcgcgacatcccacccgtgctccatccccgcacgctgggttcgggggacgctgcgctggatgcggcggcagccgcggcagccgcgatgccggtgggcagcgtagctgagcaggtggctgccgcggggcagcttgcggtcgcgctggcgcggcaccgccgcttccggcgcttgtgcctgctcccggcagagctgtttagcctgtatgatgaggtctgcctggtggacccgctcgcctgctggctggcgctgcgcctgtcgcgcctgaacccccagctggacgtggacgtctgcttcgataagcagctgtcataaggttgccttgaccaaaatagtgcatggaaggaactactggtagcaggcttcctctgcccacccagcccacatgacgccgtgaatgtatgtatggggcgtccttgctatttcacggctcatgcccagtc

SEQ ID NO: 8429 - DNA, 399 bp, Chlorella sorokiniana
  Clone ID: LIB3602-106-Q1-K1-G10
gccagcttaagcagcagtgcttcttccccgaatgtccatgaggcctttatcggcgccctgctgacctgcctgtattccttactatcttgtgcctggccccctgtcccctatatgaatgaggaactgagctgcttgatcccaatagggtgctcaggggcacggaaacacagcgggggcaaaagaaaacctaacaacaaaaaaaaacacataataactaaccacctaaaaaagaaaaaaaggaccaaaaagaaggacaaaaaaaaaaaaagaagaaaggaaaggagggggggtccttctaaagaacccaattttatggacgcgccctagcaaccacaaaggactataatgggggcgcataaattaaagtcggggcgcccggtttaaaaaggttgctgaagg

SEQ ID NO: 8430 - DNA, 595 bp, Chlorella sorokiniana
  Clone ID: LIB3602-106-Q1-K1-G11
ctccggcaccccagctctgaaacacaaaataactgcagccagggacagaactgtacaactgacctggaccgacggccgacgagcaggcagcagcagcagcccagctgacgtggcggaaccgggtgggcctggcggttgatgcacctagctgggctgctgtacctgcacaggcggagcatttttcattggggcgtgaagagccccaatctggtggcggacgagcactttcgcgtgaagggggaaaacttcaacctgtccaagctgatcgagggggcacggacccaggcctgcctcaccagggcagcggccacaaagcctatctggctggcccctttagtgctttcgggcggcagggcgacggcaaggcagcgaccccttcagctgtggctctaatcccggtggagctggtgacctgccgcttggcctgcacttttgtccacagtcccctattccgattggctccacattcatgccgggcgttgcggccggaggtgccccctttccaagcgctggccggacctgacactgccatttggggtggcttggacgcctacttgcggctgatgcggcactagtgggcgcatcggcctggggc

SEQ ID NO: 8431 - DNA, 555 bp, Chlorella sorokiniana
  Clone ID: LIB3602-106-Q1-K1-G12
tccggccccgtgctcctcaataccactcacaacagggggggcgtggcctccgccctgtgcgccgaccccgctctgcgggtgaactccctgcgcgtgcagggggcccgcccccgagccgtgcgcgctgacgaggaggggcgcgccgctcaagacaaggggcaaatgggccatcccgtgagcggggagcccttcatcggcatgctggagacccccctgacctcctcccccggcatcgcttgggacctgtgcaacctccccgcctaccgcaccggagtgtcccccctgctgcgcggcgtggagattggcctggcgcacggcttcctgctggtgggccccttcatcaagctgggccccctgcgcaacgtggagaacgtctctgagattgagggctgcatcaacggcgccgccacggtgctgatcctgaccctgtgcctggctgactaccgcgcggtcaccttccagggcgagggcccccaggggggcgtgaagaccctgtctggacgcagcatcccccgcgaccccctgcagtctgctgagggctggaacaagttcacc

SEQ ID NO: 8432 - DNA, 573 bp, Chlorella sorokiniana
  unsure (1)..(573): unsure at all n locations; Clone ID: LIB3602-106-Q1-K1-G2
ggncgacgaggtgtctgtcgtgcgcggcacctacaagggccgcgagggcaaggtggtccaggtgtaccgcaagagtgggtgatccacatcgagcgcatcacccgcgagaaggtcaacggcgccaccgtgaacgtgggcgtggacccctccaagtggtggtcaccaagctgaagctggacaaggaccggcgccagctgctggagcgcaagcgcgcgggcaagggcctggccgacaagggcaagttcacggaggcggaggtggcggccatggagaacgtggactaagcgccacgcccaccccgcagcagccagcagcagcagcagtgttgaggccgcgggcgggccaccgacgccagtgcggctcgggtggcggcggcccgacggccccggtgggggcagcctctccgtgtggctgtgcgctccaccggcagcggcgcagcctcggcagcgcttggaagcatggaggctcgagaggcccttgctccggcgcggcccagcggcgcttgctttcatgcagcggttctgccgcagcgcgtcacacggngggcgctggcgcgcagtttgcacccttctt

SEQ ID NO: 8433 - DNA, 573 bp, Chlorella sorokiniana
  unsure (1)..(573): unsure at all n locations; Clone ID: LIB3602-106-Q1-K1-G3
ggnaaagnattactgatgctgaggtgacgcgggnagagaggaggtgcgggacgcgctgcaggccaaggctgagtttttgtgcagcatcggcgaccatgcagcagcggtggaggcgttcaaagcggcggaggccaagactgcgggggtggggcccaagatggacctctgcttttcgcagatcaggctggagctcagccgcggcgacctgcaggcagtgaaggctgagctcgagcgggcaaaggtgttgtgcggcaagggcggcgactgggagcgcaagaacaagctcaaggtgtacgaggcggtgctgcgcatggccagccgccagttcaagcgcgctgctgagctgctgctggacgccatcgccaccttcaccagcggcgagctgatgccgtacgagcgctgcatcttctacaccgtggtgctggcggtggtggccctggaccgccccacgctgaagagcaaggtcatcgactcgcccgaggtgctgtcggtgatcgactcgctgccccacctgcgcccctttgtctcctccctctacgactgccgctacgcagccttcttccaggcgtttgc

SEQ ID NO: 8434 - DNA, 556 bp, Chlorella sorokiniana
  unsure (1)..(556): unsure at all n locations; Clone ID: LIB3602-106-Q1-K1-G4
tggccctcctgtcgatacgtacgatcgtgccccactcactttgactacttacccttgcttgcgcacacactttcagcgatactgctcccccgcctgtacagtagcaaaccaacctgcagaggcctgtagcttttttgccctgcatgctccgtaccctccgatgtgttccatccctccgggcacagtccgccccggcaaatttttgacgtctgtccgatgattgagccctctgatccggccatcaggtccatccctctagcggcaactgctgccgccgccgccgccgcctccacccatggttgattgatacacttcacagctgggtagcggtgctccttgcgcccttggtggccacccatgccttccgaatcccttcttacccctttgtcagctccctttgcaagcatcttcccgcttattgcccactcagtgtactctactatgcctgccctccgtgacccctcgctgccggccggnagncaccctgcaccactgcctaaacgttttggttcatgcaataaagcactatggatgtgctgaggctgtaaagaacact

SEQ ID NO: 8435 - DNA, 432 bp, Chlorella sorokiniana
  unsure (1)..(432): unsure at all n locations; Clone ID: LIB3602-106-Q1-K1-G5
gtgcatcaagcgcggncaaaccccgtgcccggcctgcaccggcgccccgggcaactgagtgcccgacactgttggcgtcccgtgttactacttgctttggctgatgggggcggctcggtgtggcgcaaccggaccggtgggcaggcagcggggctgtcctgcatcctgctggcgttgctgcctcgcctaggccacctctgtccctttctgctgtcgttgtttctgctgctcctcttcctgcctcctgcccctcgatgctcccacaaatgcgcggcctgaggccgctccctagcctgcggcgagggcggagccgtcaatacctgtaaaagctaagggccacaaaaaaaaaaaaaaaaaaaaaaaaaaaaaaaaaaaaaaaaaaaaaaaaaaaaaaaaaaaaaaaaaaaaaaaaaaggggcgggccgttttaaa

SEQ ID NO: 8436 - DNA, 408 bp, Chlorella sorokiniana
  Clone ID: LIB3602-106-Q1-K1-G6
cacggtcaggcggcggtgtatggcggctggttccgccccagccccaagcccaagacgcaggggcagcagtgaggcggggcacggcgcacaacagccctggccacggcggctcgcaagctggcttgccagccccacagcggcagggcaggtagcctcgctccatcttggcaccagcccggctggcagcggcacgcgctcaaagcagcacagcaaatgatgaccaggcgggatgccaacctcacagtagcgtgtgtttccagttttgatgctcggtttttggaacccagatttttcccactgctcctctcagcccgactcagcccatctgacttgcacccctgcatgctttctggccctgacccatgctcctcggtccatttcattgacacctagcgacttgttacacgc

SEQ ID NO: 8437 - DNA, 570 bp, Chlorella sorokiniana
  unsure (1)..(570): unsure at all n locations; Clone ID: LIB3602-106-Q1-K1-G7
naggnatttgcgcttgacagnagtgagcgctgcgcgcgctgtggttggtgccagccgctgtgactgtcctgcaccagctgcacgcatgggcgggcgcggtccgaaagatgtgctgcctgccagctgaaggcacggagttgtgcaacctgccgcagtgtgcatgcttgacagcctaacaggccaatatgctcccctacctcgtgcctgcagccgcggcgatgctgcttatctgcgggcgctcaaggaaatgatgcacggcgatatgtgagctcgcagcagcctcgttaggccatttgcacgggaggtatgggtttctttagcccttctgcctactatttgcctcgcgtgctccttgcgatgcgctgcctgtgtgtgccccgtgtcgtgccgtgttttcccccatcccactgtccctgtcccccatcgtcgcactacccttgctgctgcgcattcattcgatctatcgcacccccgccggatgcacgttttgatgtaccatccatctgccgctagcgccctgcactgcaatttcgcttccatttggttggcctgcacatttgccagcccgct

SEQ ID NO: 8438 - DNA, 404 bp, Chlorella sorokiniana
  Clone ID: LIB3602-106-Q1-K1-G8
cccacgcgtgcggcgacgcctacggaacatggacacggtagactgagcttctggcggtgcttgctgtggcgcaacgctctacacgaccgctcaacaggcggcgctgaccgacctgctgagagacctgccacgagtagaaggcatacgagcaaagtgcacaagccagtatacacaccgccttacacagtgccatgactgatcccaccactgacccactgcagacgaaagtgcaaacgctggcataatctgtgtcatcctgtgcctgtgccactgtcccaaggcctgaattacgccatgaattacaaaaaaaaaaaaaaaaaaaaaaaaaaaaaaaaaaaaaaaaaaaaaaaaaaaaaaaaaaaaaaaaaaaaaaaaaaaaaaaaaaaaaaaaaaaaaaagggggg

SEQ ID NO: 8439 - DNA, 418 bp, Chlorella sorokiniana
  unsure (1)..(418): unsure at all n locations; Clone ID: LIB3602-106-Q1-K1-G9
cggcgacatggtcatggcgaccgtgcaataaggcaagcccggcctgcgcaagaggtcatgcccgcgattgtggtgcggcagcgcaaggcgttccggcgngaggacggcacctacatctactttgaggacaacgcgggcgtgattgtcaacaccaagggcgagcagaagggctccgcgatcaccggccccgtggccaaggagtgcgccgacctctggccccgtgtggcggcagcagccaacaccattgtgtagagcggcggccgtccggctgggcgtcgcggcagcgcggaccacacttgcagtaacccacctgcctgccgctgctcccgngcgcagccatgactgtcaatgtcacattccagctgaaaaaaaaaaaatatacattaatagaaactgcattaaaagtaaatacgatcac

SEQ ID NO: 8440 - DNA, 402 bp, Chlorella sorokiniana
  unsure (1)..(402): unsure at all n locations; Clone ID: LIB3602-106-Q1-K1-H1
naaccccgtggngcatcccccggtggtggntaaccaccagcacattggccacgcgtccaccgtgcgccgcgacgcgccccccggccagaaggtcggactcatcgccgcccgccggacaggccgcatccgcggtaccgccatggtcaagcccgacaaggagtaagcggctggccgcctggctggtgcagctgctcagcgggcgccccctcgctagggcgcccgcgctcccgccggcgcggccgctcgcgcggccagcgccgggggaggcagcgcagcgcccccgccgcgcttcgcagcgccggcggcgggcctgcaagcggcggcggccgcgcgcgcgagggcgcggcggctggcgccggcggnnggaggcggcangngccgcggctggcccagccgcgggac

SEQ ID NO: 8441 - DNA, 412 bp, Chlorella sorokiniana
  unsure (1)..(412): unsure at all n locations; Clone ID: LIB3602-106-Q1-K1-H10
agtctccgctgaccctgccgcacccaaaactgtatgagggcgattggcatcaagccgcccaaggcgtgatcctgtacggggagcccggcaccgggaagacgctgctggccaaggcggtggccaactccaccagcgccaccttcctgcgtgtggtcaggatcggagctgatccaaaatacctgggcgaggggcccaaactggttcgcgagctgtacctcgtggctgacgagcaggcgccatccatcgtgttcattgacaagattgacgcggtgggcaccaagcggtactacgcgcacagcggcggcgagcgcgagatccagggcaccatgcttgagctgctcaaacaggtggacggntttgatgcgatgacggatgtgaaggtcatnatgggcaataaccgtatngacaggtt

SEQ ID NO: 8442 - DNA, 585 bp, Chlorella sorokiniana
  Clone ID: LIB3602-106-Q1-K1-H11
catgcatccgcctggctcccgcattcaccaaggctactcgcgcaaggccacctgcagtacttcatgaaggattacgacaaggcggttgagacgtaccaggaggggctgaagcacgaccctgagaaccacgagctcaagaggggctcatgcgctgcgtgcaggccatcaacaagatgaaccgcggcgaggtggacgaggcggagctgaaggagcggcaggcgcgggccatggctgatcccgaggtgcagagcatcctgaccgaccccgtcatgcggcaggtgctgcaagacatgcaggaggaccccgcagcggcgcagcagcacatgcgccacccggagattgcccgcaagatcgagaagctggtggcggctggcatcctgcagatccggtagagggcaggcggcagcagcggcagcggcggcagcagcagcaggcatcacctgcaccctgcaaatacaacagagcgcaggcggcagttgatgtccattgtggttggtttggccggcggggcctaggtgatttgaaatcatctagggaagttcccaggcccctcccaagttgttcaaccctcacgcctgatgcaca

SEQ ID NO: 8443 - DNA, 477 bp, Chlorella sorokiniana
  Clone ID: LIB3602-106-Q1-K1-H12
gcgttcggttctaaaatacaaacggtcgcccttggtgtgggggggggtgatcatataacacggggatgctatcaactggtctccaagcttgcaacagtaacctgatacacttgttaatgcgacgccccaccaaaccattctgccttacgcgtggcccgaaccaaacaaagacggccatctcgaggggggggcaggtgacatgaccaccgccgaaaaactggcatgagcacttgcactttgttgctcagcagctatggcgtaagtaccttctactctgtcggctcagggcagctcaacgagccttagtcaaccaatatctcattttacatgacgccgctcactaggggcccagacatgtgctaagggcgcacccacgccttaaactcagctctcgtgcattggcccatcgccagggcagcctgcttgaaggtggagccctccttgtgcgccttcttggcgatggccacccttcttaga

SEQ ID NO: 8444 - DNA, 198 bp, Chlorella sorokiniana
  Clone ID: LIB3602-106-Q1-K1-H2
gttatctcctcgcccttgcattgtgtatcgaaacgcatgcgccgtaccgctttgatcatcatgcatctctctcatccatatggcacatcttttgagcggccttgcccaggccccacgggataactggggggcctgcctgcgccttgccacttgtatctgccggccgcactctgagtgcacggtcccatgttgcactat

SEQ ID NO: 8445 - DNA, 321 bp, Chlorella sorokiniana
  unsure (1)..(321): unsure at all n locations; Clone ID: LIB3602-106-Q1-K1-H3
cggncgcgtgggtttggtaatccatcagtccatcgtgccgcacgcctatggcaccgcctctccgggccaaccttgcaaagccctcctgggcagcctgtggggcagctgggcatgcgcgtgccccttcgcacccactgacccgccctctgtcctcgtgtccctgcttgcactcgtgacctaaaaccccaaacgttacctccgtgcccgcgtccgctgtgccgcccgccggcctgtatctgcttgtttctctgcccctctctcttgctcccgcgcccggggtgcatcaaccccgccgcttttcatgtgcgtaaactgcgaacc

SEQ ID NO: 8446 - DNA, 441 bp, Chlorella sorokiniana
  Clone ID: LIB3602-106-Q1-K1-H4
agctctctagcgctgcctttgtgttacccccagtacgtgctctgccgccgcctttccgtacgtaccacaccttgcccacacccctgtctgaggccatcaacttttggtccttctgccaccagtccatacacgctgaggccttcagagcctcgccggaccctgggacaaaaccgtgcgcttacaacaagctaatcgtcatgcacgacatctctgtttccaagaagggcttaagatccttgtagcccggccggactaacgttctcttgccttgctcactcaaaacgtcgacatgggacgcaccatccccagcaccgtatgcaaccgctgcagacgcccttatgcccagagtaaccgctaccctgtgccggcccttacagcagcatccttcggcttgcttacatttgttccttacgatgccggccacgttgcccccagaagttg

SEQ ID NO: 8447 - DNA, 562 bp, Chlorella sorokiniana
  Clone ID: LIB3602-106-Q1-K1-H5
taaaaaaaaaaaaaaaaaaaaaaaaaaaaaaaaaaaaaaaaaaaaaaaaaaaaaaaaaaaaaaaaaaaaaaaaaaaaaagggaggccgaatataaaggaaccaaaactaacatacgcaatgcatgcaaaggggggggcgtcttttttgaggggcccctaaatttccttcccctgggccggcggttttacaacgttttttgttgggggaaacccatgttcgtttccccgggtgcgtcgctttgccagcgcatgccccttgggaaccccctgggcgtaaccccaattaaggcccgctccgaaccgcctttccctttcggccggcgggaggctaaaatggggaaggggcccgcccccttgtccctttcccaattaaatcgcgcccgcttggttggggttacggccccaccccctcggttccgtttatttagccccttggggggcgggtggtttccgccttcattggcctctcctttctttgccccgggcccctcgggtctccccttttttagctttttatttcgggggctttccttcccgggttcgcgtttggtttgcctccccg

SEQ ID NO: 8448 - DNA, 452 bp, Chlorella sorokiniana
  Clone ID: LIB3602-106-Q1-K1-H6
ctccaggcggcccttgccatctttcagccatgcaaaccggccgccttttcttctgcccgtgcgttgcttccgtgcatttgaatacttccctccaatcgccgccttcctcagcgtccgttctgtactgatcagcgcctttcacccccgaaccaagttttgccattttcgtgtacctgcctgcccgctcatgcggctgcgctcgcgcccccggttttgaaaacgccagtagtgatgtgactttgtgcccagatagcgccacgcccaaccggccacaggcgccccatgtaaagccgagaacgtaaaaaaaaaaaaaaaaaaaaaaaaaaaaaaaaaaaaaaaaaaaaaaaaaaaaaaaaaaaaaaaaaaaaaaaaaaaaaaaaaaaaaaaaaaaaaaaaaaaaaaaaaaaaaaaaaaaaaaaaaaaaaaaaaaaaaaaaaaaaaaaaaagggggg

SEQ ID NO: 8449 - DNA, 582 bp, Chlorella sorokiniana
  Clone ID: LIB3602-106-Q1-K1-H7
gagcggggccgggagaagctggatgcagtgcggccgcggctggaagtgacaccgagcaatgagcagcggcagccggcgctcctttgtcatgcagaccgtgctggctgacgacgaggccaagctgggcaaggcgcccaagcctgccccccgctggctgggtaatgcgctggcctgggtgctgggcctggtggggccaaagggcctggagtttgcaaagtactccatcgattaccactacctgcgcaatttcatccacgtgtcgcggcactggggccccacgcgcgccgcgcagcatgtgcccgagtttgcgcgccgcattgttgccgagtacgaccagcagggggcggtgagcgctcgcgcggcgctcaaggggcccatgcccggcggcaagcaacgctgatgccgtgtggcaggcatgcctggcctgtccattgccagctgcttcagttgagattactgcaacaactcagctttctttctgaaagatctctgccgtgcagcttcagtctgctgatttcatgttcccaccctctgcctctccggtccagctggtgctttcactgccgcatatccggcaccttt

SEQ ID NO: 8450 - DNA, 582 bp, Chlorella sorokiniana
  Clone ID: LIB3602-106-Q1-K1-H8
ggcccggcggcccgcagcggccttctgcagcgtgcccagcggccggcagcagctgcggcggcgcgcctgcttgcgggtgcaggcagtgctgcggcggagaagtcggagaggatgtgtccaagatgtctcccctgggcgaccgcctgctggtgaagccccaggaggtggagagcaagacggcgggcggcattctgctggcccccacctccagcggccgcagcatgcaggatgcgctggtgggcaccgtgctggccgtgggcgatgatgtggacgtgggtgtggctgtcggcgaccgcgtgctcttcagcaagtacagcagctccgacctggaggtgcccgatggagaggtatgctttgtggcgcagaagagcatcctggctaagctgtcgtgaggcggctgttgattgcatgctgcttggctgacccgccaagctgtcgtgcggcggctgtgcagtcccaacacagcgcttggctaaccggccaagctgtcgagctgggtgatgggctgcccccagcaaagcactgcaaccaagcgggcggtacctgccaggtaccatcttgaccaactgccgcgcctgccgc

SEQ ID NO: 8451 - DNA, 247 bp, Chlorella sorokiniana
  Clone ID: LIB3602-106-Q1-K1-H9
tggatgcggcgccagcagcagcggcaggcatgtgctagaacgcacggaagcgcaagcgcgtcccgcgcacagccgccaccgaagcggcctgccagcgtcgacggcagcgaggcagcaaggcgcggcctggcatgctagcagcgcgtactgcgcgccacggcgctagcagccgcaccctggaacagcatcagcagtaattcagcagcccacctgcatgccgaacgctccgctgtaacaggttctcagg

SEQ ID NO: 8452 - DNA, 550 bp, Chlorella sorokiniana
  unsure (1)..(550): unsure at all n locations; Clone ID: LIB3602-107-Q1-K1-A1
ggncggccggtctagcaggtactgggcagccatgacggcagctgaggtcaagctgttcgggaagtggagcttcgaggatgtggaggtgaacgacatctccctggaggactacattgcggtcaagcccaagtatgcgcgcttcaccaatcacagtgcgggccgcttccagaagcgccgcttccgcaaggcgcagtgccccatcgtggagaggctgaccaacagcctgatgatgcacggccgcaacaacggcaagaagctgatggcggccagcattgtcaagcacgcgtttgacattgtcaacctgctgaccgaccagaacccggtccaggtgctcgtggacgccatcatcaacggcggcccgcgtgaggatgccacccgcattggcagcgccggtgtggtgcgccgccaggctgtggatgtgtcgccgctgcgccgcgtgaaccaggccatctggctgatcaccaccggcgcgcgcgagagcgcgttccgcaacatcaagaccattgcggagtgcctggcggacgagctgatcaacgcggccaagggcagc

SEQ ID NO: 8453 - DNA, 493 bp, Chlorella sorokiniana
  unsure (1)..(493): unsure at all n locations; Clone ID: LIB3602-107-Q1-K1-A10
gcaggccaacaagnanaagcggtgatgtggagcgaggagaccctgtatgagtacctgctcaaccccaagaagtacatccccgggaccaagatggggttcgctggcctgaagaagcctgaggagcgcgccgacctgattgcttacatgaagggaggcctgcaagtaaacgggcccgccagcccacccgccgcacgggccaccccagcccactgaaccaagatggtgtttgctgggctgaagaagccggacgagcgtgctgacctgattgccttcctcaagcaagaaaccggcaagtagacggccgggtcctttgcaaaagagaagcagccaggatggggctctcagcgggggcgcccatttttgctgccaggagcggggcggggggggncaccacgggcgctgcattggcgcccctgggttggcccggaacaccggcctgtggtgcttttgtgttttgtgcgaanttttagcaacccggtaagcgttttccttg

SEQ ID NO: 8454 - DNA, 575 bp, Chlorella sorokiniana
  unsure (1)..(575): unsure at all n locations; Clone ID: LIB3602-107-Q1-K1-A11
tgggggcactggctcttttccaaaggacggctgaccggcgctgtgccaacaggagcgcggcgtgcactggagcaagctgtactcctaccccacctcccagcactgcatccgcaactgggtgtccgacccggattgcagcacgtgccccacgaggtagcggcgctggcactgcaaggggcggcggccagctgtgactgggatagcattaaccaacagtccaccacgggagtgctgcgcggcgctgtgacagggctccccacaacccccatccaataagccttgtgcccccaataaagccaggtgcttttgctgcgctcccactgctcccgtcctgctgctcctgcttttgactgggcgcccttcaccctgattgggctcccccacaatacgtgaccaggcccccacagaataaccagagtatgacccactccccgcaacctaagtcactctagccaggccgnacgctgcctnctcccctcaggtgcctcccttgtgtttccggctgtacatgccgncatgcttnccggcatttnctggtgcacataagcggacgtgtccatggggtgtgaaacact

SEQ ID NO: 8455 - DNA, 485 bp, Chlorella sorokiniana
  Clone ID: LIB3602-107-Q1-K1-A12
acgaggtgccgttcgccaggcagggcgtggctggggcgcgtggcgctcgtccagtacccgggagcggaggccggcaagctggtggtgattagcgatgtggtcagccccaacgcgggcctggtggacttccccggccagacgcggcgcgtgatcagcttcaagcggctggcactcagggggtgcacggtggacatcccccgcctcgccaagaaggcggtgctgaagaaggcgctggaggaggcggaggttgaggccaagttcgccaagagcgcgtggggccagaagctggccaagcgcgcggccaaggcggcgacgaccgactttgaccgctacaaggcggcggtgcagaagatgaagcgcagcgcgcaggtgcgccgcgccttcaactcgctgaagaaggccgccaagtgagcggagctcctcgcagccgcagcagccgcccaattcattgcgcccggctcgccccctggtgtaatgtagcacgc

SEQ ID NO: 8456 - DNA, 575 bp, Chlorella sorokiniana
  unsure (1)..(575): unsure at all n locations; Clone ID: LIB3602-107-Q1-K1-A2
gtggcggcgcttgtggnatgaaagnacttgtgcatgcatggtggcctctcaccggagctcaagtcgttggagcagatcaagcgcattccgcgcccaactgacgtgccagacaccggtctgctatgcgaccttctgtgggccgaccccgacaaggatgttcagggatggggtgagaacgaccgcggtgtcagctacacatttggccctgacagtgtgaccgaatttctgcaaaagcacgacctcgacctcatctgccgtgcacaccaggttgtggaggaagggtacgagttctttgcacgcaggcagctggtcacaatattcagtgcaccaaattactgtggggagttcgacaacgcaggcgccatgatgagcgtagatgacacattgatgtgctccttccagatactgaagccggcagagaagaagcagaagtatctgtatgccatgaaccctcggcctgcaactccgccacgaggatgatgggtggtcatgatcacagccatatgcttgcggcgaactcggaagttcaatcgcagtgaagatgctgctgcgcatgtaaccacgcttgtccacaa

SEQ ID NO: 8457 - DNA, 565 bp, Chlorella sorokiniana
  Clone ID: LIB3602-107-Q1-K1-A4
gcttgtctcctgctggtcaagctcaccagtgcggcgcatgcgacggctgaggcgcgcacggcaggaggaggaggagcagcagcagcgggcgcaggaggcggcagcggcaggcattgcggcgcttcagctgcgacatgtctggatcccgccgattgtggtcaatccagacgcatccatggctctggcgcacagctcgggggcctggaagcacgatgcagcagcatatgcggacgtgaagcagcacggcggtcccgcgagcggcggcaatagcagcacgtgcatttgcggcggcacacactgcggcctcgtggtggtggtgcacggccaggagacagccttcagccacgtctcgctgtctcctgccacgttggcggagcgctgagcgacgctaaaaatactagatttgtttctgcgacctgtatcagccgtcttctactaatactacgtgtttcactgcagttcagaccacctacagtacagtttacatggtgcaagaatgaatgtctgtgcagggcatgcacacaaatgaatcatagagcccagctgcagtgcaaggcctggcatg

SEQ ID NO: 8458 - DNA, 488 bp, Chlorella sorokiniana
  unsure (1)..(488): unsure at all n locations; Clone ID: LIB3602-107-Q1-K1-A5
cgnaaagcagctgcaggaaacggccaacatgccgctgccctgaggcgacgacgacgacatcgccgagtagggcggctgacatgattgttgcggtgcagcattgcggtgcagggcggtgcaggcgcccagccggccagggcctgctagcggcggcgccagccaaggcggttgccgatcaatgcctgcctggcgagccgcctgcagtccagtcgggggccctgcgccgcaccggccgcctcagccggtgctctcggcagcttgaagcttgtttgagctccttctctctggccagctctccctcccggttctgttttttgccgtcttcgacatagcctgcctactgtacgcaactgcaacgttgcagcagccaaatgtgtaaatacacgccggcaaaaaaaaaaaaaaaaaaaaaaaaaaaaaaaaaaaaaaaaaaaaaaaaaaaaaaaaaaaaaaaaaaaaaaaaaaaaaaaaaanagggggggcccgtt

SEQ ID NO: 8459 - DNA, 575 bp, Chlorella sorokiniana
  Clone ID: LIB3602-107-Q1-K1-A6
ctgggcgccctgctgctgctgcgcgcgctgcggcgcagcgccgtgcgcccccggctgctggtgcccagtggggcagagctgcgggcgctgctggacacctttggcgtgctgaccatcttctatgcggcgaagaacttctgctacctgctcctgcagagcacagcggcacagctgtcggcgctcgtgttggccgcccaccagccggtgtggagcttgtggtgccttgtgagcttcaccaacacgcccctggagagcgcagccctggcctttttgccggcggctcccagccgtgaggatgcccaggagacggcccgcctgctcatcctgctgggggcagccagcggagtgattggctcggcggtggctgtgggcctgcccgccgtggcgccgcagctgttcaccgccaacacggcgctgtggcccaacatgcagtcggtgcagctgcagggcgtgctggccatgctgtgctgcggcgtggacgtcgcggccaacggcgtcctgctggcgctcaaggacaccgccttcgtggcgcgcgccatggccacttgcctgggggtgctcctagccttcctggc

SEQ ID NO: 8460 - DNA, 186 bp, Chlorella sorokiniana
  Clone ID: LIB3602-107-Q1-K1-A7
caagccggcgctggtgtgcagaagaggtagttgcctactcgtccgctgcgctggcaggcgtgctgggggcgctgtgcctgtggcgcggcttccgcaacaacgtatgacgatgccaaggagctgtgagcttcaacacaatttctcgacaccttttgtgtttgatgcgttgcacaactggatgggaac

SEQ ID NO: 8461 - DNA, 357 bp, Chlorella sorokiniana
  Clone ID: LIB3602-107-Q1-K1-A8
tccgggtctactgttcagggcctggttttcatgtgcttctacgtgcgcctggcctacatcttcacctccttcatgcgcggctacaacctggcgcgcaagaagggcgacaagaagaagggcgcagaggccagcggcagcggcgcgagcagcagcaaggcggcgggaacacgcaagaagaagtgaacgcctctcaggcctccacaaacagctgggtgacagttgaatgagcggtgaactcaaccctttctgacaatcaatcgatgggatgcccgggcaggggctgtgtaatgaatccccggcaaaaaaaaaaaaaaaaaaaaaaaaaaaaaaaaaaaaaaaaaaaaggggggggccgtt

SEQ ID NO: 8462 - DNA, 485 bp, Chlorella sorokiniana
  unsure (1)..(485): unsure at all n locations; Clone ID: LIB3602-107-Q1-K1-A9
cacggcaggcgtgccctgnagggggtgggggtgcccgtcaagctgctgcacgaggcgaccgggcacatctgcacgggggagctgaagagcggcgagatctaccgcggcgagctgcacgatgcggaggacaactggaacgtgcagctcacaaacgtgcaggcgacggcgcgcgacggcaaggtgtcccacatggagcacatcttcatccgcggcagccgcgtgcggtacgtgattgtgcccgacatgctgaagaacgcgcccatgttcaagcggattgaccccaagatgaagatgaagaatgtggcgctgggtgtgggcggccgcgggcgggctgtggcagaccgggcaaaccggcaagttgggcgcatgtgaggcggcccagccctcacgttgctcccctagcacccctagactttgcttgcgctcgcctctggttcgctcccctcccttgcccctctgacgctccccacagattgcactgaccg

SEQ ID NO: 8463 - DNA, 257 bp, Chlorella sorokiniana
  unsure (1)..(257): unsure at all n locations; Clone ID: LIB3602-107-Q1-K1-B1
cctttgnacctctgggcctgccattgcggtggccaaggaccgtgccattgagtcgctgatgcaggtgggcgacacctttgtgctcaactgcctgggcgagggtgagtacaaccaagtgctcaagcacttcnctgcagcgcttcccgcccggcgccgaccgctttgcgggcatcggctggcgccccgccggcaacggcagncccggtgctggagtctgccattgcgcacatggagtgccgcgtgggtgggtcgcgcat

SEQ ID NO: 8464 - DNA, 581 bp, Chlorella sorokiniana
  unsure (1)..(581): unsure at all n locations; Clone ID: LIB3602-107-Q1-K1-B10
ccgctgctcaaggactggnagccagcaccgacccgctgcccttacagctctggccccgcatgggcggctgcgaggacgagcaccagcgcatggactacatggctcgtgacaagttctatgcggcacacaacgaggaccagatggcggtcgacaagctgcaggagggcatcgacaacttttcggctgaccagcgcaagctggaggacatgatcggtgcggccatggagaaggcggaggtcaagcagtgagtgagcgccaagcactgagcgccggctgctgcctctgctgccaagcactagcagcatcgagcgccggcttggcactgctgccgccaagcctctgatggcaccaagcgctggctgccgctgctgctgcagccgtgctgggcagcctgctctgtgacccaacactcgcacccacaaacgtatgacaccccaacactcacctggtaccgcctagcgccaatgcgtactgccccgccgggctgccgttgtagcgccatgatacatacgcatgttcccccacacgctgccactccgttgccacaccgtgccgccctgttcccttcagcgctcccgtct

SEQ ID NO: 8465 - DNA, 492 bp, Chlorella sorokiniana
  unsure (1)..(492): unsure at all n locations; Clone ID: LIB3602-107-Q1-K1-B11
ccgtgcgcagggcaccacggcggcgtggcgctgctgggctttggagccgcgctggctggcgggctgttcatgggtctcactttctggctggcaagcctcattagccccctgggcggcgggccagctgccgcgctgcgccgctggcagcctgtggctcttgggctggcgggcggcttcattgggtcgctgattgactcgttgctgggagcctccattcagttcactggctacaaccgtgtgacaggcaagatcaccggccgcccagggccagatgtgtcccccatcagcggcttcccaatcctagataacaacatggtcaatgcagtgtcagcaaccgccacagccgcgctaaccggattagccgcggcagcgctgctgtgaggcagagcagatgccgagctgcgctgacaccagcccacccattcaaatttacagtttgtgtaatcccagaggccttaaaaaaaaaaaaaaaaaaaaaaaaaaaaannnaaa

SEQ ID NO: 8466 - DNA, 537 bp, Chlorella sorokiniana
  Clone ID: LIB3602-107-Q1-K1-B12
acctgatcgaccgcatctgccaggactatgtgcgcctgctcaagtacggcgactcgctctaccgctgcaagcagctcaagcgcgccgcgctgggccgcatgtgcacgctcatgaagcggcagggcccctcactcgcctacctggagcaggtgcggcagcacatgagccgcctgccgtggatcgaccccaacacgcgcacgctgctggtgtgtggctaccccaacgtgggcaagtcgtccttcatgaacaaggtcacgcgggcggacgtggaggtgcagccctacgctttcaccaccaagtcgctgtatgtcgggcacaccgactacaagtacctgcgctggcaggtcatcgacacccccggcatcctggaccggccgctggaggagcgcaacacgattgagatgcagtccatcactgcgctggcccacctgcgcgccgcggggctgtacgtcatcgacatctcggagcagtgcggcttcaccatcaagcagcaggccacgctgttccactccatcaagccggtgttcgccaacaagc

SEQ ID NO: 8467 - DNA, 212 bp, Chlorella sorokiniana
  unsure (1)..(212): unsure at all n locations; Clone ID: LIB3602-107-Q1-K1-B2
taccaagnaacgnaaagcccccaaacagtcgtgccccaaagttcgtcaactcaagttgcctcagctcctgtctccccatgcaaggcgtgcaagcgctttcgaccgatcctgcctgagcggttgactgaacttgcatccacccttgccctgccttccgcacttgcatgcctgcgcctttgcttactacgccgtttcctgtccttaccaatgtg

SEQ ID NO: 8468 - DNA, 395 bp, Chlorella sorokiniana
  unsure (1)..(395): unsure at all n locations; Clone ID: LIB3602-107-Q1-K1-B3
cggctttngaacccctctttgnttgactcatttgngagatgcattctttccggtccccacgtcctcccgtcctgtccgctgtaccaccacgccatgccatcccatccatccatccatcttgcgccgcgtgcccaagctctgccagcagcagcccacgtgcccgcagctgcccctgtgcccacctgtgcgcactttaattgagcgtgcctgcccgctcctgtcccgctctcgctcccagtccagtcgcgtgcctgtgtcggtgttgtgttgaatgtttagtggaaaacgaactgccgagcccctagccctttcttcctgttactctgagcatgcctagctgaaacgaactctttatgccttatgctgtgccgcaatcgtgggatcaacctgtggag

SEQ ID NO: 8469 - DNA, 568 bp, Chlorella sorokiniana
  Clone ID: LIB3602-107-Q1-K1-B5
gatggatccataagtccgctcgggcgagtttctcgcgggaggagagctcaggcgctgtgcgaccttgtgaaggaggtgctggtggaggagtccaacgtgcaaccagttagcagccccgtcaccgtttgcggagacattcacggccagtttcacgatctgctcaagctctttgaaacaggcggccaggtgcccagcaccaactacatttttatgggcgactttgtggaccgcggctacaacagcctggaggttttcacgctgctgatgctgctcaaagcggcacatcctgcgcacgtcacgctgctgcgaggcaaccatgaaagccggcagatcacacaggtgtatggcttctatgacgagtgccagcgcaagtatggcaatgcaaacgcatggaggtactgcactgaggtgtttgactacctcacgatatcggctgttgttgatggcagtgtgctgtgcgtgcacggcggcctgtctccagatgtgcgcacgctggaccaagtgcgcatgattgaccgcgtatgcgagatcccgcacgaaggaccgttttgtgacttgatgtggtcgg

SEQ ID NO: 8470 - DNA, 504 bp, Chlorella sorokiniana
  unsure (1)..(504): unsure at all n locations; Clone ID: LIB3602-107-Q1-K1-B6
cggccgcgtgggcggncgcgtgggcggncgcgtgggcggncgcgtgggcggacgcgtgggactgaaggcacccgcctgcctgcctcctgcacagtctatgaggcgctgcagggcggctctcgagtggaccttgctgtgccgttgacggcgcacccctccggcaaagcccagggttttgtgcacctgcgcctggccttccagcctctgcctgctgaccaggcggccgccgccgcacgcgctgaaatggcagagcacccgcagctgcacggacacgacactgagccgctgccggcgcttccgggggtgcaggctctgcccaccgctccagaggcggcgcagccgccggcgctgagcgacctgcggcgagtcggcccacgggagaaggcgtacgaccgagtgcacaggccgggatacacagtgcctggttccgcccacgactgatccccccagcgccaaactgttgaggcttgcccaaactctgccatcctgtgcctgtgccactgc

SEQ ID NO: 8471 - DNA, 580 bp, Chlorella sorokiniana
  Clone ID: LIB3602-107-Q1-K1-B7
atggcggcgacctgccggccaacgcgaatgcgccgctttgtgaagtggcccaagtacgtgcgcatccagcggcagcggcgtgtgctgaaccagcgcctgaaggtgccccctgccctcaaccgcttcacccgcacgctggacaagaacatggccgagagcctgttcaagctgctgatgaagtaccggcccgaggacaaggcggccaagaaggagcggctgctgaaggaggcggaggcgcgcgaggctggccaggaggttgagaagaagaagcctgtggtggtcaagtacggcatcaaccacatcacgcagctggtggagagcggcaaggcgcagtgcgtggtgattgcgcacgacgtggaccccattgagattgtggtgtggctgcccgcgctgtgcaagaagatgggcgtgccctactgcatcgtcaagggcaaggcgcggctgggcaccgtggtgcacaagaagacggccaccgcgctggcgctgacggcggtgaagaacgaggaccagcgcgagttcgccaagctggtcgagtccttcaagaccatgtacaacgacggcccccgcgtcagctggggcg

SEQ ID NO: 8472 - DNA, 468 bp, Chlorella sorokiniana
  unsure (1)..(468): unsure at all n locations; Clone ID: LIB3602-107-Q1-K1-B8
gcagctcgcgcagctggcgcaccgccccgcccgcctctccccttgctaccctntcgagtaacgcgccgcgttgcaaaaaaaaaaaaaaaaaaaaaaaaaaaaaaaaaaaaaaaaaaaaaaaaaaaaaaaaaaaaaaaaaaaaaaaaaaaaaaaaaaaaaaaaaaaaaaaaaaaaaagggggaggcgttttaaaaaaatctaactttacttcacacttaaatgcaaagggaatggcatatttcaataaggaaaccaaaaattaaataaattgggccccaatttaaaaacggggggatgggaaaaaccctggctttcccaaactaaatagctttggaacaaacccccttttctcaaggtggcaaaataacaaaaaggcctgaaccgaacccctttccaaaaatgggcgcaacatgaaagggaagggggattcacctttaaagggaccattaaccactgctggggtggagg

SEQ ID NO: 8473 - DNA, 489 bp, Chlorella sorokiniana
  unsure (1)..(489): unsure at all n locations; Clone ID: LIB3602-107-Q1-K1-C1
ggngnactgaggcctggccatcctgcaggnagtacctgagggccggtaaacggccaggctgggaacaggcggctaaattcgggcggcttgaaggagccacctgagtgccgcctggccctgcctcgcggctgccagctccaggtgccgcccggcccggctgcgtcagcctggccctgctgggcgccagccgggcaccggcttgcacctggcactcggtcgtcgcctttgctgacagagctgcggcggcgcgaaatggagcgggcgtgcagctgaccctgcgcgcccacacctgcttgcaccgttgcccgcctgccggcgagccgcgcctcgtcacccctggctgtgttgtgttgttgcctgcctggcctccgccggggaggcacctgtaacaggcctgccagaaaaaaaaaaaaaaaaaaaaaaaaaaaaaaaaaaaaaaaaaaaaaaaaaaaaaaaaaaaaaaaaaaaaaaaaggggcggnccgtttta

SEQ ID NO: 8474 - DNA, 556 bp, Chlorella sorokiniana
  Clone ID: LIB3602-107-Q1-K1-C10
cagaaaaaaaaaaaaaaaaaaaaaaaaaaaaaaaaaaaaaaaaaaaaaaaaaaaaaaaaaaaaaaaaaaaaaaaaaaaaaaaaaaaaaaaaaaaaaaaaaaaaaagagggggacattttaaaaggaaccaaattttgcgtccctttaattggcacaaaattaaccttggggggggcgcccctgggggttcctttttttttgcccgccgttttccccccaattttgccttttttattttccgggccccccttccattttgttgggcctgggggtttccccccttttggccggggggggacccttggggtttccccccttttggttttttttacccccccctttttccccctggtgggaaaagggggggggcccttctccggggcctttttcccccccggttgggggggtttttggccggggggccccctccttttcccgccccttttcccccgggtttttggggtttttcccctccttttccctccctttttgccgcttccctccccccccctttttttgggttcctccctttgggttttccggggggggggttttt

SEQ ID NO: 8475 - DNA, 570 bp, Chlorella sorokiniana
  Clone ID: LIB3602-107-Q1-K1-C11
cggccgcgtgggcagccgcagaagcgtgacaccaccgtggtggcctccagcggcaagaagatcgacatcagcaagcagggcctgaactccatccagaatgagaccgtgaagctcaacctgatgggcaagtccaagaccatggagagcaaggactgggtggacccccagggccgcaagggcaagggctacggcgtgtaccgcttcgccaacaagtacggcgccaacgtggacggctacagcccgatctacacccccgacacctggtccgagtctggcgactcttacaagctgggcaccaagggccttattgcttgggccggcctgattgtggtgctgctgggcgtgggcatcaacctggtgatctccacctctgccctgggccagtaaatggcgacgccccccgcgtcggcagcagcagcagcagccagcagcattcccttgcagctaccccccgagaagacaaaccctcaccctaccctagctggcggcgtcaccatgcgccgctcccttgctttccgtttcactgtccctttcgttcctgcgttcgtttagtggaggaggcccgtctgt

SEQ ID NO: 8476 - DNA, 585 bp, Chlorella sorokiniana
  Clone ID: LIB3602-107-Q1-K1-C12
tccggcggctacacctgctcctgcttcgggggctatgccggcgacggctacagctgccagcccacgggcgcgctgcaggcattgcagaacaactatgagacggatggagcgggccggctggcatgcagcgagggcaaggaccttcgctggcctgaaggggcgcctggctttgcctatgatctgaccggggccttgggccgtgtggccaacggcgggcagcagaacggcctggggtcgcgtaccgcagttgagcccgtgggctgcatggtggcctgcgatgctgctcccggctgcgacagctttgcctacaaccccgcccagcaaaagtgctttttgaaggccggcgccagccgccgcacctgtggcgcagcagagacggtgtgcgtcagcgcgcgcggctcgccctactcgtgcggtacctggcagacgtacttccaaaaagctgctgccaatgcgaccgtgccgctggttgacggcagctccttgccgacctcattgcagctggtggaggcctttgcgcagccgtagccttggcagactgcagcccatgcgcaaggcgggcgtgccgcccgcggcgcccgccgc

SEQ ID NO: 8477 - DNA, 405 bp, Chlorella sorokiniana
  Clone ID: LIB3602-107-Q1-K1-C2
ggtgatgtggtgcccaaggtgtcaacgcctccgttgccaccatcaagaccaagcggaccattcagttcgtggactggtgccccaccggcttcaagtgcggcatcaactaccagccgcccaccgtggtgcccggcggcgacctggccaaggtgcagcgcgcggtgtgcatgatctccaactccaccgccatcgccgaggtcttctcccgcctggaccacaagttcgacctgatgtacgccaagcgcgcctttgtgcactggtacgtcggcgagggcatggaggagggcgagttctccgaggcgcgcgaggacctggcggccctggagaaggactacgaggaggtgggcgccgagtccgccgagggcgacaaggacggctaggactagtactgagcggtggcgtgat

SEQ ID NO: 8478 - DNA, 582 bp, Chlorella sorokiniana
  unsure (1)..(582): unsure at all n locations; Clone ID: LIB3602-107-Q1-K1-C3
cgccatcatgcgggccctggtcngcgacctcctgcttgtgctggtcgtcggagcgctggccaggaagtacgaagaccctgtgaccagctgcatcaagaggtcgaagtgcgcgtccaagaagttcaagccggtctgcgctcgcaacgccgccactcaggacacctggggaggtttccccaacgattgctacaggaagtgcgccaatgccgcccatgactttggtgtggattgggtgaagggccactactaccgcgtgcccaagtactgcaagaccaagtggctggcctaccccgtggagtgctccacttgctccggctactactaggcaactagctgagcaaggcagggcagcctgaaacaggctcccatgtgccgacgctgctggcggcatgaggcacagcaccaagaaaggcagctttcaagggcggcgttgtgctggagcaggcatggccgccagtctggagcgccagctacagcacgttgccgcgctcgatggccctgccaaccagcctcgacgcacagctgaagcgctgcaacacacccgtgacaaaccgtgcaacaacagccacacactgcgttgct

SEQ ID NO: 8479 - DNA, 568 bp, Chlorella sorokiniana
  unsure (1)..(568): unsure at all n locations; Clone ID: LIB3602-107-Q1-K1-C4
ccccgcgtccggctggcccatccccgtgcacaggtctgtgctgcgccagcggtgcgaccacttccgcgcgnctgctgcgaccgcggnctgggcctgactcctctgccgatcgtgtggctgtgcccgaccacttcagccacgaggcggtggatgccttcctgcactactgctaccacgacagcatgcaggagtgcgtggacccccaagaggcggtgagcgtgctgcacgtggccctgttctacagctgccctcgcctggtgcacctctgcgagctgcgcctggcacagctgctgcgcgccggctcgggcgccgccgccgccgacaagcgcgccgcacgccgcaacggcaaggcgccagcggcggctgcagatggcgctgagctggatgaggagtgcctggcggacgcggctgccgccctgctgggcattgccgacgacaatgggctggcgcacctgcgggccgtggccctggactggattgtgcaccactacgaggcagtggcacgcactgaggcataccacaacctgagccgcgagcaggtggcgctggtggcggaggaggcgtgccg

SEQ ID NO: 8480 - DNA, 488 bp, Chlorella sorokiniana
  unsure (1)..(488): unsure at all n locations; Clone ID: LIB3602-107-Q1-K1-C5
gcccgcccgcagccgctgggctgccatggncgacagcagtgaggacgagggtggtgcggcagcggcccgcaagcgcaagaagctgggtggggccggcggcagcagcggcggtcttggtgtggacgattggcgggagctgctggccagtggcaagcaggccctggcaggcaagaccccgggctccgccccgcgcggcatcctcagcaggggcagcggcggcagcaacggcaacggcagcggcagggccagtgcgggcaagaagcgcgtgcgctggccagacgaggccgcaggcgcgggggaggaagaggagcaggggttccgcatcggcggcggcggcgagcgcgcaaaggcgggtctggaggtggtgcacgtgctgcatgggctgggccctcccgcccaactggacgacggcagcgcgggcgtggctccccaccccaccggcacctttgctgcggcagcaaaggcggacactcgagcgaagcaccatg

SEQ ID NO: 8481 - DNA, 314 bp, Chlorella sorokiniana
  unsure (1)..(314): unsure at all n locations; Clone ID: LIB3602-107-Q1-K1-C6
gncgcagcaggcgtggccagcgagcgctccttgtgtgcgactctagacccganactggctcccagttgtcctgcacgcagcactgcagcgcctgccctcaaaatttagaccaatgaggttccttcctttctcaagtgccctgcctgctgcattcctagcttcttcacgcgtgtcggtcgggcaatccatccgactgccccacacgccgagcctttcactgccactgtgagtgctgcaatagctgcgaggtgcatgttcatactgcttgacttactacaggcgtcatgccactgactgtaacagacagcaagccc

SEQ ID NO: 8482 - DNA, 72 bp, Chlorella sorokiniana
  Clone ID: LIB3602-107-Q1-K1-C7
caaaaaaaaaaaaaaaaaaaaaaaaaaaaaaaaaagggcagaacgaataaaaaaagaaacaaaaattaagaa

SEQ ID NO: 8483 - DNA, 351 bp, Chlorella sorokiniana
  unsure (1)..(351): unsure at all n locations; Clone ID: LIB3602-107-Q1-K1-C8
nccagnaacgcggcatggtgtttgaggagnagcagcggccgggcacccccatcttcaacctcaaggcctacctgcccgtcattgagtcgttcggcttcaccgccacgctgcgcgccgccaccggtggccaggccttcccccagtgcgtgttcgaccactgggagctgatgacccccgacccgctgcagagcggctcgcagaccaacgagattgtgctcaacatccgcaagcgcaagggtctcaagccggagcctgccgcacttaacgaatacgaggacaagctgtaagctggtcctgcggcgtcccttttggcgagtgagcggcatgcgtgagcggcgcagcgcgcgcggc

SEQ ID NO: 8484 - DNA, 382 bp, Chlorella sorokiniana
  unsure (1)..(382): unsure at all n locations; Clone ID: LIB3602-107-Q1-K1-C9
ggnacagaatcgaagagcgaagcgcttgccgcgccactccacagggcaagaagaagaatggtccagggcaagctgaaggagaaggtgaacaacctggtcctcttcgacaaggccacctatgagaagctgctcactgaggtgcccaagtacaagatgatcactccctcggtgctgtccgaccgcctgcggatcaacggcagcctggcgcgcgccgccatcaaggagctgctgggcaaggggctgattaaggaggtggccaagagccgcgcgcagcagatttacacccgcgcgacggcagccgccagctaagcagccacccagcagtttggcagcatgctagtgcactcgttgtgcttgccaatctggtaacaggtccctcgca

SEQ ID NO: 8485 - DNA, 560 bp, Chlorella sorokiniana
  unsure (1)..(560): unsure at all n locations; Clone ID: LIB3602-107-Q1-K1-D1
cggncgcgtggggggaccancccagctacaaccccactggccaagaggggcgcagctactacgacacggtagagaacaagaaggcttcgcccggcatctgggactaccacctgcagtctgagaaggctgagcgggaggcgagccacgacgtggcgcgcgccgccttcaagtccatgggcgcctccaccactccccaaggcgatgtgctggatgcctctgccctgcgcaagatgtttgcctcggaccgcgtggaccagctgatggccatggccgacaagaacaaggacggcaagatcgacttcaaggagttctgcgacctgatccgcaagtacccctgcgactgagcgatacataaggcagatgcacggaccaatccctgcaataaatgcaccgtttcacaccgggccacgggcgcggcgctgattgacgcgtccccaagtaaactcctctcccaagccagtggcgccacggcacagcaccacgtgcggctgaagctgctgctgccctcagccacttcctctgttttccccgtcctcagttttccagttcttctggctttc

SEQ ID NO: 8486 - DNA, 570 bp, Chlorella sorokiniana
  unsure (1)..(570): unsure at all n locations; Clone ID: LIB3602-107-Q1-K1-D10
gtgcgaccgtgacctgctgttgcagcaccggggtgccctctgccaggggggccagttctccttcatcgacatcgccacgctgctgggcattgtgtgcgggtacctgtccaccttcctgggctgggcctacacgcgggctggcgccaagagggccgcctgcaggaggggaagctgtcgtcgattgcgggcactgtcattgccaactcctccctcaacctggggggcatgggggccaccatcatcgccctccaggccactgtgggcagcctgggggccaagacgctctcagccgcctcggccgccggcttctacggccagcgcaccgcgccgccgcccgccggctttgacgtcttctcagtgcgggcgtgcaccaacaccatcatggctcactttgtgggcatgctcttctccaactggctgctcaccgtgggcaacaagttcaacaagcgccaggcggagcgcgaggaggccttcncagcggacacagcgccctcagcgccgcccatgcctggctacaagtattgagcagccattggcagcaggcggggcagcttgccgccggccacccag

SEQ ID NO: 8487 - DNA, 230 bp, Chlorella sorokiniana
  Clone ID: LIB3602-107-Q1-K1-D11
tccgcagccacaagccgcctgcagtactggagccagccgtcgcctctaacgtgttccatcagttgcgctttacgctgggccctccctgtgctgctgtggggtgtggcatctgccgggacttgctgccggggtgcgcgcctcacccacagttttcctgctccatgcgcgcctacccatgtggcaaggtgtccacttctcgcaaccatcatgctgtaatgctgctgctgggg

SEQ ID NO: 8488 - DNA, 336 bp, Chlorella sorokiniana
  Clone ID: LIB3602-107-Q1-K1-D12
gtcccttttacgtggcttgccgctgcagccgcgcgttgccctcccttgcttggtggctgctccccggagcgccacgtgcacagtactcccctcccctccgttaccttcagacgattcccattttacatgaccgctcattacgaccctccccttcgtgactcttgactgtactcttgccagggcgctgcacagccctgcgcgctgccacaaagacaagcctgcccccaaacccgctcccccgcactttggcggcgctgccgtatactgcccgctgcctgcccagctttcatgcgcccactgctgagactgccgcagctgtgtaagcacccgccgact

SEQ ID NO: 8489 - DNA, 458 bp, Chlorella sorokiniana
  unsure (1)..(458): unsure at all n locations; Clone ID: LIB3602-107-Q1-K1-D2
gcggcggtggcttagagcacctctggccaaaacgtcagnatgtaccatgcccacgcacacctccaacgctccaacttgagggtgcagtgcgaatgaggtgcctcctgcgcaatgcctctcttgatgcaagccagcggccgtgcttgctggcgcatgcgatgcctgggataccatgcnacgcgaaaacaattgtacctcccccagtgctgcctgctacccttctgtaagctctgctgttgcctgtagcgattttcaacaaacgagcctcaatggcaaacgattctgtacaaacacctgctgctggtctgtcgtcctagcacagtcatcaaacggttcttatgcatgttcagttctctttcagctgtcgtgtgtcatgttgtgtaacctgctgccctcaaaaaaaaaaaaaaaaaaaaaaaaaaaaaaaaaaaaaaaaaaaaaggggggnccgtttttaa

SEQ ID NO: 8490 - DNA, 213 bp, Chlorella sorokiniana
  unsure (1)..(213): unsure at all n locations; Clone ID: LIB3602-107-Q1-K1-D3
cacttatgcataccatcccgcgtctgccttgcacccatgaaaccgcttccatccggactacccttctcccagnaaacttcctgttgcgcttaccctgtctgcttttccacccaccaccgcctttttgtgcgagcaataaagtagtgtttgcagtagagagcccataactgagcgggcgaaatgtgaccgcgatcaatgtaagcgaagcaatct

SEQ ID NO: 8491 - DNA, 575 bp, Chlorella sorokiniana
  unsure (1)..(575): unsure at all n locations; Clone ID: LIB3602-107-Q1-K1-D4
nagacagcggctctgcaacctggcgngatccgtccagactttcggccgcaagaagaagcggtggctgtggcctatgtgaagcgcggcaagggcgagatccgcctcaacggcgccccgctggagctggtgcagcccgagacgctgcgctggaaggcgtttgagccggtgctgctgctgggcaagcagcgcttctccaacgtggacatccgcatccgcgtcaagggcggcggccaggtgtcccagatctacgccatccgccaggccatctccaaggcattgtggccttctaccagaagtacgtggatgagcagagcaagaacgagatcaaggacatcctgctgacctacgaccgcacgctgctggtggccgaccctcgccgctgcgagcccaagaagttcggtggccacggtgcccgcgcgcggtttcagaaatcttacaggtgaaggctgccccgtgggacggttgggcgcctctggaggcttcttctgcgccgctggcgtggcggcagcggcgtctgcggcctaggcagctgccctggagcagcatgccctcagcgaaagcaccatgagtacacc

SEQ ID NO: 8492 - DNA, 571 bp, Chlorella sorokiniana
  unsure (1)..(571): unsure at all n locations; Clone ID: LIB3602-107-Q1-K1-D5
ccccaactggtgcacgctcagtccatcgtggccatcctgctgacccaggttgtgctcatgggcctgattgagggctaccgcgtcaacggcggcccggccggcgaggtggtggaccccatctaccccggtgaggcctttgaccccctgggcctggctgacgaccccgacaccctggctgagctcaaggtgaaggagatcaagaacggccgcctcgccatggtgtccatgtttggcttcttcatccaggccattgtgaccggcaagggccccgtgcagaacctgtccgaccacctggcctccccctccaccgacaacttctactccctgtacgccaagaccctggcgtaagcggcctgcacttgctcctgcttgagcctcgactggcggcgggcgtgaccctgtggcagtgcgctcccgcttgcgcccgctgcctgacttgacttcagctccactgttgcaccgaggggatggtgtaacatgtatgctggggaaaaaaaaaaaaaaaaaaannanaaaaananaaaanaaaaaaaaaaaaaaaaaaaaaaaaaaaaaagggcggccgttttaa

SEQ ID NO: 8493 - DNA, 582 bp, Chlorella sorokiniana
  Clone ID: LIB3602-107-Q1-K1-D7
cggtccgattcggtcgaccagcgtcagactctggcacggtcgacgacagaatggtttgcacgactcccctgaactggcgtcctgaagacgcaaaggtgatgtggtgacgattgaggagacgtggaagtttgacaagcagaacaagctggttggcaagtacaactttgccaaggaggaggcggtgttcaagtacgagcacacgcgcggcaccctcaagctggcggccgagtacaacctgcaggccgagaagggcgtggtgagcgcggagaagaagcgcggcaagaacacgtttgcggccacctacggcgtgcaggaccaggccaccacgctgagctggaccaacaagccgctcaaggttgtgctgcgtggcaaggctgaccgcgagggcgtgaagggcctgcaggccaccgtgcttgtgaccaaggagtttgagctgtgatggggcgcatcgcggccagggttgtgacagccctttggagaggcgcgggggccaccgagcacgcgccattcgcgtgccggtgcctgcgggcgcgctgccagccaacggctggcttggccacatactgaccagcactgccctgc

SEQ ID NO: 8494 - DNA, 483 bp, Chlorella sorokiniana
  Clone ID: LIB3602-107-Q1-K1-D9
cgcgaggcggcgcgcgacgcctaccgccgcaacacggcggcgccagcgtagaccacatgccggacgtgaacctgcacgacctggaggtgtcccaggcgctgaagaagtgcggtccgcagtggatgccgcgatgaagctggccggcgacggcgtgtactccctggtgactgtggccttcatccccggctggggcaagcacagccccacgggtgagggcaagatcctgcccgccatccaggacctgctggacagcctgggcattgatttcgagatgccgaacgccggcaagatccaggccctgttccctgcggacgcatactaaactaggctgaacggctcaccgacaaagcgtgagcccgagccgtgcgtcccgggcgcaggccggcgggcggcttgaatagcacccgcccgccggatggcagcctggccaccagcttttttgctgccctgtctttctgctccgagctgctttgcttcctgctc

SEQ ID NO: 8495 - DNA, 386 bp, Chlorella sorokiniana
  unsure (1)..(386): unsure at all n locations; Clone ID: LIB3602-107-Q1-K1-E1
gcttgcacggcaccgactgccccaccgctgcaccaaatgcaggctggctcagcgcatcagggcacaactgctgccgtgccgcccttcgctgctgtgcttgcagtacgttgccatgtaccatatcagttgactgcatcctgtgcagcagcagtcctgtacaggaaatcgctatgctttgtgggctcgtgctaatttgagccggcctggctaccagttgctacccacttgcctctgcttcctgctcatgttttgttgcccctctatgcttctgttagctgctcataatgtaagccttacagaacgcaaaaaaaaaaaaaaaaaaaaaaaaaaaaaaaaaaaaaaaaaaaaaaaaaaaaaaaaaaaaaaaaggggcgngccgttttaaa

SEQ ID NO: 8496 - DNA, 570 bp, Chlorella sorokiniana
  Clone ID: LIB3602-107-Q1-K1-E10
cgcgcatcccgctccttttgccttgtgcttcggggccagccaccatcgggcactgtccactgacctagcaaggggcggcatcgataggcagcggcggcaccatgtcgtggcaggcgtatgtggatgaccacctcatgtgccagctgcccagcggcggccaactggcccacgcagcaatctggggtcaggacggcggcatttgggcgcaggatgcctctttccccgaggtgacgcccgaggagattgccgccatcgtggccggcttcaacgacccctcgcagctggccatgaatggcattcgcattggcggcgagaagtacatgatggtggcgggcgagccggggtcggtgctgcgcggcaagaagggccccagcgggtgcacgctgaagaagaccagcacggcagtggtggtgggcatttacggggagggcgtgccgcatggcgactgcaacgtggtggtggagaacctggcagactacctgatcgagcagggaatctaagggtggccacctcaatggcaagcagatgtttatttgatgcagtgctccacctttccttgtaattgtcaga

SEQ ID NO: 8497 - DNA, 381 bp, Chlorella sorokiniana
  Clone ID: LIB3602-107-Q1-K1-E11
cggctggaagcgcacatccagtgcgggcctggctggcgggcatccagaagcagacgagcagcgtgaagggcaagcgcagcgcagggcagatcaccctcgatcaggagctggagtttgttgtggacggcgaccgagcggcacagccccacgacatacggctggaggtgtgggacacgcgctggcgcgacgagttcaagggccgggcgtgcgtgccgttccggcacatccgagaggcgcggctgtggcgggggagcgtggatttggaggatgcgcagcaggggcgcctgttcctggaggccagctggacgccgctcattgcggctggcggcatgtcttgagcccctggaatgtgtgcctgagagcttgtaagatcgagtgctt

SEQ ID NO: 8498 - DNA, 579 bp, Chlorella sorokiniana
  unsure (1)..(579): unsure at all n locations; Clone ID: LIB3602-107-Q1-K1-E12
caaacattcccgtgcagggcatgagcgaggacgagtttggggacggcgagnagttcgccgccttccagacatgcgcggcgggcgggtgcagctgatggcgctgcccatgcccgactccgactactacaacgcagagaagggcgacgcgctctatgcctttgagctggcgctggctctgcagaagctgaacatggacaagctcaaggcctgccactcgctggccgacaagtcggatgacttccaggcccaggatttcctggaggacgagatgagcgcccaggccaaggtggtgaaggagctgggagactatgtgtgcgagctcaagcgcgtgggcaagggccacagcgtcttccactttgatgagaggattgaccagggaggcctgactgctgcggcgtgagctgaccaggcagcaagttgcaaagggcgcagctgcagaaatggcctgcaagcccagcggcgccagcagggcggcaggcgtcggcggcggcaggcgtcggcgtggcatacgcactgatgcccacctgccacacaccactagcttgcgttgaatgatggttgatgaagatggcaacaaaa

SEQ ID NO: 8499 - DNA, 579 bp, Chlorella sorokiniana
  unsure (1)..(579): unsure at all n locations; Clone ID: LIB3602-107-Q1-K1-E2
ctgcaggnacacgaggnaggaggacgcaatacagggcaactccagcgaanatgaggaggctgcagccgccgcagcggcggccaggcagcgggcaggaggcgccaaggaggagcagctgtttgcccagatggagagggcggagcagcgctttgagcgggaacaagatggaggcggcaagcggtcgcgcctgctgcaaaagctggaagcaggcggcagcaggggcacagcaggcggcagcggcccaactggcagcagcgccggcgggctgaccgatgcgctgcgacagacggccacgcgtcagctggccacagcaatcagcggcaatgcggccctggtggccagcattggtggcagcagccaggcggcagctgtggcggctgccctagaacagcagctggccacgggtgcctccaagagcgtctaccaatccaagctggccagcctggtgctcctgatcaagaaagcgaaggcagccgccgatgtgccagccatggcggcacacattcctgcatctgcagcaggagacgcaacgcagccagcagcagggccagcagcaggagcaggacaggcagtacagcc

SEQ ID NO: 8500 - DNA, 343 bp, Chlorella sorokiniana
  unsure (1)..(343): unsure at all n locations; Clone ID: LIB3602-107-Q1-K1-E3
gtgctttactagcccctcgctcgctgccaattttcccggctgcttttcccggctctgttgtacccgctgccttccgcttcaggctcccaagtaagcccgcttttccttgcctcccagccggccctctgcccctgcctgctggctgccttgccttgagtgccgccaacctgcggcctgcaccaatccctcccaatcctggtcacgtgtatcctccaatttcgttgcatgcaacccctgcctttgaacgcacctaccaatgatacgcctgccctcaacatctccgtttgatgagcgatgcactgccgagcgatcaatgccgactgtaagcaattttntcggcgng

SEQ ID NO: 8501 - DNA, 113 bp, Chlorella sorokiniana
  Clone ID: LIB3602-107-Q1-K1-E4
aaaaaaaaaaaaaaaaaaaaaaaaaaaaaaaaaaaaaaaaaaaagggaaggacgataataaaaggaaaacaaaataaaaaaacaacgtgcatgcgaaaataaatagatctaaa

SEQ ID NO: 8502 - DNA, 52 bp, Chlorella sorokiniana
  Clone ID: LIB3602-107-Q1-K1-E5
gtgcactcctggtgcgggctagctatcggcagagactgtgaatagggtaaga

SEQ ID NO: 8503 - DNA, 544 bp, Chlorella sorokiniana
  unsure (1)..(544): unsure at all n locations; Clone ID: LIB3602-107-Q1-K1-E6
gcagccgccanagccccccgcccccctgcctgccccgcttgccaaccttatttcatccgattcacacggccgccactgccattcgctggatgcgccgccctggtgcgatttgggcgctgcgcctgatgtgccgctattttttcctccatttggtttctcacactcactgccatgccactcgagtcctgcgcgtgccggccgccccctgggccctgccgcaaggggccttcagacgagggctggcgtcagcgcactgtcttttgttgttttgcctcctgctgcccaaccgcaacaccccctgcctgctggtatagccgaactttccaccccggcttactacgcaataaccagcgcccttttccctgccgaacggatgccactacctgcccctccgctccaccaacaacaccacacatcatgcttgctcacccggccccgcgcaagcgggactgcgccgtccctcaaacttccccctgccaatactttacccttttccggatgccgagacgatcacaacgcaacaatgtgtgaacagagctgatct

SEQ ID NO: 8504 - DNA, 564 bp, Chlorella sorokiniana
  unsure (1)..(564): unsure at all n locations; Clone ID: LIB3602-107-Q1-K1-E7
cgctatcaanaaccgcgccgnaagagctcctccctgtccacggctgggagcttgtctccaatgggcctgggtgcctgcatccaacctgcgggagggctgcctggactcgatcatggagctgccgcagaacctgaaccggctgtttgcaaaggccgtgaaggcggagcgcaaggagctggccaagcgcgagctggcccgccaaaagcgcgcggccaagacggacgcgcacctggccaccttctggtgaagcggcgcactagcagcacaagtagcagcgccctttgtcaatccagcgccggcgactgcgtgacctccggccggcgccccttgtacaattcatcccgcggctgggcggccctgcgacccgtggcgcaccccctttcgcgcctgattctgccccccagctgcctcctgtactcacgtaccacactccacagcagtctccagtcgccctgatgaccctcccatcctgagctgctagtttttgagattcaacctgccaccagcgaccgcggcgtccccctgtaggcggcgctggtacccctctgttcatcctcgtccctg

SEQ ID NO: 8505 - DNA, 289 bp, Chlorella sorokiniana
  Clone ID: LIB3602-107-Q1-K1-E8
gtgagccccctcgccagcgggcactagccagtgtaccatcgcgggcggcagcaagcggagcttgccccggcgaactattctttctgacgcccgcgggcgccactcacgcaaacaaatgattggccctgtcccctattccccccgcccctgtccccacgctctgtctccccaccaccaccctccagtccacaccgcggcattcatcccatttgcgggccccgcaagttttgttgttttattcctcaggctttaatgctagcaatcgatgtgatgttgtaacaagcggcac

SEQ ID NO: 8506 - DNA, 457 bp, Chlorella sorokiniana
  unsure (1)..(457): unsure at all n locations; Clone ID: LIB3602-107-Q1-K1-E9
cgacagaagcgatcaataagctgtggcccgcctgtacgacatccagaccaanaagatcaacaccctcatccggccctgacggccagagaaggcgtacgtgcggctgaccgccgactacgatgcgctggatgtggccaacaagattggcgtgatctaaagcgtgcggctggagcggggcggctcccgcccctcccaacccacccttggcctggtgccaaggcgccggcagcctgcacggccaccccacgcggccggcggcgccggcgcagcagcggcagcggcgcgtcgggcgcagtgcgcagcccggcgcgccaccccggttgcaacaccacgtgctgtaaccaatccttcggcaaaaaaaaaaaaaaaaaaaaaaaaaaaaaaaaaaaaaaaaaaaaaaaagggaaaaaaaatataaaaaaaaagggggtggggggaagaaaaaaaagaatttaaa

SEQ ID NO: 8507 - DNA, 568 bp, Chlorella sorokiniana
  unsure (1)..(568): unsure at all n locations; Clone ID: LIB3602-107-Q1-K1-F1
cttcaccctcgcatcaaggttccccgncaaccaattgnnagcagccatgaggtgcaacgcagccttattttggccgctctggtggtgttgctcgcctctgcggcccccgcgcaggcagggatcttcgattccatcgcggacggcctgggcaacgctgcatcggccgtgggcaacgcagttaccggtgccgcaaatgctgtcgctggcgctgccaccgacgcctgggacaaggtgtctggctggagcgaggacgcctggaacaagaccaaggacacgtttgtgggagcttaccaatggacggagtgcaaggcagtggacgttgccggaatcgacctggacgcgtgctggtccgccccgccctctaacccctgcaccgaggcctgcaaggctgccgtggacaagatgccccaggactgcctgaaccgcatcatgacccaggtggtgaacgatggcaacgaggccagcatcgcgcggctggaggcgcagttctctgcctgcaacgtgaccttcaacatcctgccggctgatgtcaccgtgccgctgtttgacaacagcattgttggctgcg

SEQ ID NO: 8508 - DNA, 435 bp, Chlorella sorokiniana
  Clone ID: LIB3602-107-Q1-K1-F10
gtgctgtacgacgcgcatgcgggcagcaacggcttctacaacagccccgtggacccggcggtgcgctccctcatgaatgtgcccttcaccatcccctccaaccccgacctggagaaggagttcattgcgcaggcggccaagcagggcatgatccagctgaagggccaccgcagcgtgggcggcatgcgcgcctccatctacaactccatgccgctggacggcgtgcagcagctcgcggcattcatgcagaagttcgcggcgcagcacgccaagtgaactctctccctgcaatgacggcatgaaccaaccacacggcttgggtgcaacaccacgttttctcgacccctcgttgcgatccaaccttttgccttgctccccttgtgcactgctcttccactaatgccctttgttccctaattagtaaacgaatgagag

SEQ ID NO: 8509 - DNA, 530 bp, Chlorella sorokiniana
  Clone ID: LIB3602-107-Q1-K1-F11
ctattctagatcgcgacggccgcccttttttttttttttttttttttttttttttttttttttttttttttttttttttttttttttttttttttttttttttttttttttttttttttttttttttttttttttttttttttggggggggggggaaaagggggggggtggaggggggggtaaagggcaaaagggaaaaagggagaaaaagggggggggggggttgggggccaaaaaaaaaaaaaaggggaaaaggggggggaaaaaaaacacctgttgggggggggggggaaaaaggggggtttaattgggggcaaaaaaaaaaagaggttggggaaagggggccccccccccaaaggggggggtgggcactggggaaaaaaaaaaaaggggggggggggctggggaaaaaaagggggggggttgaattgaaaaaaggggggggaaaaggggggcccctgggggaagggggggcaaaaagaaaaaggattccggggggccaaataaacgtattggggttggtggggatg

SEQ ID NO: 8510 - DNA, 592 bp, Chlorella sorokiniana
  Clone ID: LIB3602-107-Q1-K1-F12
cacagaccccaggtgctgagctggctggaccgcgaagcatcagccgcgtccaggttgagccgcttagttacaccaatcatttcgacgccaggtacggctccaactttatgaaggtgcgggcgctggggctgacccagtacgacgcaatcattctgctggacagcgacgtggcgggggcgggcgacctctcgccgctcttctcgctacccaccgagtttgcggcggtgtgggaccagcccaaggtcctgggcaggtttggcccgcacctccagggtatcaacggtggcatgctgctgctgcggccctgcaaagcagtcatgcggcacatgctggcagtactggaggcccagcccaagctgcgattctcgcatggagcggcagagcaggactttttccactggtatttcaagtacacgggcatgcggctgccacttgagtacaacacgatggcatcagacagcctggcgggcaaccgcacgctgggcgggcgggaccctgttgtggtgcacttcacgcgcaacaagcccttccacggcccgcagcctggccggccagggcaccaattcctgtgcagactcgaagaaaggactga

SEQ ID NO: 8511 - DNA, 63 bp, Chlorella sorokiniana
  Clone ID: LIB3602-107-Q1-K1-F2
cctcagccccggcacagggcgcaacacgaaggtgcttgcgcccgtttgggcggggcgggagtg

SEQ ID NO: 8512 - DNA, 589 bp, Chlorella sorokiniana
  unsure (1)..(589): unsure at all n locations; Clone ID: LIB3602-107-Q1-K1-F3
cggncgcgtgggcggccgcgtgggcggccgcgtgggcggccgcgtgggcaccaacgtcgatggcaagcagaagacatgtatgcgctgaccgccatcaagggtatcggccgccgcttctccaacatctgctgcaagaaggctgaggtggacctgagcaagcgcgccggcgagctgtctgccgaggagctggagagcatcatgaccatcgtggccaacccccgcgcctacaagatccccgactggttcctgaacaggcagaaggacgtcaaggacggccgctactcgcaggtgacctcctccgcgctggacaccaagctgcgcgatgacctggagcgcctgaagaagatccggaaccaccgcggtctgcgccactactggggcctcaccgtgcgcggccagcacaccaagaccactggccgccgcggcaagaccgtgggcgtggctggcaagaagaagtaagcagcttcttgcgggcgcggcctgcggcacgggcggatgctggcggctgggtgacggcggctggcgccgcccgcgcaacaaccccactggcagagccggcggcagcaggtggatccacaccattcgttgc

SEQ ID NO: 8513 - DNA, 570 bp, Chlorella sorokiniana
  unsure (1)..(570): unsure at all n locations; Clone ID: LIB3602-107-Q1-K1-F5
acaggnacagcattacccacacgaggggggctggcaggggcccgtttccatcaccctcccacctgtgcctcccctactcatttgtgcagcaagtttgattacattatgaaggtcgccgagcgcccgtgcaagcgaaactcccgcccaatcatccagggcgtcaccaacgcagagctgccgtttgcggaggttggcactcaaatgaagcctggcggggacacattcaacgtgattctaaagaacgatttccgcttaaagggcgcccgcagcgtgcgctggcgcgtgcaagtgccacgccgccaaaaccgcggggcgacggcgcccatgtttgttgggctgatggatgacagcacatacttctcggcatgcactcccgacgacaccttcacaaaggtcgaatgcaacttcaacgccagcctggcgctgcccggcacggcctgctttgccagggattgctggggctcatatgacttcaagggcagctcctccgacgacatgaacctggttgtggcgtacacgcgctcaacgatctacctgggtgcaccctgngtgatcaacgccaccgaaacg

SEQ ID NO: 8514 - DNA, 591 bp, Chlorella sorokiniana
  Clone ID: LIB3602-107-Q1-K1-F6
ccgcggggatgtgacggcggcgtaccgcgcgctggagaattcaggaggagacccgcaagaggtgagcatcatggtggagatggagcgcaactacatcaccgccgagtacttccgcaccatccagatgggcaagatgccggacggcaaggtgatgtacacgctggacgggcggccggtgacggaggagccggagggcagccccgaggagaagcactacaagcgcatcatcaaccaggtgttgggctacgtgcgcgaggtctgccagcagatgacgcagacggtgcccaaggccatcgtgcactgcatggtgctgcaggccaaggacaagctgctggaggagatgcaggcgagcgtggcgggcgaccaggaggtggcgctcaagcggctgctgggcgaggacgaggcggtgatgaagcggcgcgaggcgctcacgcacaagctggacatgctgagccgcgcgcaggcggagctgaccagcgtggatgtgtgaggggcggcacaggccggcgggggcgatgccgctccctgtggcgtcgcccagcccgccggcgcggcgtgccctagcagctccttctctccctccctgtgcct

SEQ ID NO: 8515 - DNA, 552 bp, Chlorella sorokiniana
  Clone ID: LIB3602-107-Q1-K1-F7
taaaaaaaaaaaaaaaaaaaaaaaaaaaaaaaaaaaaaaaaaaaaaaaaaaaaaaaaaaaaaaaaaaaaaaaagggccgggcggttcttaggggttcccaaggtttcgtttcgccttccatttctcacgtcttccgcgtttttttttggggctgcccttaatttccattccccttggcccgctgggtttcacaccgtgggtgcctggggaaatcccttggggtttctcccactttccttcccttttgccgcctttgccctccttttcccccttgtggcgcggtatggccggaaggggccccgcccgtgtccccctttccccactctttgtaccgcccgtgctgggccgatggggcctggcccttgttaccggctctttgggccctgggggttgcggggggttacgttgcacttgtaccctttacctttgtccattcccttgcccccggttcttttcctttttttccttccttttttcccccgtttgcccggttttcccgttaaggttttaagtggggggttccttttggggttccgtttaggggttttgggg

SEQ ID NO: 8516 - DNA, 574 bp, Chlorella sorokiniana
  unsure (1)..(574): unsure at all n locations; Clone ID: LIB3602-107-Q1-K1-F8
ngacgactggtggagcgagcatgagttggagatccgcctgcccaagctgccgctggtgctcaggggggcctggagttcagcttcacaccgctggagctgctgctggcggcgcccacctccgccttctgcctctggtactacctgcgcaagcactggtttgccaacaacatgctgggtatggccttcagcctgcaaggcatcgagcacctgtcgctgggcgcggtgcagaacggcgtcatcctcctctgcggcctcttcttctacgacattttctgggtgtttgctacccccgtcatggtgtctgtggccaagaactttgatgcccccatcaagctgctgttcccccgcccctgggacacgccggtggacggcaaggctcagttctccatgctgggcctgggcgacatcgtcatccccggcatctttgtggccatcgtgctgcgctacgacgtgctgcaccacacccgctacttctacagcgcgtttgccggctacgccgcgggcctgctggccacgattgtggtgatgaacgtcttcaaggctgcccagccggcgctgctgtacattgtgccgg

SEQ ID NO: 8517 - DNA, 597 bp, Chlorella sorokiniana
  Clone ID: LIB3602-107-Q1-K1-F9
gccgcgcggcccagccccagcccaagcgcgcccaggcgctgcctgcagacgcggccaccagcaccacagagacggcggaagcgggatgcgggcgcaagaagctgtttgatgacctgggcggcgcagaaggcatgaagctggcggttgacaccttctacgataaggtgctggctgacccggagctgctgcccttcttcgagtccctggacatgcaagagcagaagatgaagcaggtcaagttcatgagcttcgtgtttggcggagcagaccaatacaagggccgaagcatgtacgacgcacacgcccatctggtcaagggccacggcctggaccaccgccactttgacaagatcaagcagtaccttggagagacgctgcaggagatgggcgtcaagcaggatgtgatccagcacgccgccggagtggtggagtccacccgcgacgaatttgacttccccaacaactgcgcacccaactgattttcatcaacccaaccccagcctgagcgctcattccatcgattttgagcggggagcgccagttgccgagcgcgcccagggggcccaggagcctgcaaatcgtttgccagcccttgct

SEQ ID NO: 8518 - DNA, 100 bp, Chlorella sorokiniana
  unsure (1)..(100): unsure at all n locations; Clone ID: LIB3602-107-Q1-K1-G1
naaaaaaaaaaaaaaaaaaaaaaaaaaaaaaaaaaaaaaaaaaaaaaaaaaaaaaaaaaaaaaaaaaaaaaaaaaaaaaaaaaaggggcgggccgtttta

SEQ ID NO: 8519 - DNA, 579 bp, Chlorella sorokiniana
  Clone ID: LIB3602-107-Q1-K1-G11
gcaccacgtggggcgggaaccgagactcgcctcaattgcggcggcgcgcaggcacggctggcagctgatggacgcctgggcggcgacccgggcagccaagctgcagctgccggacgacccgttcatcgacacggtgcacttcttgggcttcgtctatgccgaactcaaccagctgctgctcaacatgatttgccccgccgagggcacgcccaaggctgcaacctcgcgcaagtcggcggcatgaatgcagctggctgcgtgacggtcccctgggcccacgcacccccttgcatccccttttcatcgtttgaccgcattcttccctcaatccatcacatcaagcgcctcccctgctgggccgcaccctcccccaccccgcctgctcacttcgctgtgcaagtccctgctgcgggccactcccacgctttgctgatttcgctttgtctgcctgtccttctctcgctcgcttccactcctacccactctgctcgcttctgacgcgctcccgcacagcactgacgtccacaagacaacacatccctcccatcccaaacagtgcagcgtggccatgtgcccctc

SEQ ID NO: 8520 - DNA, 447 bp, Chlorella sorokiniana
  unsure (1)..(447): unsure at all n locations; Clone ID: LIB3602-107-Q1-K1-G2
cggcggccggctcagcagcgacgtggacctcgngcttggcaagggggaagcagcttctgactccgcggaggcgcaggagggtgcttaccaggcaccagacagcgcccctgctgcacctgctgagcagcagcaggcggcgccggccaccacggtcgtgtgagccaggctgncgaaaaccgcaggtggcggtgcattgccgccgtgctgcacatcacaacccaccccaaacccacccagcatcactttgcactctgcctactccttcatttttctccctgctcgcgctcctgctgctacggcacttgcccctttcccttgctgcttccctgctctgcagctgcccctctgctctccttgcttcccatctcgcacctgtcatttccattagcattctgtctgtccagtactcctttttggtgtgtgcattctgtcaataaggacctctgc

SEQ ID NO: 8521 - DNA, 563 bp, Chlorella sorokiniana
  unsure (1)..(563): unsure at all n locations; Clone ID: LIB3602-107-Q1-K1-G3
gcctgctgcaccagcccananccgctgncgacatggcgaccgccctctgcttcagtgtggccccccgcaccgcggcctttgccgccgcgcagcagcagcgccgccctgcgcgccgcctgcagccggtgcgcgctcaggcggaggacgaccagaaggcctggacttcaccagcaacaagcgcgcggccctgggtttcaccgagaacgactctgcgggccagaccaacattttcgctgtggagcctaagagctacgtggcgggcagcagcgccgacaagaccggcgagggcagccaggcgacgctgattgtggcgggcattgcggcggtggcggccgcggcggctgtgagcggcggcctgctggccaacagcggcagccccaccagcctcagcgacctggcccccgttgagggtgtcaagtccctgacggcgtacagcgagctgtttgcggctgagctggcgcctgcggcccctgcccttagcgagtgatccacccatttatcagttgcaatcgctcgctgctgccggccgggcggaccgtccaagggcccctcggcatgctgag

SEQ ID NO: 8522 - DNA, 455 bp, Chlorella sorokiniana
  unsure (1)..(455): unsure at all n locations; Clone ID: LIB3602-107-Q1-K1-G4
acggcgcggcgctggcgggcgcctccggcagcagcctgcccgaggctaccaggcccggtaaacggcggcgcgtgcagccgtgcggcccgcgctggcagccgcagatgaggcaccctgcctcacaatgactgcctgccggcgtgggcaggcgcagcgctccgccctgtgagccccctcgccagcgggcactagccagtgtaccatcgcgggcggcagcaagcggagcttgccccggcgaactattctttctgacgcccgcgggcgccactcacgcaaacaaatgattggccctgtcccctattccccccgcccctgtccccacgctctgtctccccaccaccaccctccagtccacaccgcggcattcatcccatttgcgggccccgcaagttttgttgttttattcctcaggctttaatgctagcaatcgatgtgatgttgtaacaagcggcnca

SEQ ID NO: 8523 - DNA, 77 bp, Chlorella sorokiniana; identical to SEQ ID NO: 6476
  unsure (1)..(77): unsure at all n locations; Clone ID: LIB3602-107-Q1-K1-G5

SEQ ID NO: 8524 - DNA, 231 bp, Chlorella sorokiniana
  Clone ID: LIB3602-107-Q1-K1-G6
taaaaaaaaaaaaaaaaaaaaaaaaaaaaaaaaaaaaaaaaaaaaaaaaaaaaaaaaaaaaaaaaaaaaaaaaaaaaaaaaaaaaaaaaaaaaaaaaaaaagggggggccggttcttaagggatcccaagtttcacgtccggcgggcttggcgaacgtcttagccttctcttttgggtggcccccttaatttccatttccgggggcccggtgtttttcccgacgtcggggc

SEQ ID NO: 8525 - DNA, 567 bp, Chlorella sorokiniana
  unsure (1)..(567): unsure at all n locations; Clone ID: LIB3602-107-Q1-K1-G8
caccgccgnagactctgtggtggaccgcacccgcgnggtggtgcccggcatggtcatctgcggtatggaggtggctgagctggacggctgcccccgcatgggccccacctttggcgctatgtacatgtccggcctcaaggctgcccaggtcgcgctcaactccctgcgccggcagcaggaggaggaggcggccgctgaggcaggccaggagggcaaggagatggtggccgcctaagccagctggactcgccacagctcctcgcctttcaagcctttcaggctggcgtagcgctgtccgcagcagccgccagtcagctgcaagtgtacttcagcctttgttgaactcgctgccgcctctgattgcgccagtcagcagctactttgcccaacacacgccggggggttccctgggcgggcttccatcccgagcaataatgccatgcagcgctgaacgccacacgacacacccctttcagagaactgcctttcatctcgccctcagctgccatcccctgcctagcgcgatagcgtgcatgcaggcatggcacatgtaaatacactgctgag

SEQ ID NO: 8526 - DNA, 583 bp, Chlorella sorokiniana
  unsure (1)..(583): unsure at all n locations; Clone ID: LIB3602-107-Q1-K1-G9
gtgccgctggtcagcgcgcgggtgcacgacatgnaanacatctacgaggacgcagacgacgaagacttcttgggcgtgcactttgcgctggacgtgcgctgcaccagcgacgacaccatcagcgtgacgagcaaggacctgcagctggacccgcagcacccagacattcaccccgtgggctaccacgatccaaatgacaagggcatcctgctcgtgaagatgcggcgagggcaggagctcaaactgcgggcggtggcgcgcaagggcacgggcaaggaccacgccaagtggatgccggtggccacctgcgtgttccagtacatgcctgagatcaccatcaaccacgacctcatggacacacttacagacgagcagaaggaggagtggtgcgcagccgacccgcgcaaaaccttcaagctcaacaagctcacgcaccgggtggaggtgaccaacccggagctctacatgtacgacggcgaggtgatcgcaaaggcggaggagatgggcaagcctgggctggtgtccatcaagcagaagcaggacacgttcattttccgggtggagggcacgggcgtgctgcggc

SEQ ID NO: 8527 - DNA, 559 bp, Chlorella sorokiniana
  unsure (1)..(559): unsure at all n locations; Clone ID: LIB3602-107-Q1-K1-H1
ggctacgagccgatgccgntgctggnaggcaaggactacggcaagacgcgcatgacgttcagtgactacgtgcagagcgagagcgggctgcagtactacgacatccgagagggcagcggggccgtgccgcagcagggccagacgtgcgtggtggactgggcgggcgtgaccatcggctactacggccggccatttgaggcgcggaacaagcccaagggcagcgcgttcacgggggacgacaaggactttttccgcttcaagctgggcgacagcgccgtcatccccgccttcaacgaggcggtggcgggcatgaaggtgggcggcatccggcgcatcatcgtgcccgtggagctgggctaccccgacaacgacttcaacaaggcggggcccaagccctccaccttcagcggccagcgtgcactcggctttgtgcttggaaacaagggactcattgacaaaacgctgctgtttgacatcgagctgaagaacgtgctttgattggatttacgacgtcagaattcagttttctgaggcaactgtaatgatattattntgcgaa

SEQ ID NO: 8528 - DNA, 449 bp, Chlorella sorokiniana
  unsure (1)..(449): unsure at all n locations; Clone ID: LIB3602-107-Q1-K1-H10
ggcggnaaaaagtgggnagcaaggtcctcgggttcttctactgagcggccttgttggatgcgccgcagcagccacggtggaccacagccgtggcggatgcagcacgggcggcgcgcccggccgcggtgtttgctgcagcaccggcggcagccctgggtgctgcccccctcttagattgctgcaccgcacggttgtaacagaggttacatgagaaaaaaaaaaaaaaaaaaaaaaaaaaaaaaaaaaaaaaaaaaaaaaaaaaaaaaaaaaaaaaaaaaaaaaaaaaaaaaaaaaaaaaaaaaaaaaaaggggggggcccgttttaaaaggaacccaagctttaacttaccgcgggcttggcaacggtaataagttttttttataggggccacctaaaattaaattaattgggcgcggggtttaaaaaacgttcgggaactgggaaaaac

SEQ ID NO: 8529 - DNA, 530 bp, Chlorella sorokiniana
  unsure (1)..(530): unsure at all n locations; Clone ID: LIB3602-107-Q1-K1-H11
cagtctgctgtggnaaaactggnacaggacttggggaccacccgacccgcgtccgagcagaagagggctacaagctgccgcgccacatcatggccaacggcgacctggcccgcctcatcaactctgatgagatccagtcggtggtcaagccgcagaagaccggcaccgcccgcgccgggctgaagaagaacccgctgcgcaacctgggcgcgctgctcaagctcaacccctacgccaaggtggcgcgccgcgccgagctgctggccgcgcagaagggcgccaagtcggccaaggtggaggcggcccgcaaggccaaggccgccgcgcgccccgcggtgaagaaggtgtccaaggccttctacagcaccatgatcaccgactcggactacgtgggcgaggactacgaggtgttcagcagctggctgggcaccacccagtgagcgccccggccggagtagctccccagaggaggcgagcgcggcgcggcggcgccgcccgccgcgggcggcggagggtcaccggcccgcggc

SEQ ID NO: 8530 - DNA, 581 bp, Chlorella sorokiniana
  unsure (1)..(581): unsure at all n locations; Clone ID: LIB3602-107-Q1-K1-H2
ngacagccctttgntgtgcgggcggtgctggcgcgcctgctagnaggctcccgctttcacgagttcaaagcgcagtacggccgcacgctggtcaccggctttggcagcctgtacggcatgcctgtgggcgtggtggccaacaacggcattctgttctctgaggccgcgctcaagggcgcgcactttgtgcagctgtgcgcgcagcgccgcatccccctgctcttcttgcagaacatcacgggcttcatggtgggccgcaagtacgaggctgggggcattgcaaaggatggagccaagatggtgatggcggtggcaaacgcggacgtgcccaagctgacgctgctcatcggcggctcgtttggcgccggcaactacggcatgtgcgggcgcgcctactcgcctgacttcctctacatgtggcccaatgcgcgaatcagtgtgatgggcggcgagcaggcggcaacagtgctgtcactggttgaagccgagaagcgggcgcgggaggggcaggagtggcccgaggacgaacgcgagtactttaaagagcgcatccggcagcggtatgaccgggaggggcagcc

SEQ ID NO: 8531 - DNA, 580 bp, Chlorella sorokiniana
  unsure (1)..(580): unsure at all n locations; Clone ID: LIB3602-107-Q1-K1-H3
caacatcgnatgcccggccaacacggcttcaaggtcaagtactgacaccaagggcacgatcacctctgaggagtctgacaagctggtaggacccgtacacacgctttgtctgcgtcttcgacagcaccttcgtctaggcgaacagccccccccatctgcccccggggcaacaaccggcaaccgcaaccctccctcgccaaaccgcatgccccgcaagccacggtcgagccctgctgcgccagcctttgcacacaacccctagccgtcagttcatgcaaccccaaccatcagacgtcgcaccttgtatacccccgttgcaccaatcctccccgacagagagcgcgctgctctcacgcccacatttaaagctaacacttgaccctgcactttgtgccgcccataatcccctacgtcaatgaaacgacatgttatactgcccttatgcacccttcattttgacgcactggcacagttttgccctgatgctatgaatttgcgagcgcttcgatccgtactgtcctttgttccgtgtgagtgttaattgttttccctgtcctcctatcatgtgaatttcttgggt

SEQ ID NO: 8532 - DNA, 520 bp, Chlorella sorokiniana
  Clone ID: LIB3602-107-Q1-K1-H4
ctgcggatctgttgcagctttgccccggccgcgtggggcaagaagttccaggaggcgatgaaggacccgcagctgcaggcgcagctcaagtcggcgcaggtgcctgcggtggagggcggcgaggaggaggagcccacggtgctcacgctggccagcgatggcaacgtggagggtctgaaggagctggtggcgcaggagggcacggatgtgaacgagaaggacgatgagggccgctccgcgctgcactttgcctcgggctacaacgagattgagtgcatgaaggtgctgctggaggcaggcgccgacgcaaacgcggtggacgccaacgacaacaccgcgctgaactacgccgggggctacggcaacctggaggccgcgcagctgctgctggacaagggcgcggacgcgggcattaaaaacgcggagggcaaaaccgtgggcgaggtggctgaaatgaacgagcaggcgggggtggttgagctgttcaaggccaaagcggtataagcccccctgtttctgg

SEQ ID NO: 8533 - DNA, 583 bp, Chlorella sorokiniana
  Clone ID: LIB3602-107-Q1-K1-H5
cgcacggcgagcgccgtccgcagtcggtgcgcggctgcatcgtgtcccaggacctgtccgtgctcaacctggtgatcgtgaagaagggcgagcaggagctgccgggcctgaccgacgaggagaagccccgccagcgcggccccaagcgcgcgtccaagatccgcaagatgttcaacctgaccaaggatgacgacgtgcgccactacgtgaagatctacggcaagaaggtggagaagaacggcaagaccaccatcaagtgccccaagatccagcgcctggtgacgccccaggtgctgcagcgcaagcgccggcgggccgccatcaagaaggagcgcatctcgcgcaagaagaccgaggccgccgagtaccacaagctgctggtgcagcgcctgaaggagcagcgcgagcgccgctccgagtccctggccaagaagcgggccatccgcatggcctctgttgcctccaaggaggcgtaagccgtccctatgccgcctgcatagtggcgcctgccgcctgcttgttgaggcgaggggcgcggcgcggcgcgaggcgcgggcagccctcccctgcctgcttgcagcgg

SEQ ID NO: 8534 - DNA, 573 bp, Chlorella sorokiniana
  unsure (1)..(573): unsure at all n locations; Clone ID: LIB3602-107-Q1-K1-H6
gcggcttaggcgggtgtcgtccagggtcaagcctcgcttatgccccgcatgttgatgttgcagccgtccttccagcctgcccgaccagcttgtgagagcagttcggtcgttgtagcaccttacctttgcatgactctgccccctngacactggaaagcatgcccccgcgctatgcattgctcataccgcaatgcatcctgccgttccccgccctcacctgtcttcctctgtcgtcccctcgacttttcttcccacccccggccgctcgctcttttcctgtttgcctcctttccccgtcgtgctcaccgcaacgcatgacgccccaccaacgcctgaactgaccatcgcactgcatcccccactgctagagtggcctggtttgctggtatgttcaatactgtcccctcgcctgcttaccttcctctcatccgagcgactgcttctatcacagctactcagactgacatgcttgccataactgagggctggcgccccacctctggcaatgttcgagtgccaccccacctctgctgacccggcgtggcactgcttacatgcgatccatccctcttg

SEQ ID NO: 8535 - DNA, 554 bp, Chlorella sorokiniana
  Clone ID: LIB3602-107-Q1-K1-H7
tccgtaaaaaaaaaaaaaaaaaaaaaaaaaaaaaaaaaaaaaaaaaaaaaaaaaaagaaaaaaaaaataaaaaaaaaaaaaaaaaaaaaaaaaaaaaaaaataaaaaaaaaaaaaaaaagggggggggttttttaggttcaatttttttttccccgtttttcaacgtctttacttttttttttttttggccttaataaaatttttctggtgcgccgttttaaaccctttggggcgggggaaaaccttggggtgccccccttaattatctttggggccaatcccttttttttctgctgggtgaataggaaaaaggtcgtccaccggttctttttttttaacagttgcttaacctttttgggggttggggccctcccttttgcggccctttatacccgccggttgtggtggttcccctcccttggtcccctccttttgcgggcgccctagggcccccttttttcggtgttttcctttcttttttcggcccctttgccggcttttctctcgagcttttaaaatgggggcgccttttggggggcctattgggggtttt

SEQ ID NO: 8536 - DNA, 413 bp, Chlorella sorokiniana
  unsure (1)..(413): unsure at all n locations; Clone ID: LIB3602-107-Q1-K1-H8
gttctctccacanaacaagcgaanagcgcgctaagtggaggaagaagcggatgcggcgcctgaagcgcaagcggcggcggcagcgggccaagtaagcggcctgccccgcagcccagcagcgctgcggcgcctgggcgcagccgcccgctcgcacgcgtgcaacggcgctgcagcggccagccggcgtcacggagtccgggcgcccggcagccgccgatgaaatgtgacggccgagtgtgtaatgctcacgaccaaaaaaaaaaaaaaaaaaaaaaaaaaaaaaaaaaaaaaaaaaaaaaaaaaaaaaaaaaaaaaaaaaaaaaaagaaaaaaaaaaaaaaaagaaaaaaaataaaaaaaaaaaaaaataaaaaaaaaataaaattttataaaataaaatataaaataaaatta

SEQ ID NO: 8537 - DNA, 394 bp, Chlorella sorokiniana
  unsure (1)..(394): unsure at all n locations; Clone ID: LIB3602-107-Q1-K1-H9
gcgcacatggtggncgcctcggccatccgcgatctgcaggacgcctgcgccatcgacggctatgcgctgcccaagatctaccgcaaggtctactactgcgtgtctgccgccatccactccaagattgtgcgcgtgcgctccgtcaaggaccgccgcaaccgcgagccgccccgccgccccggctttggcgcccgccccgagcgcaagtgagcgtcggcatggccgcagcagcagcagccgctgaggagcagtgagggcggcgctctgcagccgcgcctcgtcctgcgatgagtcagcaccgcggggccgcccggcgcacggcacgccacccggcaggcagcttatttatgtgcgctgggccgcgcgccggcgccccgtgtaaatcgcgatatgc

SEQ ID NO: 8538 - DNA, 431 bp, Chlorella sorokiniana
  unsure (1)..(431): unsure at all n locations; Clone ID: LIB3602-108-Q1-K1-A1
ggggtgacttctgagcaaacaaagccgtatgtggatgtggtcgacaccctgngcgagcccgaattcgacgcagtcctgattgacggcaggttccgtgtggcgtgcgccctcaagatcctgaacttcctgacagaggctccgttgtgatgatccatgactggaagcagcggaaggacaaatacgagccgccgctgctggagtttacgagatgattgagcaggctgacaagctggctgtgctgcgtcgccgcccagactgggacaaggacgccgcagtggcaaagctggaggagtattatgcagacccagcgtgatggccccgcacctgtgctggagtcagcagcaaacacctgcccaataccaaagcacattaccattctgaccccctgcctgtgcctcatgatattcagtggtgcttactcctttttttta

SEQ ID NO: 8539 - DNA, 460 bp, Chlorella sorokiniana
  Clone ID: LIB3602-108-Q1-K1-A10
ccgactgctgccggcctccccgcgaggagcagaagaagcacgctaagagcgcacttgcaggcggcagagaggattgcacaacatgggcgcggtgcgccagtttgtgctgttctttggcggcctgggcgtggcatggtgacgctgaagagcatggaccggctgctgtactcgctggaggagacgcgcgaggagcggctcaaggccaatgagctgcaccatcgggccctgcgggtacaggcagagatgctacgagagcgagaggcgcagcagtagtgaagagtgcttctctttgctcagcaaggctctccactcttctcttgctgccgctcggctgcagccgcgctgaagcgggcgctgccggccccatttctcaacccactccctcacttcttcatgaacattgttcaaccacagctgcttgtactccctgctactttgtgctgcatgtaaaatagagttg

SEQ ID NO: 8540 - DNA, 105 bp, Chlorella sorokiniana
  Clone ID: LIB3602-108-Q1-K1-A12
aaaaaaaaaaaaaaaaaaaaaaaaaaaaaaaaaaaaaaaaaaaaaaaaaaaaaaaaatatatttaaaaaaaaaaaataataaaaaaaaagggagaaaaaataaaa

SEQ ID NO: 8541 - DNA, 383 bp, Chlorella sorokiniana
  Clone ID: LIB3602-108-Q1-K1-A2
gaccacgcgtccgggtccgccacccttccccacaaccaccgtcgcgccgcaagcagctgggacgtgctgcagttcagcctgaacctgcgaggcaagcagtgcgctgcgctggctgccacggtgcgccacgtcacgcgcacccgctgaccggcggcgacgtgcccgccttctggcgctccctgggctttgctccccgcttccagctgctgcgccgcggcagccgcttctgggtgccgctgggcgggcaagaggtggaggtgaccctgtgccacgtgctgcgcctgccgctgtccgcggacgccgccagcggcagcggcgcagctatagatgcggcggcactgcaacgagctgaggatgtgtccccctggggcggctgcttggtg

SEQ ID NO: 8542 - DNA, 416 bp, Chlorella sorokiniana
  Clone ID: LIB3602-108-Q1-K1-A3
gacgctccccatcggcccgctcagggcctgggtgcgcggcaagggcggcatgattgtgggcgacctgcccccctacgaggccttccggatcggtggcaccaactccgtgcgcggctacagcgagggcggcgtaggtcagggcgcaactatgtggcggggtctgcggagctgcggataccgctggtgtcccccatcgaggccactatctttggagactggggctcagacctggacagcggcggcacggtgacgggcgacccagcgggggcgcgcggcaagccgggcagcgggtatggctacggcgcaggggtgcggatagacacgtccatcgggccgctgcggctcgagtatgccatgaacgaccggcagcagacgcgcttccacctgggcatcggcacggctggctagatgctgcg

SEQ ID NO: 8543 - DNA, 376 bp, Chlorella sorokiniana
  unsure (1)..(376): unsure at all n locations; Clone ID: LIB3602-108-Q1-K1-A5
gcagggggcaaaacaggcaccatgcccaagaagattgaggagattaagaagttcctcctcaccgcccggcggaaggatgcccgctccgtgaagatcaagaagagcggcgacgtgaccaagttcaaggtccgctgagncgctacctgtacacgctgtgcgtggcggatgctgacaaggccgacaagctgaagcagtcgctgccccccggcctgcacgtccaggagatctgagcggctgccggccggctcagcgcgctggcgggagcagccgcggcgtccccggcagcatcagtgtgatatgccgtgcagcgccgccacccccagtgtaacttgaagctttttntntaaaaaaaaattatttaataaaaaatatttaa

SEQ ID NO: 8544 - DNA, 461 bp, Chlorella sorokiniana
  Clone ID: LIB3602-108-Q1-K1-A7
gctgcgccaggcagcattgccgccatcatgaacgaggcgaagcacgaggtgctgaatgaccagcccaccaagctgggcgagaacgacgagcctgtgcccggcggcgacaacgatgtgcccaccaaggtgcacaagaacgatatgaatgacatcaagtcctgagtgaagggtcgccgaaagggcagtgcacgagcgaagggtcagcgccgcccaaacacgaaatcgaatgcagcaggctgaacgccgcgcaatgaactggtgatggccgccggctcaagcggcctgacttgcaccaaacatgccagccgctgcccaattgagttgcaattttgctgaagtgccctccacctccttcaatgacgaatgcacctgcatccaacaaatgctgcccggagcgttcccatgcctaccacctcaaatgcaccctcttcccctgcctagccacacagtggcttgtaatg

SEQ ID NO: 8545 - DNA, 434 bp, Chlorella sorokiniana
  Clone ID: LIB3602-108-Q1-K1-A8
cagcagttggcgtggtgcctgcagccaagcccgtggctgctgttgccccggccaaggcagcacccaaggccaaggcagcaccagtggtcggccgcaagatgcgccgtgcttaagcccttgcccccaagccactagtcacccatccatcaccacccagcactgccatcatttcagcagtagacctgcaacccagctagctaggcagatccctcacattttgaccgccatgctctgcctgagcaatgccgcctgaaccgcagttgcatagtcccaaggccgtagcagacactaccgaccctttttcattccaagatctgtcccctatttgtcgattgctccctgatcccctccctgatgcacgctctgatatgcccgccctcccacacttgacggcattcaaacaacccctcttcttataagtttgagcgctccca

SEQ ID NO: 8546 - DNA, 383 bp, Chlorella sorokiniana
  Clone ID: LIB3602-108-Q1-K1-A9
cttaggctgagaaggagagcgtaaactcgtcaccatggtggccgccaagaagaccaagaaggctcaggagagcatcaactcccgcgtggcgctggtgatgaagtcgggcaagtacacgctgggctacaagaccacgctcaagacgctgcgctccggcaaggccaagctggtgatcatctccaacaactgccccgccgtgcgcaagtcggagatcgagtactacgccatgctgtccaagaccggcgtgcaccactacaccggcaacaacgtggacctgggtaccgcgtgcggcaagctgcaccgcgtgtccgtgctgaccgtcaccgaccccggagactctgacattgtgtccggcatgtaagcggcgcaccatggcgaataat

SEQ ID NO: 8547 - DNA, 539 bp, Chlorella sorokiniana
  unsure (1)..(539): unsure at all n locations; Clone ID: LIB3602-108-Q1-K1-B1
ccgagaaccccgtaaacccaagtcgagcccccgctcttgcacagccctcggtagcagcaagacaaggcaggccgctggcggcgggtgacttatcaagcccgccgcagcaacccctgcacaggacagaatggttttgagcancctgctgtttgcggcccacgccgctgcccatattctctccccctgccagttctctctctcgcgcccccctgcatgcacaaacctggctggccgctcgcgcaccgtgcctccgtcccccgcgcttttctggtgccgcccggcgagtgcgctttttgacagtggtgtggtggagctccggcccccaccggttctgcgctttgattaacctaacgtgcccgcccccgggcactctgataccaagatccccatgcacgctcccagcctccctacacatccttttccgcacctacccaccccttgcattctttctctgagcagcagcgcgcgcctgatgcgccgtccagcccagctgaacgcgcgcgtcggtggcgaacgccgtggtgtgaatatgcatgttg

SEQ ID NO: 8548 - DNA, 509 bp, Chlorella sorokiniana
  Clone ID: LIB3602-108-Q1-K1-B12
ctgcttggctgcaccctcggcggcagcatggcacacagccctgccgcccgccccgcctgtttctcccaacgctgctgccgaatcaggggttagctgtaccatgcagcagccctgcgccaagcctgcgctcctgcgtttttgatcttccctagggcacgcacaccacgtttattcccacctgttgcctttcatcatcacaatatgcgggctgtgtctcccgctccaacggtaacctagcacttagtgtgatgcctgcttgctagagctgcacagcaggcgttgccctgcacttgccccttctgttttacagcagcgtgtgggcaacaaacgctcgccgctgcctgtgtttgctggtagtaccccctgcctgctgttgcgccatcccatcccatccttttcatgcaatcgccaaatacccttagcgctgccttccctcctgcactgctcccacccctgtaaataagaagtgctgctccccaaaaaaaaatcgggaacaagtcccgttaatt

SEQ ID NO: 8549 - DNA, 471 bp, Chlorella sorokiniana
  Clone ID: LIB3602-108-Q1-K1-B2
gccgccgtgtacgccggcgagaactaccgccacatcgccatcgcctaagcgcttcagcgatgagcatccgctgggccgaggcagtgcagcccaggcactgctgctgccactgtgcaagccgcggaactttgccggcctgagtgcacttgcggtgggcaccgagcaaacccaaacatgaggcacggcggggatgaccagctcctgctagccgcagattgagcagcccgcagcagccgccccgtcgtgcggcggtgcctgatccgtggacagtgcggcgcgcattagcgctcgctgcccgcggcacatgtgccagccatgatctaattctagatttcccttgctgcccgcgtggcgcctgcgtgcaccacggggcctctccctcttgcgcctgcccctgttgactacccaggcgcttcgctttctcccatgccattgctgcgaagacccttttgacacaaccacacgcccaaa

SEQ ID NO: 8550 - DNA, 455 bp, Chlorella sorokiniana
  Clone ID: LIB3602-108-Q1-K1-B3
aggcgccgcaggagggtaaagagcaaagatgccggcgggccagggctaccgcgcgcgtacgcgccacatgttcagccgcggcttcaggcggaagggcttcatcccgctgtccacctacctgaccaactacaagctggtgactatgtggacatcaaggtcaacgccgcggtgcacaagggcatgccccacaagttctaccacggcaagactggctgcgtgtggaatgtgaccaagcgcgccgtgggcgtggagctgctcaagcaggtcaacgggcggtacatcaagaagcgcatccacgtgcgcatcgagcacgtgacccccagccgctgccacgaggagttcctgcgccgctgcaaggagaacgacgcggcgcggcacgcggccaaggtggagggcaagccgctgccggtgctcaagcgccagcccaaaggcccccggcaccaggccataatgct

SEQ ID NO: 8551 - DNA, 493 bp, Chlorella sorokiniana
  Clone ID: LIB3602-108-Q1-K1-B4
gcaagaagtgctctgagggcaagacctgcaagctgaagcgcggcaaggcgcgctgcgtgcggcagaaggaccaggtcaacccctgcgcggccacgctgtgtgccattggcaaccagtgcgttgtcgagggcggcaaggcccagtgcatcagcgtgtgtgcaagcgtgcgctgcaaggacggcctggagtgccagccggatgagaagggcaaccctcagtgcgtggcgcccgctgccaccaacccctgcgccttcacaacctgcctggttggcaacttctgccaggtcgagaacggccaggccatttgtgtcaccaactgcgcgacggtcaagtgcacggacggcacgcgctgcgagactgacccacagtccggcaatgcggcgtgcgtccctgacggttttgccatgcggcgcatgagctaggctgcacaaactgctgctgtggagcagcacacttctgctgctgcccgccctgttggagcctttggctgttt

SEQ ID NO: 8552 - DNA, 408 bp, Chlorella sorokiniana
  Clone ID: LIB3602-108-Q1-K1-B5
gctgccccgagcggagtgccgccttgcctagcctgccgaggcctcgcgacccgcgctttcacccagtgccaccatgtccagcaccgggcgccctcgcgtgaccgctgagcgcctgagcgacgccgaccagcttgggagcgcacccacttcatgtccatcggcacgggtgcgaccgccggccgccggccgggcgccgaggaagacgacttcctgcccaccatcgccacctcctcctcaggccccgtcggccccagcagccacaagctgagccgccacagctacggcccctcttccccctgcagcccgcactccccgcgcgtgggcgaggtgtggcgcacaggtcaggcggcggtgtatggcggctggttccgccccaaccccaagcccaagacccaggggcagcagtga

SEQ ID NO: 8553 - DNA, 549 bp, Chlorella sorokiniana
  unsure (1)..(549): unsure at all n locations; Clone ID: LIB3602-108-Q1-K1-B6
ggcgccgaggggagagcacgatgcagatcttcgtgaagaccctcacgggcaagaccatcaccctcgaggtggagtcttcggacaccagcgagaatgtgaaggccaagatccaggacaaggagggcatcccccctgaccagcagncgcctgatcttcgccggcaagcagctggaggacggccgcaccctggcagactacaacatccagaaggagtcgacgctgcacctggtgctgcgcctgcgcggcggcatcattgagccgtccctgcagatcctggcccgcaagtacaaccaggacaagatgatctgccgcaagtgctacgcccgcctgcacccccgcgctgtgaactgccgcaagaagaagtgcggccacacctcgcagctgcgccccaagaagaaactcaagtaaactactcgcttcggcacgagcggaagcggcatgagcggcagcaaccgtttgcccccccctcgccccgccagccgggatgccatgacagcaccggctgctcaacttgtgatgtgctgcatgtcaattgctgctgcggaaatg

SEQ ID NO: 8554 - DNA, 432 bp, Chlorella sorokiniana
  unsure (1)..(432): unsure at all n locations; Clone ID: LIB3602-108-Q1-K1-B7
gcgcagccaggagcagcctgagggcgagccgcgcccgctgctgcgcccagcacagcctcggcctctggatcgcagcccagccctgcggaagtggcttgacaagcgcgcacatgcccagtgccaaagcgcggcttggccaattttctggagcagaagcagcgggcaggcagatggccgcagctggagtggtttgtggctgcttgcatgctgcgcacggagtgcagcagcgcttgtgatgacagggtttgcagcaccttgagcgctggattgtttgcctccctgctgctgtgcgcatccgtgtttcttacagctgtgcacagtgtgtgcgtctctgtgcaatactgttcatgtgccagggcacagattgctctacaatggaaaaggtgtcctgcacagttgtaacttctgttcagcaaaaaanaaaaatgaaaa

SEQ ID NO: 8555 - DNA, 333 bp, Chlorella sorokiniana
  Clone ID: LIB3602-108-Q1-K1-B8
cccatcagtcgtttacatgaatcagccctggagaggggtacatggccaggctgggtcagagaaaaggtcaaacaggggaggtagccatgaatgaaggcaacaaaatgagggatgaaaagcttgggattggattgggttgactttcgggtgcgttgggttgcattggcaagagcagggtaggaccgtgggcaaaactgcaaagcgagcattgcggtgtttttctcaagtggaaggcctccttcctttctcaggcgccttgcatcgtctgggcagagtcagcgctgaagcgccggcttttacgcacgctgcttctggtacttttgctgcaccttg

SEQ ID NO: 8556 - DNA, 355 bp, Chlorella sorokiniana
  Clone ID: LIB3602-108-Q1-K1-B9
cggacgcgtgggcggacgcgtgggcacggccaggtgaagcagcctggccgggagccacggtatacgtccgcggcagcagggcggcgtgcgcatcggcctccattcaggccccgctggtctaagaactaaggcataagtcggccaccatgacctctgaaccaaccgttggtccttattgttctgcattcttccgttgcagcagcagcttgaacaaggcgcattttgtgactatcgcatttcagtgttgactccattcctgtgtctgcaccagcacctgcccgcttgcattcatctgcttgtactttattttgttgcccaagctgccaacatcgcggctgctgcaatgtgcatcgcc

SEQ ID NO: 8557 - DNA, 376 bp, Chlorella sorokiniana
  Clone ID: LIB3602-108-Q1-K1-C1
gcctgttttcagaggaccgcttgctccggaggcgcccaactggtggccacagcggcgcttgtacaaacccaaaaggccgatcattcgggacccccctgcagccgcggcagtgctctgcactgccgcgtggctgccctagttttggggtgccgccggccccccgccgctgcccgcaccccaaaccctgaactggtggatacagatcacccctttttgcacatagtttgcttggcatttgatctgccaagcggctgtcctgtccttcctgtatcattcaccctctgcatgtttagcccttcggtagcaggattgattgagccacccccattgattttgtcgtcatgcacgggatttctttgcctaccagccttgtgat

SEQ ID NO: 8558 - DNA, 502 bp, Chlorella sorokiniana
  Clone ID: LIB3602-108-Q1-K1-C10
agcggagcagggagcaagcgccatggctcccgcagacaagagcaaggccgccaaggccgccaaggcggtcaagaagagctccttcaggaagacgaagaagccccgctacagcgtggtgttccaccgccccaaaccctcgttcgcagccgggaccccaagttcccccgcgtcagcgcgccccgccaggcccgcctggatgagcactccgtgatcaagtaccccctgaccactgagtccgccatgaagaagattgaggacaacaacaccctggtcttcatcgtggacgtgcgcgccgacaagaaggcgatcaagaaggctgtggcccgcctgtacgacatccagaccaagaagatcaacaccctcatccggcccgacggccagaagaaggcgtacgtgcggctgaccgccgactacgatgcgctggatgtggccaacaagattggcgtgatctaaaacgtgcggctggagcggggcggttccccggcccttcccaacccaccct

SEQ ID NO: 8559 - DNA, 357 bp, Chlorella sorokiniana
  Clone ID: LIB3602-108-Q1-K1-C11
ggttaaggagctgaagaacggccgcctggccatggtgtccatgctcggcttcggcgtgcagggcctgatcacccgcaagggcccgagtgagaacctggctgaccacctggcggcccccgacgccaccaactttgggtggactacgcccccaagtccgccggcatcggctactaagctgtttccgtcgcttgactggcgccgcccgctcgcccgcccgctgagtttacggtcactcgcggcaacaggcagcagcggcgtctgtactttctgactcctccggcgattgctggtggcgcaccttgcttgctttgatgcttgcttcaggggcctaagcacccttctctgcaacacatgaac

SEQ ID NO: 8560 - DNA, 529 bp, Chlorella sorokiniana
  Clone ID: LIB3602-108-Q1-K1-C12
gcggcagcggcgtgtgctgaaccagcgcctgaaggtgccccctgccctcaaccgcttcacccgcacgctggacaagaacatggccgagagcctgttcaagctgctgatgaagtaccggcccgaggacaaggcggccaagaaggagcggctgctgaaggaggcggaggcgcgcgaggctggccaggaggttgagaagaagaagcctgtggtggtcaagtacggcatcaaccacatcacgcagctggtggagagcggcaaggcgcagtgcgtggtgattgcgcacgacgtggaccccattgagattgtggtgtggctgcccgcgctgtgcaagaagatgggcgtgccctactgcatcgtcaagggcaaggcgcggctgggcaccgtggtgcacaagaagacggccaccgcgctggcgctgacggcggtgaagaacgaggaccagcccgagttcgccaagctggtcgagttcttcaagaccatgtacaacgacggtccccgcgtcagctggggcggcggcatcatgggcccc

SEQ ID NO: 8561 - DNA, 378 bp, Chlorella sorokiniana
  Clone ID: LIB3602-108-Q1-K1-C2
ccaccctgtaccgcaagcagcaccgcaaggacctggaggcgcatgttgcccgcaagaagcggcgcaacgtgaacaaggcggccacccgcgccgtggcgggcgccagcctggaggtgatccagaagaagaagagcgagaagcccgaggcgcgcaaggcctcccgcgaggcggcgctgcgtgagatcaaggagcgcgccaagaaggccaaggccgacaaggcggtgcagaaggcgcaggccaaggcctcgggcgccggcaaggctgtcaagaacatgcctaagggcgcgggcaagggcggcgccaagagcaccggccgctaagccagcggcaatgcagcgggcgtagcggcctgctgggccgctgccgttgtaacgcact

SEQ ID NO: 8562 - DNA, 450 bp, Chlorella sorokiniana
  Clone ID: LIB3602-108-Q1-K1-C3
caggcacctgccccaccactcctagcagcagcaaatcgccaccatgtccgagaaggctgcgatcaaggagggcggcaagaagggcgtggaccttcagggtgtgaacgccatgggcggcgtggtgttcttcaacctgcggtggatgttcccaatggcgacatggcgctgctggagaaggtgatggagggcgccaacgcccccgtggacgaggctgctgaggagcgcaagggtggcgctggcgacctggccaagtgcttcctgtccgcgggcgacaagcagctggccatgttcttccacctgcccaagcagctggcggctgacaagggcgtgaccctgaaggagtgggccgcggcggtgctggcacccgtggagggccaccaagtggttgatgagagcgaagagttcctgaaggtcgtctcgccactggaccaggagaaaggccgctttccc

SEQ ID NO: 8563 - DNA, 500 bp, Chlorella sorokiniana
  Clone ID: LIB3602-108-Q1-K1-C4
aacgtggccatcggcaagttctgcgagattggcgacggcgtgcggctgtccaactgcgtcatcctgaaccgggtgacgatcaagaacgtgagcctggtcaaggacagcatcatcggctggagcagcaagatcggagctggtgccgcatcgagcacaaggcggtgattggcgaggacgtcttcgtgaaggacgaggtgcagctgaatggtgccatcgtgctgccccacaaggacctcaaggagtcggtcatggaacccggcacaatcatcatgtgatgcggctggctcgtttacaactgcatacctgcccccccggcccctggagcagcactgaagcatgccgtcctgacgggtgcccgccgcgcccctgacgagacgcaccaccagccacggctcacccccaataatcactgtgcaatgcccaccctgcccatttttcattctctctccctttgtgcactgcgagctaggcagttttgcattggcctccttgccccgccc

SEQ ID NO: 8564 - DNA, 469 bp, Chlorella sorokiniana
  Clone ID: LIB3602-108-Q1-K1-C5
cacgctgtggagcgcgagaagatggagaagtggagccccgcggagtctgccatctacaagctgttcctgggcaccccgctgaagctgtgtgcctccatcggccactggtggatctggcactttgacctgagcaagtacaccgagcagcaaaagccgcgcgtgctggtcagccttgcagcagtgggcctgttcatggccgtcggctggccgctgcttgtgtactacaccggctgggcgggcttcgtcaagttctggctgatgccgtggctgggctaccacttctggatgagcaccttcaccgtggtgcaccacaccgcgccgcacatccccttcaagcccgcgggcgagtggaacgcggccaaggcacaactgtcgggcaccgtgcactgcgactacccccggtgggtggagttcctgtgcttcgacattaacgtgcacgtgccgaaccacgtggatgtcaaagatcccc

SEQ ID NO: 8565 - DNA, 431 bp, Chlorella sorokiniana
  Clone ID: LIB3602-108-Q1-K1-C6
gaaggccaccttccagctggagatcctgggcgtgaagaagaaccccaacggccaggcctacacggggctgggcgtggtgaccaagggcgccatcattgaggtcaatgtgtcggagctgggcctggtgacccccgcggcaaggtggtgtggggcaagtacgcgcaggtcaccaacaaccccgagaacgacggctgcatcaacgcggtcctgctggtgtaaacctcgcaccccgctgccagcagcctgtgccggtggtccgaccgcagcagcagcccagcagcggcggtggttgcaccgccacgctgccatggagcgtgggctgctgctctgccaggttgagagccgcgccgctggttgctgcgcccccttgtagcattattggccctcccccaggccgccctgtagcattgatctttttcctgccccccatg

SEQ ID NO: 8566 - DNA, 345 bp, Chlorella sorokiniana
  Clone ID: LIB3602-108-Q1-K1-C8
gagcttgattgtttaacagcacagtcccgatctcacaagtcgccatagtccagtgaggcacgggaagctagcgagctctgccaggagggctgcagcgacaggccggcgacagcggcgtcgctgcccccacagcatccaagtcgggcagtgcagcggttggttcgctggcgaggccattcccaggtggctgggctgcctgctgctgctgctgcttgctgagcgatgccgatggctggcaggtgccagggcctgctgccacggcgatgctgctcctgttgaagggtgagcgcagcgccccacactggtcagccgccgctcccactatgctgccgtcagccgccaggc

SEQ ID NO: 8567 - DNA, 324 bp, Chlorella sorokiniana
  Clone ID: LIB3602-108-Q1-K1-C9
aaaaaaaaaaaaaaaaaaaaaaaaaaaaaaaaaaaaaaaaaaaaaaaaaaaaaaaaaaaaattaaaaaaaaaaaaaaaaaaaaaaaagggggaaaaaaaaaaaaaagaggggggggggcttttaaaaaaaaaaaatacgtccccttttttaaaaatcaaaactttttttatgggttaaccaaaataaaatttttttttttggggttaaaaaaataattaattgggaacacttttctaaaccccattttatttaaaatctttccattccccttttaattaggtttgaaaaaaaaaaaaaatccccaacattttgtaattacaaaa

SEQ ID NO: 8568 - DNA, 419 bp, Chlorella sorokiniana
  Clone ID: LIB3602-108-Q1-K1-D1
cgctcagcctcacgctcttcactttcttcggccaggtgatggtggttgtcacgccctccctgctgctggcccagctgctcaccgggtgcacgtcaatgatgtggttcatgtttagcgggttcatggtgccatacccatccacacctacgggctggaagtgggcggtgcgcatctcacccaccacgtacatgctttggggcttggttgggtcccagctgggcggctgcgacacaaacatgagcggctatgggcccgaccccgtgcccgtcaacgtgtttctggccgaggtgttcgacatcaagctggacttcatttggtggtgtacgctcatcatcgccggcttctgcctcaccttcattgcggcctcggcggcagccatgcgcttcctcaacttccagcggcgatagtagataatagct

SEQ ID NO: 8569 - DNA, 493 bp, Chlorella sorokiniana
  Clone ID: LIB3602-108-Q1-K1-D10
cgctggcgcacacgcggcggataaattgaagatcacgatcttgaagaaggccgagaagtgcgacgtgacggcggagaacggcgacgcggtggaggtgcactaccggggcacgctgacggacggcaagcagttgacgcgtcatacgaccggggcgagcccttctccttccgcctcggccagggcatggtgatcaagggctgggacaagggcgtgaagggcatgtgcgtgggcgagaagcgcaagctggtcatcccgccccacctgggctacggcgaccgcggcgctggcggcctcatccccggcggcgccaccctgatcttcgaggtggagctgctgggtgtcaagggcaagtcggcatgaggcggtcggcgcacagtagcactggggagcacaggtcagcctgatgcacgacagcagcagattcagcttggtgggcgtagcgcaaccgctgcgtgtttgccgtgtgccggaagccggaccatgtccctttacc

SEQ ID NO: 8570 - DNA, 299 bp, Chlorella sorokiniana
  unsure (1)..(299): unsure at all n locations; Clone ID: LIB3602-108-Q1-K1-D11
gcgggtgccgctggacaaggcagcggaagcgcaagaccggaccaagcaaggtcacaaccgcggcaagatcgtgctgaagattgcagantgacggcaactagtatgtatgtgctgggacctgcgggcaggccacagctgttgtgctgagctactgctgtgagattttatgcagacgtgttttgtgactagcagcgcccttgacgcccaaatcgcacccattcagcagctgcttgtattacatggtgcagcnnaaaaaaaaaaaaaaaaaaaaaatagagtaatatataaaaaaaaaataa

SEQ ID NO: 8571 - DNA, 422 bp, Chlorella sorokiniana
  Clone ID: LIB3602-108-Q1-K1-D2
gtctgcggacaccatcgagaatgtgaaggccaagatccaggacaaggagggcatcccccctgaccagcagcgcctgatcttcgccggcgagcagctggaggacggccgcaccctggcagactacaacatccagaagagtcgacgctgcacctggtgctgcgcctgcgcggcggcatcattgagccgtccctgcagatcctggcccgcaagtacaaccaggacaagatgatctgccgcaagtgctacgcccgcctgcacccccgcgctgtgaactgccgcaagaagaagtgcggccacacctcgcagctgcgccccaagaagaaactcaagtaaactactcgcttccgcacgagcggaagcggcatgagcggcaacaaccgctggcccccccccgccccgccagccgggatgccatgacagca

SEQ ID NO: 8572 - DNA, 427 bp, Chlorella sorokiniana
  Clone ID: LIB3602-108-Q1-K1-D3
tacagcacgaacttcgtgcccagctacctgaccggcgagttccccggtgactacggctgggatacctctggcctgtcggccgaccgcggccaccttcgctcgctaccgcgagatcgaggtcatccatgcccgctggccatgctcggcgccctgggctgcgtcgtgcccgagctgctggacggcaccaaccacattgcctggttcaaggccggcgccgagatcttcggcgacgacggcatccagtacctgggcatccccggcctgatcaacgccaagtccatcgtggcgaccctgatcgtgcaggtggtgctcatgtcgtatgttgagggctaccgcgtcaacggcggcccggccggcaccggcctggacgctgtctaccccggcggcaacttcaaccccctgggccctgctgacgaccccgacaccc

SEQ ID NO: 8573 - DNA, 262 bp, Chlorella sorokiniana
  unsure (1)..(262): unsure at all n locations; Clone ID: LIB3602-108-Q1-K1-D4
aaaggaaaaaannnaaaaaaaaaaaaaaaaaaaaaaaaaaaaaaagggcggacaatataaaatttccaatcttacatacacatccaaagcagcgccacccgtctacaagatcgaaacctcaaacattccatccccctattaaccaactatttttcctccaaaaccccataaattcccaacctgttccacttcacaacatgcaaaaatcgaaaatctcccaatttccaaacttaccccaccatccccccttccccacttttcc

SEQ ID NO: 8574 - DNA, 303 bp, Chlorella sorokiniana
  Clone ID: LIB3602-108-Q1-K1-D5
ccggcagctgcggcgcctggaaatatcgttctgaaccaagcttgaatgaaacctgctgaacattttgaacactaagtgggtcgctcgggctgccacagaaacgggcatggcggcggtcagttgcggagctctttcagaattgtgcaacttgattgtcaccgaatttttgtttcatgaccaggttgagttgctgatctgtacagattcacaccgtttctgtaatgcggggtgcgcaaaaaaaaaaaaaaaaaaaaaaaaaaaaaaataaaaaaaaaaaaaaaaaattaaaaatttataaaaatg

SEQ ID NO: 8575 - DNA, 522 bp, Chlorella sorokiniana
  Clone ID: LIB3602-108-Q1-K1-D7
gccagccgctgtcctgctgtgacctgctgaggcgacacggtggcacagcggctggtgattgcatcatgccagcagtgcacgagaaggtgagtcagcaggcggcccttccaccctctgccgctagcacaagctgcggccgcggctggcagctgccgccactccgccgttccgcctttcagcagcgatttcgagcctctgcagttggggagagtcggggcccgcctttcaagtgaacacttaaagaacacaatcgccattgcagcaatgaaccctttagcggcgatgctgccgtgctgcccagccatccctcatcctcgccctcaccaacccaccagcctgccatcctatggcaccgccctccttacctgttggtcatcactctccacccgccattaagccctgctgggcacactcagcatgccgcagccccgtagccccttgcccctctcccaccagcctgctctgcgcagccaaggtggtttgatctttgctgtattctggccattatggaatcaggccatc

SEQ ID NO: 8576 - DNA, 290 bp, Chlorella sorokiniana
  Clone ID: LIB3602-108-Q1-K1-D8
aaaaaaaaaaaaaaaaaaaaaaaaaaaaaaaaaaaaaaaaaaaaaaaaaaaaaacaaataataatacatataaaaaaaaaaaacgaggcggcgccctttaataaataccgttagatcaaggtcatccataccctctatccattctctgcgccctgagaatatcaattacttcgcctttttttacaaaacctaccacattgtctaattcaaggcctactccaatatcttctctgacgacaacatccagtttctcccatttaccctttattattaaaatcccctccattatc

SEQ ID NO: 8577 - DNA, 99 bp, Chlorella sorokiniana
  Clone ID: LIB3602-108-Q1-K1-D9
agaaaaaaaaaaaaaaaaaaaaaaaaaaaaaaaaaaaaaaaaaaaaaaaaaaaaaaaaaataaaaatataatacataaataaaaaaaaaagatgttttt

SEQ ID NO: 8578 - DNA, 252 bp, Chlorella sorokiniana
  Clone ID: LIB3602-108-Q1-K1-E1
aaaaaaaaaaaaaaaaaaaaaaaaaaataaaaaaaaaataaaataataaaataaaaggttttatttttaaaaaaaaaaaaaatttaaaaggggggggtgtcgttttagaaggttttaagtttacttacttttgcttcaattatttgtttttttataatttaatctaaataaaataaaattgatgcgttttaaaaaatattaaacttggaaaactttaatattccaaatttattaattttgaattaaatcccc

SEQ ID NO: 8579 - DNA, 185 bp, Chlorella sorokiniana
  Clone ID: LIB3602-108-Q1-K1-E11
gcgcgacaacttctactccctgtacgccaagaccctggcgtaagcggcctgcacttgctcctgcttgagcctcgactggcggcgggcgggaccctgtggcagtgcgctcccgcttgcgcccgctgcctgacttgacttcagctccactgttgcaccgaggggatggtgtaacatgtatgctgggg

SEQ ID NO: 8580 - DNA, 528 bp, Chlorella sorokiniana
  Clone ID: LIB3602-108-Q1-K1-E12
gtgggcaattcgttcgcgatggtgaacgtcccgaagaccaagaaggccttctgcaagggcaaggagtgccgcaagcacaccatgcgcgaaggtcactcagtacaagaccggcaaggcgtcgctctacgcgcagcaagcggcgttacgaccgcaagcagtccggctatggtggccagaccaagcccgtgttccacaagaaggccaagaccaccaagaagattgtgctgcgtctggcctgcaccgtgtgcaaggcccagcacatgcacgccatcaagcgctgcaagcacttcgagatcggcggcgacaagaaggtcaaggggctatactagtaaaaaaaaggagagcggcaggcggagagcatgaccgagaaatggaggcagcggcgcccgctcaccctgggcggcctgctccccgcccggcgcctcgctttggccgcctctggccactcgtacgcctccttgtccatgcccttgtgcttcctgagctgcccaacctggcatgcaagcagcctggccgtctgtaatgcca

SEQ ID NO: 8581 - DNA, 406 bp, Chlorella sorokiniana
  Clone ID: LIB3602-108-Q1-K1-E2
agcagctgcagcacatcaccacgctgctggaggctcagccgccagcacagcaggcgcaacatgcgcagcaggcacagcaggccccggcgtggcagagcgccatgtttgagccgcagcaggcggctgagctggttgagagtgatgtggaggcaactctgtactctccacagcagctggcgttccttgcaaggaagcgcgctgccaagcgggcgcggaccgggcggccctgaaagtgtggcggcaccgctgggcggcgccgctgaaccgcccgccttgtggcgagcgggacccagttttgattcccagaagatccaaacccaagctggcattgatccaaataaatcaatcgacgatgttgatcggcaggcattggcgccattgtattgtaaatgtgcacgtgtgaaaa

SEQ ID NO: 8582 - DNA, 456 bp, Chlorella sorokiniana
  unsure (1)..(456): unsure at all n locations; Clone ID: LIB3602-108-Q1-K1-E3
gaagtgggtgcccaccaccaagctgggccgcctggtgcagcagggcaagatcaagtccctggagcagatctacctgttctccctggcggtgaaggagtaccagattgtggacttcttcctgggcggctccctcaggacgaggtgatgaagatcatgcccgtgcagaagcagacccgtgccggtcagcgcacccgcttcaaggcgtttgtggtggtgggcgactacaacggccactgcggcctgngcgtgaagtgcgccaaggaagtggccaccgccatccgcggcgccatcatcctggccaagatggccactgtgccggtgcgccgcggctactggggtaacaagatcggcaaggtgcacaccgtgcccaccaaggtcaccggcgagtgctgcaacgtgaccgtgcggctgaatccccccccccccgggtgccggcattgtggcggcccccacccc

SEQ ID NO: 8583 - DNA, 549 bp, Chlorella sorokiniana
  Clone ID: LIB3602-108-Q1-K1-E4
caaggactgcgatgagcggcgcggcctggcatcgttcgaggtgccctttgcctatcaagaggcgggcgagcgcaagcaggcgctagtgaagctgcggctgtgccccacccacgcttaccagctcaactaccgcagcagcaggaggccgaggccgcacagcggcggcgcgacaaggaggctcggcgcaaggccaagcggcggaagaaggagcgagaagagcggcggcgcaagcgcaagcgccgggggcgcagcaaagagcggcgcagcggcaagcggcggcgcggcagcggcagcagcggcagcagcggcagcagcagtgggccgtccagcagcagcccttcttcctcttcctcctcttcctcagacagcagcagcagcagcagcagcgaggatgagggcggggggcagcgcggcggcaagcgcaagcggcggcgcaacggcgggagtgaggcccgccccgctgcgcagcaacagcagcaggtgccgcctcatggtgacggcgcccgcagcagcttgcagcgggagtgcctggaaaagaatgattttgag

SEQ ID NO: 8584 - DNA, 314 bp, Chlorella sorokiniana
  unsure (1)..(314): unsure at all n locations; Clone ID: LIB3602-108-Q1-K1-E5
ctggagcgcctgaagaagatccggaaccaccgcggtctgcgccactactggggcctcaccgtgcgcggccagcacaccaagaccagtggccgccgcggcaagaccgtgggcgtggctggcaagaagaagtaagcagcttcttgcgggcgcggcctgcggcacgggcggatgctggcggctgggtgacggcggctggcgccgcccgcgcagcaaccccactggcagagccggcggcagcaggtggatccacaccagtcgttgcagtgctgccgtcgtgtaatgcacccttcgcnnaanaaaaaaaaaaataaaaa

SEQ ID NO: 8585 - DNA, 130 bp, Chlorella sorokiniana
  Clone ID: LIB3602-108-Q1-K1-E6
aaaaaaaaaaaaaaaacaaaaaaaactaatttataaaaaaaaaaaaaaattggtggtttaattaaaaaaacacagcgcttcctgctgaaggtttctcaatacaagaccgtctaagcgtcgatataaaatt

SEQ ID NO: 8586 - DNA, 425 bp, Chlorella sorokiniana
  Clone ID: LIB3602-108-Q1-K1-E7
cggacgcgtgggcggcggcctcaaactcggacgtcgcagccaggtcccaccatggctgaccagaccgagagggcgttccagcgggagctgagcgtgcagcgcggctacaacaagacggcgaagaagattgtggcaagggcggccagcggtggtacaagaacatcggcctgggcttccgcacccccaaggaggccattgagggcaactacattgaccacaagtgccccttcaccggcaatgtcagcatccgcggccgcatcctgtcgggcaaggtgaagagcaccaagatgaaccgcacgattgtggtgcgccgcgactacctgcactacatcaagaagtaccagcggtacgagaagcgccacaccaacatctcggcgcacatctcgccctgcttccgctgccacgagggcgacaccgtggtcatc

SEQ ID NO: 8587 - DNA, 438 bp, Chlorella sorokiniana
  unsure (1)..(438): unsure at all n locations; Clone ID: LIB3602-108-Q1-K1-E8
ggccggtctagcaggtactgggcagccatgacggcagctgaggtcaagctgttcgggaagtggagcttcgaggatgtggaggtgggcgacatctccctggaggactacattgcggtcaagcccaagtatgccgcttcaccaatcacagtgcgggccgnttccagaagcgccgcttccgcaaggcgcagtgccccatcgtggagaggctgaccaacagcctgatgatgcacggccgcaacaacggcaagaagctgatggcggccagcattgtcaagcacgcgtttgacattgtcaacctgctgaccgaccagaacccggtccaggtgctcgtggacgccatcatcaacggcggcccgcgtgaggatgccacccgcattggcagcgccggtgtggtgcgccgtcaggctgtggatgtgtcgccgctgcgccgcgtgaacc

SEQ ID NO: 8588 - DNA, 513 bp, Chlorella sorokiniana
  unsure (1)..(513): unsure at all n locations; Clone ID: LIB3602-108-Q1-K1-F1
tgatgtttgccaagcgcaagggcggctggcagcgccacaacgacgcgctgtccgccaccggcgccggctccgaggcctacaagctgtgagctgagccgacatcttttgcaacagctctgagccgctgagctgacctggctcatgccagctggcatgctgcagcacccccagcccgccaagcagcctggacagcagctggctgattgtttgcccgctggcctgtgcagcaggggcgctgcccggctgccacagtaatgcatccttaatccacagcatccctcacttcacctcgctgcgtgctgcatctcacgagcactattattgccgctacgttgcttcataccttggattgcgcagcctgccgccaccggtcttgcttccgtgccgncaggctgtgcaatgcaaagccgtctacccgcctcagccttttttgggcgctcctttcatcctgcccatggcatcccttctcccttctgccctagcactagaggttatgctaccacctgcgtccct

SEQ ID NO: 8589 - DNA, 520 bp, Chlorella sorokiniana
  Clone ID: LIB3602-108-Q1-K1-F10
gaactaccgccgcactgaggacggtcccgctggctacgccccgggtgtgggcaagttcgacgagtctgtgtactccaacatggacagcctgtaccccggcggccccttcgaccccctgggcctggctgaaacccggaggtgctggctgagctgaaggtgaaggagatcaagaacggccgcctggccatggtgtccttcctcggcttcgccgtgcaggcggccgtcactggcgagggaccctacgcgaactggtcgaagcatgttgctgaccccttcggctacaacctgctgaccatcctgtcctctgaggaccgcgccgccgtgctctaagcagccggccccgcctggcgcccgccgccgccccgagtgtagctctgtagtcccaccccttccctgtttccgcttgttcttgtgctctcagcatttggttgtgctccccctaacgagaaaaacaattttatcattctacaccgcacagccagcgccgatgcgcgcgctgtaatgctctgccccgcaaaaa

SEQ ID NO: 8590 - DNA, 405 bp, Chlorella sorokiniana
  Clone ID: LIB3602-108-Q1-K1-F11
gccacgcgtacggtcggactcaaactccgacgtcgcacacaggtcccaccatggctgaccagaccgagagggcgttccaccggcaggtgagcttgcaccgcgggtacaacaagactgcgaacaagattgtgccaagggcggccagcgctggtacatgaacatccgcctgcgcttccgcaccctcaaggaggccatcgagggcaactacattgaccacaagtgccccttcaccgtcaatgtcagcatcctcggccgcatcctgtcgagcaaggtgaagagcaccacgatgaaccgcacgattgtcttgcgccgctactacctgcactacatcaagaactaccagcggtacgagaagcgccacaccaacatctcggcgcacatcttgtcctgcttgcgctgccacga

SEQ ID NO: 8591 - DNA, 426 bp, Chlorella sorokiniana
  Clone ID: LIB3602-108-Q1-K1-F12
cggacgcgtgggcggacgcgtgggtttgggtttgacccccagaaggcggtcagcggcggcccagggggagagcctgagcacgacggcgacaggcgacagcgcctgtgaggacgctgagaggcagatgccgttcacacggagtgcttggaccagtgtggaggatcctgggcgaggaactctccaacggcagcacccagctgctcgccaagcttgccagcaaggcaggcggggccgggaggggaaaggtggcggcgcggcccggccctgctggcgtgaggggcggatgaagtgcggcaaacctttgttgagctgcactggtacggagtggagtatcatcgtgagaccattgtgaagcgtaacatgttaaaaaaaataaatattaaattataaattattttttaaaatatataattattattttatttt

SEQ ID NO: 8592 - DNA, 406 bp, Chlorella sorokiniana
  Clone ID: LIB3602-108-Q1-K1-F2
caaggacgtgatcaccggcgacacgctgtgcgacgagaaggcgcccgtgctgctggagcgcatggagttccccgaccccgtgatcaaggtggccatcgagcccaagaccaagggcgacctggacaagatgaccaacggcctgatcaagctggcgcaggaggacccctccttccacttcagccgcgacgaggagaccaaccagacggtgattgagggcatgggcgagctgcacctggagatcattgtggaccgcctgcgccgcgagttcaaggtggagtgcgacgtgggcgcgccccaggtgaactaccgcgagggcatcagccgctccgccgaggtgcgcttcgtgcacaaaaagcagagcggtggctccggccagttcgccgacgtggccgtccgctttgagccc

SEQ ID NO: 8593 - DNA, 326 bp, Chlorella sorokiniana
  Clone ID: LIB3602-108-Q1-K1-F3
cttgccccaggtcccgtcggagccatcgcagcaaactcagccacgatgcaggccgctctgtgcagctcccagaccgcctttgtgcgcggcaccgtggcggccaagccccagcagcgcgcggctcgtgcggcccgcctgtggtgtgcagcgccgtgaagaaggagcaggtggctgccggcgtgaccgccgccgccgccgcggtgctggccaaccccctggctgcccaggctgctgccaccctcagcctgaacaacctgatcggctccgtggtggcgggcggtctggtgctggccagcattgctggcgccatcaccgaggtttcaact

SEQ ID NO: 8594 - DNA, 414 bp, Chlorella sorokiniana
  Clone ID: LIB3602-108-Q1-K1-F4
tgcatagagagacttagaagtttggccgaccatggcggcgctcccccaccttattcgagccgcactgccccccgtttcacaccacaggagcccaccaagcccgcaaccttgcactcttttacacacaaaacaccctctcttcagctgccagcgtgtgcacaaccctccctggtgcggtccgcgcagcagccctttctttctcctcctttttatgccctcggcagaaccgcccgctgcctcgccgcggccggcaatgcacatgtgccacgcccaaaccaactccccacctggccctcactaccgcacctcaccacatgcgcccgtaccgtgtagcaccctctgcgctcaccttatgcatcccactgcgccccccctcggcattaattacaaacgcattcaaccaccgcacccccg

SEQ ID NO: 8595 - DNA, 418 bp, Chlorella sorokiniana
  unsure (1)..(418): unsure at all n locations; Clone ID: LIB3602-108-Q1-K1-F5
cgccagcgttgtcgcctcacccacacctcttgcttccctgcccggcagcccgcgggcttgccctgccgccactcgcgcccacacaggcggtcacctccagcttcctccgggcagcagcgagcagcaggagcagccatgcaggnccctggcagcgcggcaagccgccttttgcagcagcagcagcagcgcggggcggcggcccgcggcacgcagccgccgcgccgtcacggtgcgcgccgatgtcggcttctgccgcgacaaaatcagcgagcggcaggatctgacggaccagatcgagggcacctcggtggtggtgttcctgggtgcagacggcgcggaggtgcctgtggagtgccctaagggcggctacatccttgacgcgggcctggacgcgggtcttgagctgccggtcacctgc

SEQ ID NO: 8596 - DNA, 535 bp, Chlorella sorokiniana
  unsure (1)..(535): unsure at all n locations; Clone ID: LIB3602-108-Q1-K1-F6
caagttcacaggcctgttctggatgttcatgggtgtggccaactccgacaacaagctgtacgacgaggagatgcagaccatcgccaaggcgtaccccgagcagttccgcctcgactacgcgctgtcccgcgagcagaagaaccgcaacggcggcaagatgtacatccaggacaaggttgaggagtacgccgacgaggtgttcgacctgctgaacaacggcgcccacatctacttctgcggcctgaagggcatgatgcccggcatcttggagatgctcgagcgcgtggccaagagcaagggtctctcttacgaggagtggttcgagaacctgaagcacaagaaccaggtgcacgttgaggtgtactgagcggcttaaaccaaaccctggaaccgccagggctgaaaccctggatagccagggcggccgcccncgtggcacctatcaactcacttgctgacngccgtccgggcggcgcgccgcatcgcagcatgcacagcacagcgtgtgcggcaagcacccggcggcagtatgccc

SEQ ID NO: 8597 - DNA, 377 bp, Chlorella sorokiniana
  Clone ID: LIB3602-108-Q1-K1-F7
gaaggcggtggccatgcgcaagcacctggaggccaaccgcaaggacaaggacggcaagttccacctgattctggtggagtcccgcgggcaccgcctggctcggtactacaagcgtaccaaaaagctgccgccaactggaagtacgagtccgccaccgcctccgcgctggtgcagggctgagcgctcgcctcgcgcgtgagctgacggctgcagccacggctatctccaactggtgtgccagcaggcatcaccacgaagcagccgcagctctccagctggctctgcctgcgtttgcagcccctggcttgatgtgctgctctcttgcatgcatgcgccaagcgcatgtgtaaagctgctgccgacaaaatcgataaaat

SEQ ID NO: 8598 - DNA, 454 bp, Chlorella sorokiniana
  Clone ID: LIB3602-108-Q1-K1-F8
ccactggtagcagctcgagtgcacggcgcccgcttgcaagctgcatgcgctgctgcgctaccccagacagtgcacggctgcccaagctgcttggctgagaggttgcacctgcgcccgttgcgctgcgcaagcgcgccctgccggccgccgcgcccgcctagccgcctaacccaccccgccgcccgcccgctgctccgcttgtgagagccgccggctgcggcactgtatacctttttgcccgctgtgtgttcgctaccgcctcccctcctgtgcatgcctcggctcccgctcgatctccctctcgctccaagttcccgcatttgtttctcactcaccgccccattccctcttctttgcacccgtcgcttgtcatccggccgccgcgcgccgcgtatcacgttttgtgtctgattcctgcagttcgcacgaagcctaccgcccttccttggtgcac

SEQ ID NO: 8599 - DNA, 369 bp, Chlorella sorokiniana
  Clone ID: LIB3602-108-Q1-K1-G1
cggacgcgtgggcggacgcgtgggcaggccccgcaggagggtaaagagcaaagatgccggcgggccagggctaccgcgcgcgtacgcgcgacatgttcagccgcggcttcaggcagaagggcttcatcccgctgtcacctacctgaccaactacaagctgggtgactatgtggacatcaaggtcaacgccgcggtgcacaagggcatgccccacaagttctaccacggcaagactggctgcgtgtggaatgtgaccaagcgcgccgtgggcgtggagctgctcaagcaggtcaacgggcggtacatcaagaagcgcatccacgtgcgcatcgagcacgtgacccccagccgctgccacgaggagttcct

SEQ ID NO: 8600 - DNA, 430 bp, Chlorella sorokiniana
  Clone ID: LIB3602-108-Q1-K1-G10
cccgcacccagcgccgcgtgcaggcccgccgcgtggctgtggccgccaagtacggcgaggagagccgctacttcgacctgaaggacgctggagaacaccgtgggcagctgggacatgtacggccaggaggacaagagccgctacaacggcctgcagtccgagttctttgagcgcgcggccaacggcctgtcccgccgcgagtacatcctgggcctggtggccatcggcggcgccggcatcctggcttggggcggcaaaggcgcagcagacgtccgcttgcccatcactgtcggcccccagcagcccgcccaggtgggcccccgcggccgcctgtgagcggcgccagctcagcgggcgggcgaccgctagccggtacggcggcccaccagccatgccagcctagcagccagccgccctagcccccttgttg

SEQ ID NO: 8601 - DNA, 261 bp, Chlorella sorokiniana
  Clone ID: LIB3602-108-Q1-K1-G11
aagctgaagctgaagcagcttggggagatgctcggcatgcagacttgaaagcggctgctccctagacagccagcacagccggcgggtggattgtcacaatcgcctcaaggcaggctggccggcggccgacgtagctttgcagcacacccaatctaaccagactgcctggtcttaagtcttgactgtctcgttcatcactgtgtcacacaaatatcggtgcttgacagtttggaaaggtcgcggttgaaaaaaatggttggc

SEQ ID NO: 8602 - DNA, 351 bp, Chlorella sorokiniana
  Clone ID: LIB3602-108-Q1-K1-G12
gcgcggacgcgtggggcacgtgacccccagccgctgccacgaggagttcctgcgccgctgcaaggagaacgacgcggcgcggcacgcgggcaaggtggagggcaagccgctgccggtgctcaagcgccagcccaagcccccgcaccgaggccatcatgctggagaacgtgaagatggagaccatcacggccatcccctacgatatcctcaaggagggcgtgctctgagcgtgatcggcggcgacgttccgttgattgcggctgcagcttagtgagatgtaaccccgcagaaaaaaaaaaaaaataaaaatacaaaaaatgaaaaaaaaaaaactaaaatattaaaataagg

SEQ ID NO: 8603 - DNA, 388 bp, Chlorella sorokiniana
  unsure (1)..(388): unsure at all n locations; Clone ID: LIB3602-108-Q1-K1-G2
agcacccccagcgcagaggagcggcaggaggcgggcaactgctgccccatctgccaggacgcgtaccgagagcccaccaagctgccatgctcccacatcttctgcaacgactgcctgtcccaaggtttgagcagagcgcacgtgccccatgtgccgggctgcggtggggcccgcaagcaaaaagttcaagagcttcagcgacggccgcacacccgtcttccctttcctcttctgagagcagcagcattggcagacagtgtaaattgcatgcccagtgtgtatggtagtgccatttgcagcgctgagcgttagccatttcagtccctctgtcaattgtaacagtttcaaccttttnaaaaaaaaaaaaaaaaaaaaaanagagaatttt

SEQ ID NO: 8604 - DNA, 421 bp, Chlorella sorokiniana
  Clone ID: LIB3602-108-Q1-K1-G3
cggacgcgtgggggcaccgtgcagtcgcaagcacccacacacgttttgttatagcctgctggaagatgcccctcaactaaccaaagggggctggctcctggtgtccatggcaccaggaccccagctagatgtacccatgaacattgcgccataactgcgcacacgctattttgatggcagcccaataaatgctgccgcctgcacagctcgataaagcaaccagttgcacagggaaccttctccttttgccgtttaagctcagtcacaactcctgtctgcatgcctgcatgcattgcgccagcctcatctgctgctgcggttctcagccacaccgctgctattctcagcccacaccgagccccgaccctggctttttcatgtacccctgcctgccaatgactcgtgtaacaaccagcttttg

SEQ ID NO: 8605 - DNA, 417 bp, Chlorella sorokiniana
  unsure (1)..(417): unsure at all n locations; Clone ID: LIB3602-108-Q1-K1-G4
gccgggtgtggaggaggccgaggccgcccccatccaccgtatccgcatcaccctgacctccaagaacgtcaagagcctggagaaggtgtgcgcggacctggtgcgcggcgccaaggagaagcagctcaaggtcaaggccccgtgcgcatgcccacccgcgtgctgaagatcaccacccgcaagtccccttgcggtaacggtaccaacacctgggaccgcttcgagatgcgcctgcacaagcgcctgatcgacctgcactcccccgccgaggtggtgaagcagatcacctccatcagcatcgagccgggagtcgaggttgaggtcaccatcgccgacgtgtaagcagccatttcagctgtggaagctggtcgcacggtgcgcccctgaccgccgctggcgngccggtcgggccttcgg

SEQ ID NO: 8606 - DNA, 462 bp, Chlorella sorokiniana
  unsure (1)..(462): unsure at all n locations; Clone ID: LIB3602-108-Q1-K1-G5
cggagacggnggcgcacatgatcacgcccctgcccggcgccacccccatgaagcccggctctgccacgcttcccttctttggcgtggagcccgccatcctggacgacaagggcaacgagttggaggggccctgccagggctacctggtgatcaagcggccgtggccgtccatgatgcgcaccgtggcgggcgaccacccccgctttgagcagacctacttctcgcactacaagggctactacttcaccggcgatggtgcccgccgcgacgaggacggctactactggattctgggccgtgtggacgatgtgatcaacgtgagcggccaccgcatcggcaccgccgaggtggagagcgcgctggtgggccaccacctgtgcgccgaggcggccgtggtgcccgtggaccaccccatcaaaggccaggccatctacgcctttgtgacgctcatgaacggcattg

SEQ ID NO: 8607 - DNA, 252 bp, Chlorella sorokiniana
  Clone ID: LIB3602-108-Q1-K1-G6
ctctgcacagaacaagcgaagatgcgcgctaagtggaggaagaagcggatgcggcgcctgaagcgcaagcggcggcggcagcgggccgagtaagcggcctgccccgcagcccagcagcgctgcggcgcctggcgcaccgcccgctcgcacgcgtgcaacggcgctgcagcggccagccggcgtcacggagtccgggcgcccggcagccgccgatgaaatgtgacggccgagtgtgtaatgctcacgaccgtg

SEQ ID NO: 8608 - DNA, 544 bp, Chlorella sorokiniana
  Clone ID: LIB3602-108-Q1-K1-G9
gtgccgactgcgccgtgctcgttgtttcccctcatgttaggaagcggcgcaagaaggagaagaagcgcaaggagagggagcgcagctcgtctgtccactacgcagactggtctgcctttgatttctgcccttttgcctgcaggaagcggcgcaagaaggagaagaagcgcaaggagaagaagcggagcaaggacaaagacaagaagcggaagagcagcagcaaggacaaaaagaagaagcggcggcgcagcagcagcagcagcggcagcagctccagcagcagcggatccgactcggactgagcgggcggttcaaaagattcaaatataaaaagaattagtttgcccctaaatgtctaccggcgctgcgctgggcggccttctgctagcttgctgcggccggcggcttttcagccaattggcccgctgccatgccaacatgctagcatgctgctctctttgctgctattgctgttctcgctgcccccctgtgaccgcttgtgtttgcctgctcccgccactgcttgcgctctcgccccatgcaa

SEQ ID NO: 8609 - DNA, 366 bp, Chlorella sorokiniana
  Clone ID: LIB3602-108-Q1-K1-H1
tttgccgcagccgagctggaggatgagtttgctgcctatgcatgagcatgcagagcatgctgcgcacgctgagcatgctgtggcgggcgagcataccgcacgctgcgggtgcgcagcagtcatgcgccgccagcgagttgggcagcaggcggtttgcgctgccttgtctcccaggcccgggctagccggcccgccggcccgccccagttttctcgtttcatgccttcctcgttgatacacaccagcagcatccccacgatgaatgaacccagttttcctcactacctgtcgtcacatttctcgcgcctgcgtgccagcgccccgggcccacctgcggagggagccgtttgatttggcacccccttt

SEQ ID NO: 8610 - DNA, 330 bp, Chlorella sorokiniana
  unsure (1)..(330): unsure at all n locations; Clone ID: LIB3602-108-Q1-K1-H10
ctactggccaagcggcggcagcccgcgtgccagcccgctgcgccccaagcacagccccctggccgcaggcctgcctgccagcccaggcgcaggtcggcagtggggcattgccggcagcccgtctccccaccggctgcgcagcggcagcggcatgcctgggagcccgttgattggagcgcggtggccgggcagcgggctctgaatgtgctgggcgactggtgaccacatcttgaatgactgactaacaaagttattgcaaactggtcagggttgggcagtaaaggtagtaatttgctttcaattttaatcgcttgtaaaggggccgcangc

SEQ ID NO: 8611 - DNA, 435 bp, Chlorella sorokiniana
  Clone ID: LIB3602-108-Q1-K1-H11
cagacaccggagtggaacggcagtggcgagggcccagcgttgcaccgctcgactgggcgccagcagactccaaccccaagcgcctgagcctcccaggcctcgaccgcggcagcagctcttaccatgtccggaaggccctggccaagctgtttgacccgctggtcgcctggatggcgccgcgctaccaggcggtggtgggcgcggagctgcgcaagtacgggctgcggtacgaggacctgtacgacccgcagctggacctggacgttgatgaggccctgaagcgcctgccccaggacgtggtggatgcgcgcaaccagcggctgaagcgcgcgtgcgacatcaacatgaagcactctgagctgcccaaggacctgcagcagctgcagacgccctttgagttctacatgaaggacacgctggatctggtgaagctgg

SEQ ID NO: 8612 - DNA, 235 bp, Chlorella sorokiniana
  Clone ID: LIB3602-108-Q1-K1-H4
gctgcttcaagatgcacagcagcgtggcctgcgactggtggacgctcaaccatagatggtttggcggcaggccagactcccaagtgatgagcggctcccttggagcggcggtgctcgcatgccatatagatgaacattaaaaccatctccttgacgccgtcacatcagcgtgcatgtgtatctgccatagtgtacccatctcatggcatttttgtgggctgtaatgcctcctcca

SEQ ID NO: 8613 - DNA, 61 bp, Chlorella sorokiniana
  unsure (1)..(61): unsure at all n locations; Clone ID: LIB3602-108-Q1-K1-H6
ngngggaaaaaaaaaaaaaaaaaaaaaaaaaagaaaaaaagataaaaaaaaaaccaaaata

SEQ ID NO: 8614 - DNA, 453 bp, Chlorella sorokiniana
  Clone ID: LIB3602-108-Q1-K1-H8
gccgcagcctgcgctcagtgctgacctggctgccctcccagctggcgcccttcctgccgcccggcatgcggcacgcggcccgaccggacgcgggcgccatggctcgcaaccggctgatggcgctgggggctgccaccgctcggccggcagtgtgctgcggcgggctccgctgcgggcacgccccacggcacgtgcgctgatctcagccatacacgagcaggctggcctgttctcggctgaaggagagcagatgggctgcgacagcgcagcctctgagagcaaggaggcagctggtgcagcaaacggcacaggggcggcagaagcgcaggtgtgaaggctgcacaaacactggtcatgcatgtgctggtttcagactcactcgggattgtatttctccttctgctgctgctttgatgcatggctatggctatctaatggcgggtttctgggcat

SEQ ID NO: 8615 - DNA, 458 bp, Chlorella sorokiniana
  Clone ID: LIB3602-108-Q1-K1-H9
cggacgcgtgggcggacgcgtgggcgacgagtccgtgaagggcctcaacctgaccgacatcaccaaggtggctgagcgcaccatcggcgacgacctggagttcctgatctcccaggccgtggaccccaagaagccgactacgcagtgatcactggcgtgcagatccacaactgggccaacaactttgaggatgactcccccaacctggagtttgtggctcccactgccgcctacgtggtggtcaacggcgtgaagacccacattgacctgaccgccgtgccgcctctgacgccgcgccagacgcgcctgctcaacggcacccccgagctgagcgccaaccagggcggcgctggcgtgctgatggaggagtcgcccgacttcagctacgactccaaggacgcgcgccgcgcgcagcgcgagcgcctgcagaagtacatgcgcatcctgaaggccgacag

SEQ ID NO: 8616 - DNA, 315 bp, Chlorella sorokiniana
  Clone ID: LIB3602-109-Q1-K1-A1
cagctccatcacatgcatgcccggaggcatgaaggcatgggcggcccgcggcctgcccaccatggcagaagagagcggcaagctgtgagcctaccacctgttcgttcatggcgtatcggctgctgatggatccgctccgagcgaagcaaaggctgatgtacatgcacacggccaagccaagaggccctccggcgtgttcatgctgtgtgctaaatgtgtgtgtgtgcgcgcctgtgaattctgcatggccccatgttcgagagaacattgctgccctccccctgtccatagcgagtgtatctggccagacttcac

SEQ ID NO: 8617 - DNA, 100 bp, Chlorella sorokiniana
  Clone ID: LIB3602-109-Q1-K1-A10
atggagatgaaccccgcctcccccatcttccagcgcatcttcagcaaccccttcccttacgtcgccttcaagtccacgggagccgtggtggtggagtacc

SEQ ID NO: 8618 - DNA, 129 bp, Chlorella sorokiniana
  Clone ID: LIB3602-109-Q1-K1-A11
aagagaaaaaaaaaaaaaaaaaaaaaaataacaaaacaaattaaaaaaaaaaaaaataatttttacataaaaaaaaaaaaaaaaaaaagaagaataaaattaaaaaggggggtgttttttgatcttcca

SEQ ID NO: 8619 - DNA, 479 bp, Chlorella sorokiniana
  unsure (1)..(479): unsure at all n locations; Clone ID: LIB3602-109-Q1-K1-A12
cgcgtcttgaacatacctccctcgatctcgattcgtgcacagatgtgctaccccatccccctccatcgtttttgcccgtagtgccatgcatctccttttctcgtctgctttttcccgggccagattggcctccggactcgtgacccgattgccgcggcacccctccggccatctgccgggggctgcggggcaggcctgatgccctgattccattcctgcacagattgcctccccgcttgcttgcgtttcgaccctgctgtgggccgtcagcttttgccggcaagcactgacacaaggagggcgcgcccagcccgccgcttggatccctccctaacttcctcccatggtcccgcattgttgctcgatttgttcccttcctcccaaccataccgncgctggctcagctcccagcatttgttcacttgcccctgccataccaccgcttgctgttaccggcttgcttcgctcaagtcccgtgc

SEQ ID NO: 8620 - DNA, 338 bp, Chlorella sorokiniana
  Clone ID: LIB3602-109-Q1-K1-A2
attcgtggcatggagcgcggcacgctgtcggagcagcgcgaacccgacggcagcgaggtgctggccaacatggagctggtgcgcctgggcctgccccgccgcgtcttcaccctctcccagatcaagtatgtggggaccgctggagtggctgtacaccaaccgccgcctcatcaagggcctcaagttcaccgaggagcccgagattctgcgcttcttctacggccgcctggcgcccattgacagctggcaggaggcgctggccgccaagttccgcgccgactttggcgatgccctctgagcttgctcgccgcacggcagttgcggcacgccgactgcag

SEQ ID NO: 8621 - DNA, 298 bp, Chlorella sorokiniana
  Clone ID: LIB3602-109-Q1-K1-A3
aagatgcaggcgaccatggctgctgcctctgtggcccccgtccagacccgctcggcggtgaagggcttcgctgccaagcccgccggtgcgcgcgtggctgcccgccgcatgcgcgtggtgtcccaggccgcttcactgactgaagcgcgccgacgtgcccctggagctggaggagattggcctgcccatgaacaccttcggccccaagaaccccttcaccggcaagattgtgagcgtggagaccatcaccggcccccaagcgaccggcgagacctgccacatcatcatccagaccgac

SEQ ID NO: 8622 - DNA, 560 bp, Chlorella sorokiniana
  Clone ID: LIB3602-109-Q1-K1-A4
ggcctgccgggtgccctctgcattcgctgcatgacgagcacagaaaatgcccgcaggcagcaacccagacctggttggcgccctgcagtggcaggcagcagcccataatcgttattggcggcaggcaggccgcagccccaggcccaactgacctgctgcgacatttccccccctttctgcccgccccaggtgtacgatgactgagcgtagtccgcgtgggctgagcctaggcagcagctggccaaccctgttctagcgcccctcgagccgacgaagcttcatcgcagccgccggctgggatagcccgccgggctgccaggccgccgccccgccccaatccgcttggccaaacatccgatcctccttgaattcagcgcaatgagccagcttcagcagcagtgctcctcccccgtctgtccatgaggcctttttcggcgccctgctgttctgtctgtattccttcctctcttgtgcctcgccccctctccccgatatgtatcaagaactgagcttgttgatcccaattggttgctttgtggtccggttacacagcggtagat

SEQ ID NO: 8623 - DNA, 406 bp, Chlorella sorokiniana
  Clone ID: LIB3602-109-Q1-K1-A5
gtgctgtacgcggagaaggacttcaacctgcccaagcaccccgagattgatgtgcccaacctggaggtcatcaagctcatgcagtcctggaagtccaaggagtatgtgaccgagcgctacgcctggcgccacttctactgttcctgaccgactctggcattgagtacctgcgcgagttcctgaacctgccctccgagatcgtgcccgccaccctcaagaagagcacgcgccccctggagcgcgagggcgcgcgcccgccccgccgcgacggccccccccgccgcttcggcgaccgcgagggctaccgctccgagaaggcgggcgcccccggcgagtaccgccccgagttccactgcggcttcagccgtggcgccgccccccagttagcgtccgcttcctggagcat

SEQ ID NO: 8624 - DNA, 347 bp, Chlorella sorokiniana
  unsure (1)..(347): unsure at all n locations; Clone ID: LIB3602-109-Q1-K1-A6
cgcgcgctgcggccgcgcgctatgggtcatgcctaatncctgcaggtgctggcggtaggctgacagagctgcccgtggctccctgcacccggtttgctcccttcttgcttccacaacccgcttgcagcaacgttgctcgtgcactgctcccagcagccggtggtgctcaacgatggggtcacccggacacccgacctccgctgttggtgtttcattccagcattgcatgcccacgttgtgttgtttccagagccagtcagcctgtggaccaggcccagcctctgtaacccaagcaagcnnnatanaaaaggcccatgtaggtgactatttggcatgtaattgaaggg

SEQ ID NO: 8625 - DNA, 74 bp, Chlorella sorokiniana
  Clone ID: LIB3602-109-Q1-K1-A7
ccccccgcaattcccccgtctcgacacacgcgtgcgtggggattaaagccaagcaccccaactccactatccgc

SEQ ID NO: 8626 - DNA, 440 bp, Chlorella sorokiniana
  Clone ID: LIB3602-109-Q1-K1-A8
gtaggcgggagcacagtcggtcgtgaaacacgcgcctccccacaatggccggcgagcgtgtgcggctctacgtcacgggccagttggggggctacaagaggagcaaggccaaccagtacaaccacaccgcgctggtgaaggttgagggcgtgaacagcaaggaggagaccgagttctacctcggcaagcgcctggcgtacgtgtacaaggcgaagaccgagaagaagggcagcaagtaccgcgtgatctggggcaaggtgacccgcgcccacggcagcgtcggcaccatccgggccaagttccagaagaaccttgcccctgcggccattcgcagcaagatccgcgtgatgctgtaccccttccgcgtgtgagggtcggttgcttcccggagcagcatcggtgcggcacggcgcggcggtgacgagtcgtggcagtgcgac

SEQ ID NO: 8627 - DNA, 260 bp, Chlorella sorokiniana
  unsure (1)..(260): unsure at all n locations; Clone ID: LIB3602-109-Q1-K1-A9
gcgccagccgccacctttcctgccgctcaccgccgcacatcctacctcccacacctcactccatgtccacccttcacccgcgcttcacagagcggctgctgccatgcaaagctgctgccaaacccatccatcatgctcgcacacccactcacccacacgtncaacgtatccagacccattttcaaggcccgactgtacangtgccttttgcgtccttatgccgatctggtaccaggacttaatgtgtaacanatggtatg

SEQ ID NO: 8628 - DNA, 510 bp, Chlorella sorokiniana
  Clone ID: LIB3602-109-Q1-K1-B1
ccaggtgcaaggagcaatttggggaatcgagttcggctcgaccgaacgcgaaacagccaaccagccaccatgctgatctccaagaagagccggcgcgaggtgtacaagtacctcttcaaggagggcgtgctgtacgcggagaaggacttcaacctgcccaagcaccccgagattgatgtgcccaacctggaggtcatcaagctcatgcagtccttcaagtccaaggagtatgtgaccgagcgctacgcctggcgccacttctactggttcctgaccgactctggcattgagtacctgcgcgagttcctgaacctgccctccgagatcgtgcccgccaccctcaagaagagcacgcgccccctggagcgcgagggcgcgcgcccgccccgccgcgacgggcccccccgccggttcggcgaccgcgagggctaccgctccgagaaggcgggcgcccccggcgagtaccggcccgagttccggcgcggttttggccgtggcgccgccccccat

SEQ ID NO: 8629 - DNA, 101 bp, Chlorella sorokiniana
  Clone ID: LIB3602-109-Q1-K1-B10
aaagaaaaaaaaaaaaaaaaaaaaaaaaaaaaaaaaaaaaaaaaaaaaaaaaaaaaaaaaaaaaaaaaaaaaaaaaaaaaaaaaaaaagggggaaaaaatg

SEQ ID NO: 8630 - DNA, 461 bp, Chlorella sorokiniana
  Clone ID: LIB3602-109-Q1-K1-B11
cttgccgactgcagcagacatctgagcaaccatgggtaaggtgcacggctcccttgctcgtgccggtaaggtgcgcggccagacgcggaaggtgcccaagcaggagaaggcgaagacccccaagggccgcgcccgcaagcggctgcagtacaaccgccgcttcgtgaacgtggtggtgggcttcggcaagaagcgcggccccaacagccagtaagctgactgcggcgccagcagcagcggcaggcatgtgctgaacgcacggagcgcaagcgcgtcccgcgcacagccgccaccgaagcggcctgccagcgtcgacggcagcgaggcagcaaggcgcggcctggcatgctagcagcgcgtactgcgcgccacggcgctagcagccgcaccctggaacagcatcagcagtaattcagcagcccacctgcatgccgaacgctccgctgtaacaggttctcagg

SEQ ID NO: 8631 - DNA, 484 bp, Chlorella sorokiniana
  Clone ID: LIB3602-109-Q1-K1-B12
gagcgaggtgccgagagcggcggcctggtgggcggcagccgctttgggcgcagcaaatccagcgagatggacctggtggatgcacgggagcaggtcgatattgagcggttgatcaatgcatgccatgagctccaagaccgcgtggaggcgatggaggcgcagctgaaccagcaggaggagcgggcgcgggaccgagcggtcgcgctgcgggccatcctgcgggacgacaagctgatgaaccagttcctgtcgcagtacgatgatgggcagctggagctgaagcgtgacgaggcggaggagccgtgggacagctaccgcaacagcttcacgctgctcatgtccaagggctacctgcgggcggtggaggcgctgcggcagcggctgatggccaacgagtgggagctgggcctgcgcccgatagccctgcagctgggcgtgtcacaatttgaggagtactgtgcagagcacaacgttgacatttctt

SEQ ID NO: 8632 - DNA, 490 bp, Chlorella sorokiniana
  Clone ID: LIB3602-109-Q1-K1-B2
gcaagcccccctcggaccccgaccaggcgctcgagtacctgcgccagggcaaccagcgctttgtgagcaacaagccccacgacgcccggcgccacgcgcaacctggaccgcgtcaaggccaccgccggtggtcagaagcccttcgctgccttcctgtcgtgcgccgactcgcgcgtgcccgttgagatcatcttcgaccagggcttcggcgacgtgtttgtgacgcgcgtggcgggcaacattgtcaccaacgagatcaccgcctcgctggagtttggcaccgccgtgctgggctccaaggtgctgatggtgctgggccacagctcgtgcggcgccgtcgccgccaccatggctggcgaggccgtgcccggcgtcatctcgtccctctattacgccatctccccggcggccaaggcggccagcaacatcgacgctgccattgccgccaacgtcaagcaccagatggagcagctcaaggtgtcgcccgtgc

SEQ ID NO: 8633 - DNA, 533 bp, Chlorella sorokiniana
  unsure (1)..(533): unsure at all n locations; Clone ID: LIB3602-109-Q1-K1-B3
cacctgcctgacgtcaagcctgagcgcgtctcgccgctgccgctggaccagcctgccgcagcaggcggcaccacagctggcgacaacggcgacggcagggccgccacgtacagccctgcccgcatgagctgcgcagacgcatcgccagccccccaccgccagcttgcggcgggtgccggcgcggccgccggcgcgccggctgctcccatgcagcaggcgtcgggcgcgcagcagggttcgggcgcggaggcgcagcaggcactgcccgacccgctcaccctagctaacgatgaggacggggtctatcatgcaatgtcacgcttgctggccctggtggcatccacgggccgcgttcccacccaggcggtgtcctnctaccgccgcttctttggccgcctggagcctgccggcaagcggtggtggcactacgactcgctgcgccaaatggtcgacagcggcgagtgggatgagctggccgccttgctgaacaccaagtgatgcagccggcagccatcgaaggcataactaataac

SEQ ID NO: 8634 - DNA, 454 bp, Chlorella sorokiniana
  unsure (1)..(454): unsure at all n locations; Clone ID: LIB3602-109-Q1-K1-B4
tggagactgccgtttgcatgttgcagaggagaaccgtgccggaaagccagacctgcattgtttcactcagttggccctgctcacccaggtgaccttaggcatgctccccgctcccctgctgcccattctctccagatgcacgacggncccggtgcgcatgctggccaagggcacgctgcgcggcatcgtgccctggcgccaggcccgcgcctttttcgccgcacgcctgcgccgccggctcactgaggaggcgctggtcaagcacattgcgggtgggtgggctgtgcgtttgcataattggcagaggccatatcctgcaatgagaaacttggggcttgatgcctctgcgagtgtgatatcaaggccatcttgacagccgtcaccttgtcactcacaacacctctccctgacccccctcctcctgcccccacagccgcggacgagagcgtgagcc

SEQ ID NO: 8635 - DNA, 315 bp, Chlorella sorokiniana
  Clone ID: LIB3602-109-Q1-K1-B5
cgccgcagccaccttctttccagctgctcttgccgctgcgtgtctgcattacgtccgtgcccatagcactgttttgtttgcccctcacgctcgtctgccgctacagcctgccgctgccgttgctcatcccaactgaccccccctctgacctagccgctcaacgccgccggcgacaggtagggctggcaccagcaacatcctgtttctgctctccactcgtctagctgtcctgaactggtgcatgcttggcacatgtagccttgctgcatgcagcacctggtgtgttggcagtcttgtaatgtgctgctcgcacaa

SEQ ID NO: 8636 - DNA, 112 bp, Chlorella sorokiniana
  Clone ID: LIB3602-109-Q1-K1-B6
cccgggacgcgtgtcggctcccgcatcggcaacgccgcgtcataactgggatatgccgcacagtacagcgtcatgaccgcgcgcgactgcgccccacgtgacgagaccccga

SEQ ID NO: 8637 - DNA, 438 bp, Chlorella sorokiniana
  Clone ID: LIB3602-109-Q1-K1-B7
ggggcgaggagcaggagcccgcaagcatggccgctcagctgggcttccgcgcgagtggcttcatcggcagtggccgggcgattcaggcgcggcggcaggtggcggcgccatgccgagcaatgccggtgcaggcggcgtgattggccctggcaagaagtgggagcacactgagacgaaccagaacggcaagccggtgcgcgtgtccatgcacgtgcggaagggcgacaccgtgaaggtgattgccggcggcgacaagggcaaggtgggcacggtgctggacatcaacaccaagcgcggcgaggtggtggtcgagggtgtgaacatcaagaccaagcacgtgaagccggcggcgcagggcgaggagggccagattctgaagaaggagttccctgtgcaccacttcaacgtggcggtctactccacggggcagcagacgca

SEQ ID NO: 8638 - DNA, 269 bp, Chlorella sorokiniana
  Clone ID: LIB3602-109-Q1-K1-B8
gacctcgcgaaaggctcaagtactcactgctgtcattccacccctgcttcacccctgcagttcctgcccctggcctgaacgccgggggcaacctggagcgacctgggcatgccatattaacggcggccagccggtttggacaagcacacacaacatatgagattcccaacctccctgcgcactgcttgtaacaatcctggctccctcttgtacccttgacccgcactcgggcgtggatatgtaacgttccgcgggaaaaaaaaaaacac

SEQ ID NO: 8639 - DNA, 436 bp, Chlorella sorokiniana
  unsure (1)..(436): unsure at all n locations; Clone ID: LIB3602-109-Q1-K1-B9
gcggtgtgaaagtagacggcgcggcggcacggctgccgccccccttgcgccccctccccctctgccgggccaacctctctctgttcacgctgggcgccccgctgccaccacctcccaccttgttgagcgcagcaggccctcttactatccttctctccctccgcccgcccccagcattggcatgctattcaccacaattgaacccatgtgttcccgcatttcattccggtttagtcgcactgcagcacgaaaccacgacagctgctgttgggttgccctccggcacgcctcccccctatcaaccaaatgcactctgattcaaacggcccccctcagtacacacacaggggccacccgtctccctctgtctgcgcactcctccccccactgcccttgtactgctgcccttgcgggcaccgnctgtaagagccggacc

SEQ ID NO: 8640 - DNA, 518 bp, Chlorella sorokiniana
  Clone ID: LIB3602-109-Q1-K1-C1
gtgtggcgcaattgatctgcttggagctgcgggctttgtgcttgctttccgtagacgcacagatcaaatctcctgccttgcgagcgcgagtctaaagaggtgcgcctgggttgccacactgagagggcgtgggctggactcgagactctcccgccggcaccgcgcgactgaatacatcccaatgccgaactcgttgctgcagctattataacaagctggacgacctgattcagaaccacgtgctggagccgtttaacgaggggctgctgaccactgagcaggactggagcttctgggcggaggtctttcagatgatgcctgacgagcaagccggctcgtgggactctgaatcgcatcaggactgaagcgctgagcaactgggagactttgactgtgcaccgttcaggcttgacggactgggtaattatgccaccggcacaaaaaaagacggtgggaacagttggaaagtccatgagggggagctgtatacatgaacacattttatctgaccccttcct

SEQ ID NO: 8641 - DNA, 266 bp, Chlorella sorokiniana
  unsure (1)..(266): unsure at all n locations; Clone ID: LIB3602-109-Q1-K1-C10
ccggcacggcgcagtgagcggtggagcagctgaacatgtgtgctgccccctcggcttgggttggcgtaggtggctgcgttgcagcgggggtaggcggcagcgaagcgacagcaaagtttgggcgccggcccgtgcagcactctttggtagcttagcgcgacttagtcttgttttggaggcctgacgcaaggcagaacctgtgatgcattccatgcnnaaaaaaaaaaaaaaaaaaaaaaaaaaaaaaaaaagggaagataaataaa

SEQ ID NO: 8642 - DNA, 159 bp, Chlorella sorokiniana
  unsure (1)..(159): unsure at all n locations; Clone ID: LIB3602-109-Q1-K1-C11
ggggggttattcaattgccatgctacatgtcttacgtgaacaagatggactggaccaagctattctcctgtcatagcttctgcctccgncgcgggcattcaacactgcgggcagcgactcccctccttaccacattcttactaatatcaagctcctcaa

SEQ ID NO: 8643 - DNA, 325 bp, Chlorella sorokiniana
  unsure (1)..(325): unsure at all n locations; Clone ID: LIB3602-109-Q1-K1-C12
ggcaggcgcccaccaagctgcacctgaccctcatcgagtccggcagcgacgacctcaaggatagcgtgaacgggcatctgctggcgncgtncctgtctctgctggtggagcccaaggggcctcatcgccctagcctcaggtgctggatgcgctgcctgcgtgccatgaggaggcgcttctcaagcacgtgggcatctacgagttctgagacgtggacatcgaagaggacgaccactgctgtttccccacgctcatcggtaagccctgttggtgcccgatgcggcctgcgcttatcacacatcccagccatttgctcccgccccac

SEQ ID NO: 8644 - DNA, 383 bp, Chlorella sorokiniana
  Clone ID: LIB3602-109-Q1-K1-C2
gtcgaaggaggcgaaggcgcttgccgccgccaactccagcaagggcaagaagaagaaatggtccaagggcaagctgaaggagaaggtgagacaacctggtcctcttcgacaaggccacctatgagaagctgctcactgaggtgcccaagtacaagatgatcactccctcggtgctgtccgaccgcctgcggatcaacggcagcctggcgcgcgccgccatcaaggagctgctgggcaaggggctgattaaggaggtggccaagagccgcgcgcagcagatttacacccgcgcgacggcagccgccagctaagcagccacccagcagtttggcagcatgctagtgcactcgttgtgcttgccaatctggtaacaggtccctcgc

SEQ ID NO: 8645 - DNA, 489 bp, Chlorella sorokiniana
  Clone ID: LIB3602-109-Q1-K1-C4
cgactactgctggatgcaagtgaagcaccccaacggcgacggatacgtgtggatgattgaccactggtgtcacaagcagaagtcctgggtgggctacccctgggaccttgactactgcaaggactaccaccacgactaccccagctactcgaagtgcgactggtgcagcgactgcactgaccagtactgcgactcctcgagcggtggcaatggcggcaacggcggcaatggcggcaatgccaacggcgacaattcgaccggcggcgatggcggcaacggtggcaatggaggcaatgccaacggcgacaatgccaccggtggcgatggtggcaacggcggcaatggcggcaacgccaatggcgacaactcgaccggcggcgatggcggcaacggcggcaacggcggcaatgccaatggtgacaatgccactggtggtgacggcggcaatggcggcaatggtggcaatgccaatagcgacaacttgaccgg

SEQ ID NO: 8646 - DNA, 151 bp, Chlorella sorokiniana
  Clone ID: LIB3602-109-Q1-K1-C5
ctcacagctgacgtgctgcacacgggcgactgaccagggctcccagctggctgcgttttattctatccacttgctacctgtccagccggaccagcttagtactgctacgggtccctatttttccatctgttttgcatgtatgaagtctttc

SEQ ID NO: 8647 - DNA, 520 bp, Chlorella sorokiniana
  Clone ID: LIB3602-109-Q1-K1-C6
ctccaacacccgcaagtggctggagactgtggaccccacccccgccaacgagttccccttctggaaggtgctggctgctggtggtgccgccggcctggcgggctccttcgtgtcctgcccttctgagcacattcgtactaagatgcagctgcagcgccgcgcggcactggctgcgcagatgggcttgaaggcgcagggcctggagacctacaagggcagctgggactgcgcggtgcagatcctgcgcaaccacggcgtcaagggcctgtaccgcggcatgacctccaccgtgctgcgcgacatccagggctacgcctggttcttcctgtgctacgaggccacgctgcacgcgctggcaggccccgcgcaccagcgccaggagctggactacaagcacgtgctgggcgcgggcgtgatggccggcttcggcctctggggctccatgttccccatcgacaccatcaagtccaagatgcatggcgactcgctgtccaacccgcagtaccccaacaccatggac

SEQ ID NO: 8648 - DNA, 361 bp, Chlorella sorokiniana
  Clone ID: LIB3602-109-Q1-K1-C7
gcggcggctggggcatgggctgcgacagcgtgcacaagaagcggcggctgctgcaagaggagggcgtgcgctttgatgaccgcgggagagctgctgggcagcgatgcaggggcggtgatgacagccgcggagctgcggccgccgccaagggcgtcctgtgagcctgctgcgacggctttgatagcgctcagtgatgcttgatggtgccccacggccatgactgctttgcccttgagtgctttgtattttagctcgatacacgaggtgcttgtgcgtgttgttttgtatgctgcatccgttcaaaatgcgcggcggccggtgcaacagctgtgcgaaaaaaaaacaaaaatctatataaatt

SEQ ID NO: 8649 - DNA, 197 bp, Chlorella sorokiniana
  unsure (1)..(197): unsure at all n locations; Clone ID: LIB3602-109-Q1-K1-C8
cctgggcatcccatattaacggcggccagccggttttggacaagcacacacaacatatgagattcccaacctccctgcgcactgctgggaacaatcctggctccctcttgtacccttgacccgcactcgggcgtggatatgtannacgttccgcgggaaaaaaaaaaaanaaaaaataaaaaccaaaataaaaaata

SEQ ID NO: 8650 - DNA, 527 bp, Chlorella sorokiniana
  Clone ID: LIB3602-109-Q1-K1-C9
gaccgccatcgcttctggcctcaccgccaaggtgcagcggcggcaggctgcggcccccgtggcccgcacccgcaccaccaccaaggggctggccgacgtgaacctggtggtcggcggctgcaccgtgggcgccctgcgctgggccgctttgtgttcctgcccttccaccgcgcctccctggccaaggcgggcatgcccaagcagaacggcatgacccacctgcaggctggcgatgctcgcgctgaagaggcgtctttcattctaaagaccaacgaccccgccggcttcaccgtcgtggacgtcatggcctggggcgccctgggccacgctgccgccttctacatcctcgcaacctccagcctgggcctcgaccgcaaccccttctaaaccagtccacggccgcagcctgcgcccaggccacaaccccatcccgagaagagcatttgtccggcgctgtgcctttttttgttgggcatggcgactgcagccacgcatgtgatactgctattgtaaacaaccgcttgtcc

SEQ ID NO: 8651 - DNA, 363 bp, Chlorella sorokiniana
  unsure (1)..(363): unsure at all n locations; Clone ID: LIB3602-109-Q1-K1-D1
catcagacctggtgatctccacctctgccctgggccagtaaatggcgacgccccccgcgtcggcagcagcagcagcagccagcagcatggggttgcagctaccccccgagaagacaaaccctcatcctaccctagctggggcgtcaccatgcgccgctcccttgctttccgtttcactgtccctttcgttcctgcgttcgtttagtggaggaggcccgcctgtgtacctgacctggtggccgcgtttttggttgagcggcttgtagccgcacatctgtattatcagctacgtcaaannaaaaaacaaaaaacaaaaacaaaaaaaaaaataaaaacaataacacaaaatataaaaaaatacac

SEQ ID NO: 8652 - DNA, 449 bp, Chlorella sorokiniana
  Clone ID: LIB3602-109-Q1-K1-D10
gctgggtgactatgtggacatcaaggtcaacgccgcggtgcacaagggcatgccccacaagttctaccacggcaagactggctgcgtgtggaatgtgaccaagcgcgccgtgggcgtggagctgctcaagcaggtcaacgggcggtacatcaagaagcgcatccacgtgcgcatcgagcacgtgacccccagccgctgccacgaggagttcctgcgccgctgcaaggagaacgacgcggcgcggcacgcggccaaggtggagggcaagccgctgccggtgctcaagcgccagcccaagggcccccgcaccgaggccatcatgctggagaacgtgaagatggagaccatcacggccatcccctacgatatcctcaaggagggcgtgctctgagcgtgatcggcggcgacgttccgttgattgcggctgcagcttagtgagatgtaacccc

SEQ ID NO: 8653 - DNA, 569 bp, Chlorella sorokiniana
  Clone ID: LIB3602-109-Q1-K1-D11
gcgagggcaatctggacccctttgatggcttggtcacctaccggctggtgcaggaggcagcggagcagccaggggcgctgcagcgagaaattgcggacatggagcgcatggtggagaacaagtacaggaggtaccgctccaacgaccccctggacctgggggaggcgctgtggctgtcgcactgggcgctacccgaaggggaggcctgggcccagctggtcagcgagcgctcctcggccgcactggacgacttgtggcgccgcggctacttccggcagcctgagccgtaccggcttgcctttcgggagtttggcaccacgctgggggtgcaggtcaacccggcagccggcagccactgggcgggccgagtggatgcgctgcatgagttctgggcgcagcacctcttcactcgtgatgcagacatcacccccgtcatgtttgctgccagcctggtgccaggagcctgggcgcggaactataccccccggctgcgccagctggcgcagcgcttgcgtggcaacgaagagtgaagctgaagcatgcacttggcactgcagctacagcagcca

SEQ ID NO: 8654 - DNA, 333 bp, Chlorella sorokiniana
  Clone ID: LIB3602-109-Q1-K1-D12
cccggagctgacgggcgagcggcagcgcaccaagctgaagccgccgcaggtggcgcgcgagggcaccaagaagacggtgttcaccgggtgcatggacctgtgcaagtcgatgaaccgcaaccacgagcacgtgctgaattcctgcttgcggagctgggcacgagcggcagcctggacggcacgcagcggctgatcgtcaagggccgttttcttcccaaggtgttcgagaccgttctgtcccgttacatcaacgactacgttctgtgcaacagctgcaagttcttggacaccctgtttgaccgcgactcctccacctccatcatgttcctgctc

SEQ ID NO: 8655 - DNA, 463 bp, Chlorella sorokiniana
  Clone ID: LIB3602-109-Q1-K1-D2
tgaccgaaggctacgagtacaagatgcgcctggtgtacgcccatttccccatcaacatcaacatcgagaacaagggcggcaaggtggagatccgcaacttcctgggcgagaagattgtgcgcgtggtggacatgctgcggcgtgacctgcgagcgcagcgccgccgtcaaggacgagctgatcctgaccggcaacgacatcgagctggtgtcccgcagcagcgcgctgatccaccagaagtgcctggtgaagaagaaggacatccgcaagttcctggacggcatctacctcagcgagcgcggcaccctggtgaagcccgagtaagcggagcccgcacgttgcagtagaggtggcggcacgagcgcagcagtgcgcagcgctcacgcccgcgccggcggagcatcggcggcggcagccggccccagctgcggcgctgcacgccatgtaacgcacacgttagcaa

SEQ ID NO: 8656 - DNA, 250 bp, Chlorella sorokiniana
  unsure (1)..(250): unsure at all n locations; Clone ID: LIB3602-109-Q1-K1-D3
gtttcctgctacgacacggcagctgcaagccatgctggagtgaagtagacgtgaacgaatacaaagtgcgcgattgtaaaccctgtcaacttangctgaccgttcagcattaatcttctaaatttctcaagatctgcaagttggcatgtctggctgggttgtcacaaaaatcgcaacagttttaggacaccctaaccataaaacccccttcaaatgccggctagcctacatgtaaaacccaggtttggca

SEQ ID NO: 8657 - DNA, 453 bp, Chlorella sorokiniana
  Clone ID: LIB3602-109-Q1-K1-D4
cggacgcgtgggcggcagcgggcaaggagctggcaacgcggcccttccagctggtgaccggccgcgtgtggaagggcactgcgtttgggggctacaagtcgcgcgtgcaggtgcccgacctggtggagctgtaccacgggcgagacgatgctggacgagtacatcacccaccgcctgccctttgacgagatcaacaaggcgttcgagctgctgcacggcggccagtgcctgcgctgcgtgctgaccttccagtgaggcggcggcaaacggctaggcagccaacagtacactggcgaataagaagctctggtggcgtgccatcatccgccgcttgaagcgtgatgcagctgcttacattgttgagcgaggtggtggaaccagttgagaatgcattcccgctttgaatggacccctcatgcggtctgttggttgcttgctcatgtttaccaaaag

SEQ ID NO: 8658 - DNA, 349 bp, Chlorella sorokiniana
  unsure (1)..(349): unsure at all n locations; Clone ID: LIB3602-109-Q1-K1-D6
gcacccccgcgcgtttgcggtgcactcgccgcacccccgcgcccgcacctggaaggtcacccacaagaccggcctgtgggaccagctgggcgagatttacgaccaggccaaggagggcatgttccagggcacctacctgccgtctccatgtactcgtgcggnggccacacagcgggcccgctgatgcgccagcggccaaccttcctgtcggcaacggcgtagcggcaccccgcctcttcaagcctttgattcatcgtggccgcccgaccggtcagctagcctcagcctgcttatctctattcaaactcaaactcgagcctcaaactgatacgtgatgtatgtaagaata

SEQ ID NO: 8659 - DNA, 508 bp, Chlorella sorokiniana
  Clone ID: LIB3602-109-Q1-K1-D7
gcggacggcctggcccaggcccgcgagaacctggacgtggccaaggcccgcatcaaggaggctgagaagcgcatcgacgccgacctggacgcctacatcgccaaggcgtactggactgagggccgcaacgagctgcgccccaggtgggcaccctgcgcttcgacctgaacgcggtggccgacaccctgcccaaggccgccaagaaggaggcgcaggccgccaagaacgagttcctggccgccgtggaggcgctggacctccagctgcgcaagaagaacggggacaaggccgccgctgccctggctgacaccaaggccaagctggacgccgtgatcgccaagctggcgtaagcacccgccagccaggcggctggccggtaccacccggacggccgccgcggcaccccgcagcagcccccttgccagctggcgccccacgcgccggcgcaacgttttgactcccttttgcaccctgggggggtttggccaccggcggggcccccgcgccc

SEQ ID NO: 8660 - DNA, 144 bp, Chlorella sorokiniana
  Clone ID: LIB3602-109-Q1-K1-D8
gcgggtgagtaaaatcctacagcagtgtaactgccacccctctgcctgccgatgcaggggctttacacctgcctcgccattcattgggtgtttgataaatgtaacggggtggccggcaacaattctgttcccagtgttctatat

SEQ ID NO: 8661 - DNA, 240 bp, Chlorella sorokiniana
  Clone ID: LIB3602-109-Q1-K1-D9
gcgtgcacacagcagcagcagaggtgcctcggctcggcgggtcaccgagcaggatggaaagtttggcggcggatcgagtggctagggcagggcttggggccttgggcggcagcgctggcagcatggctgggggaagcggaggggggcagcggcagcactggcatcgcctggaacagcttggggtgggcagcggcaccagagacaataacaaaaggcggacggcaggcgcgcattgggcat

SEQ ID NO: 8662 - DNA, 233 bp, Chlorella sorokiniana
  Clone ID: LIB3602-109-Q1-K1-E1
cgccccgccacatgtgtacacgtaacgctctgcccatctccattcgtcctgttcatttccaaagcggctttgacctccctctctttatgtgcgccctgcagggccatcgtctatctattcttccgccttgccatgcttacatgccaacctaatcagcgcaaacaccctccgttttatgaagctccattctggcttgaagccagccagcttgcatcccgtctgccacatccccc

SEQ ID NO: 8663 - DNA, 501 bp, Chlorella sorokiniana
  Clone ID: LIB3602-109-Q1-K1-E10
agatccgccgctttgagcgctttgtgctgggcgagggcatcaccgtggccaaggccgacctggccgcagatgtggaggcgcagaccagaggccatgcaggaggctgccgccaagaaggccgaggccgagcccaaaaggaggagccccaggccgctgccaagccggctgtggagatctcccccaagctggtgaaggagctgcgtgagaagagcggcgccggcatgatggactgcaagaaggcgctggcggagtgcggcggcgacattgaggccgccgccgacttcctgcgcaagaagggcctggcctctgccgacaagaaggcgggccgcgtggctgctgagggcgctgtgggcgcctacatccacgccggcagccgcctgggcgtgctggtggaggtcaactgcgagaccgatttcgtggcacgcggcgagaagttccgggagctggtcaacgacatggccatgcagattgctgcctgcgcggatgtgcggtacgtgagcg

SEQ ID NO: 8664 - DNA, 465 bp, Chlorella sorokiniana
  unsure (1)..(465): unsure at all n locations; Clone ID: LIB3602-109-Q1-K1-E11
cacaaacatccgcaccatcgccgcctttggcatggagggccaggtgtccgagctgtatgccggcaagcttgacaagccgacgaaggaggcgcactaccgctccaacgctgccggcctaggctttggcttctctcactcttcaactttggaacctatgcgctggccttctggtatgcgggccagctggtgggcagcggagagaacactttcgacgaggtgttgaaggtcatcttcgcaatcttcctggcagctgtgggcatggcgcangcgcagctgtacttcccagatttcgccaagggtaaggcggccacgcagcgtgtgttcaccatcattgatcgtgagccgctcattgacgccgccagtcaggagggtgcccagccgctggactgccggggcgaggtggatctgcgcaacgtgacgtttgcgtacccgcagcgcccagaggtgaaagtgttcctccacttc

SEQ ID NO: 8665 - DNA, 135 bp, Chlorella sorokiniana
  Clone ID: LIB3602-109-Q1-K1-E12
gcgcccacgcgtccgccggccaggacgtggcctttgagttccccgtcagcgagcagtaagcggctcgaagcctttggcggcagcggttggcagcccatgtcgccctgacgcgccgcgcaccatcggcggcgcacg

SEQ ID NO: 8666 - DNA, 433 bp, Chlorella sorokiniana
  Clone ID: LIB3602-109-Q1-K1-E2
tgagcggctgccttgcacgcatggtgcggcacggcctgctctgcggcccttcatacctttgtacctttctgtatcatcttgcagcaagggcagccggctgcatctttctaacatcgtcaccggcccactcgtttgtgccatgcccacctgcctccaacgtcacccttcatcaaccctcacccaacccatccacctgccacccatccactcaccttccctccgccacaacctctgccacccactcaccacccatcacccgctcaacgccctccatgcaccatcctccccatccaccaaatctgccaccccaaacgcacgttcgccgcttgcaccacctggccgcctctcacccgcacccatctttcacccgccacctttccttgccgtcaccggcgaacattctacctcccacacctcactccatgtccaacct

SEQ ID NO: 8667 - DNA, 433 bp, Chlorella sorokiniana
  Clone ID: LIB3602-109-Q1-K1-E3
tgcagctccagcagcagcagcagcaacagcagcagcagcagcagccgggcgaccggcagtaggcccagcggtaaagcggggatgtcagaggggctcaggcctccctagctccgcctcccctccctcttcttccacctccccctttctgacccgctttcctctcctgcccctcacactacctctctctgtttgacgccgccccctcagagtgcctttccatgcgaaaccaagtgcgcacgtttgaatagccccagcatttgatgcagttgtttcggccgaacaaatgtatgacgctgcctcggaaacagcataaactgtctgctccatgctacgtggctgccgtgatttggctagatgatggatggactgtgtaaagacgatgcagaaaaaaaaaactaaatacataaaaataatatcactacaaaatattaag

SEQ ID NO: 8668 - DNA, 488 bp, Chlorella sorokiniana
  Clone ID: LIB3602-109-Q1-K1-E4
ccctcgcccaccctgtgtctcacaccccgtgccggtacacacgccggctgtccaagacctgcgtgttgcacacatcaccctcctttcggttcattggtgggaccctttcaggagttttctacccaatctgcataccagtaacccagagtatgggtggcctcacctctgcactgcagccagccaaacacccacccacgcacacacatacacacccaaacccaccctcgcattgcagttgtttgtcggggcccagcccggccaacgggcagtctgcttgtgagcctattcagatccatggcacactcgctagccagccgttcacaaccaacgcaatcacacacacccatttttcccccgatgtgcttttttccccgtctgcgtgccgcctttgagagcccgtccccacccgccgatgcctgttcacttttcccccctgtgtttcacatttctcagcgtgtcattcttttccgtcgtggtgatgtagaccc

SEQ ID NO: 8669 - DNA, 481 bp, Chlorella sorokiniana
  Clone ID: LIB3602-109-Q1-K1-E5
cggacgcgtggggcgccgtttgtggcgatttactcctccttcctgcagcgcggctatgaccaggtggtgcatgacgtatcgctgcaggggctgccagtgcgttttgcgatggatcgcgccggccttgtgggcgcggatgcgccacgcactgcggtgcgtttgacgtcacctacatggcgtgcctgcccaacatggtggtcatggcgccctccaacgaggccgagctgatcaacatggtggccacctgcgctgcaatcgacgaccggccctcgtgcttccgcttcccccgcggcaacgggctgggcatcgaccttgccagcgagggcatcacgcctgatctgaagggcacccctctaccgattggcaagatgcgtctgcggcgcagtggcagtgatgttgccctcatcggctacggcaatcccgtgaacgactgcctggctgcggccgaactgctgcagcaggcaggagtgtcgggcgaccg

SEQ ID NO: 8670 - DNA, 238 bp, Chlorella sorokiniana
  Clone ID: LIB3602-109-Q1-K1-E6
gcccaaaaggtgcttacagtcggcattgatcgctcggcagtgcatcgctcatcaaacggagatttttagggccggcctatcattggtaggtgcgttcaaaggccggggttgcatgccaccaaattggaggatacacctgaccacgattgggagggattggtgcacgccgcaagttggcggcactcaaggcaaggcacccatccagcatgggcacagggcccctttggaggcaaggaaa

SEQ ID NO: 8671 - DNA, 299 bp, Chlorella sorokiniana
  unsure (1)..(299): unsure at all n locations; Clone ID: LIB3602-109-Q1-K1-E7
ggctgagggcaccaccctggaggcgctgcagaagctgaaccccgatgtgaagaaccccgacctcatccagcccggcaccgagatcgagctgaaggagtgctaagctgagcagctcacgtgagcagcacccgcgcaccacagcttgatcagctgtggactcaaaggatgtgatgcgcccgaccgccagcagcccgcccatttgcggcgctgtgcggctgcaccgcagacacatggaatgcaccctcccacatccnctctctccgcacatggggcggggcagctgtcccgccccctctgat

SEQ ID NO: 8672 - DNA, 573 bp, Chlorella sorokiniana
  Clone ID: LIB3602-109-Q1-K1-E8
gactagttctagccgacccgggcatggcgtggacgtatgtgcacctggggcatggagtcatcacctacttcctgctgcactggaacgagggctcgcccatccaggacgaccaaggcatctacgacaacctgacgttctgggagcagattgacgatggcgtgcagggcacggccacccgcaaattcttcacggttgtgccggtgctgctgtttctgctcgcctcgcacggcaccgacttccgccgccagccgctgggactcaacctgctggtggttgtggtgctgaccattgcaaagatgagcagcatgcacagagtgcgcatattcggcatcaacaaggactgatcggcgggcagcaggcgatggcagcgagcgcagcccgcccagccaactggcgccagcagtgcagcaccagtgcggcaccatgcctggcctcttttgcatgcggcgcaggctcacagctgtagcgtatgctgtgccccctgccctgcttttgaccgcttgtcccttgggtagtcctccccagcgcctttctgtgcccaaccgggttaaagcccgcgtgccgggccaaccc

SEQ ID NO: 8673 - DNA, 494 bp, Chlorella sorokiniana
  Clone ID: LIB3602-109-Q1-K1-E9
ccggaaagctggttgcttttgcgcccccgctggaggtgcctgctgcatgcggatgggcggcgctgtgtgggctggggcggcgggaggatgctgctgcgccgctgctgcctgatgccttctgctctccttcgcccgggcgcatccctcgtgccgctgctgccccctgccctccctggcctggccttgctttatggggcgctccatgcagctcacatccccctacgcttgtgcttggctagctcgcggtggcgggcacctgctgcactctgctgcgccatgccccactctctccccctcctgtcccctgctctcccacgactgacaacagcgtttctcgtgtcatgcgccagtcttggtggtgcttaacgatggggccacccagaggcacccggcctccatttctgtttcatccctgcgtggcacatttacgttgcgatgtttccagagccagcaagcctgtggaccaggcccagcctctgtaacctcaatcagtc

SEQ ID NO: 8674 - DNA, 543 bp, Chlorella sorokiniana
  Clone ID: LIB3602-109-Q1-K1-F1
ctcgtgagtgagctggggagagaacagcttgggcgcgcaccttccgcagccttcagtccagcccaaggaagcgggcgcggcgatcaacatcagcagcgtgatttggcaccatgccgccgcgtcccacgcacgacggcagcgaccacagctaccgcatggtcattgaggaccgctacaagcgcatggcctccatgcggcgcaccatcggcgtcagcgcggtggtgcagctggcctacatctgcctgcgcacgctgtggcactcgattcccttccttaccggcgagccgcgcctgacgctgtccactgagtacatctttgtggcgggcgtggccctgtttgcgctgcgcgcctgggcctttgggtttggcaaggcacaccgtgagaagctgtgggccatcatgacttactcactgggctccgcgctgctggtggctgaatgcaccctcatcttctacatgtaccacatcgacgccaagatgatggggcgcgccgcgggcaagcaatacccccagatgctgggcaaacactttttccggccgctgg

SEQ ID NO: 8675 - DNA, 448 bp, Chlorella sorokiniana
  Clone ID: LIB3602-109-Q1-K1-F10
ctccttgtttcttgccctgcaccagatctccaagcaacgatgcaggctgcccagctccaggctcgcgccacccggcccgccgtggggggccgcaccaccgtgcgcgtgcaggctcagcaggccgcgccccgcgctcagcccccaagccccagcagtttgctgctggcctggctgccgccttcgctgccgtgaccctggtgctggcgcccgccgccaacgctgctgaggcccgcgcggaagtgaagagcgtggtgtgcgccagcaaccccacctccaagatctgcctcaaggacagcgccaagaactgaggcgtgccagctggactgagcgagcgctgagcccttgctggccgcacctgaggcaggcagccattgctgactgccggggggcaccgggccgccacccgctgcccggcagcatgggcgaggcggcgtgagaaagagaggac

SEQ ID NO: 8676 - DNA, 565 bp, Chlorella sorokiniana
  Clone ID: LIB3602-109-Q1-K1-F11
aggaagtgcgccaatgccgcccatgactttggtgtggattgggtgaagggccactactaccgcgtgcccaagtactgcaagaccaagtggctggcctaccccgtggagtgctccacttgctccggctactactaggcaactagctgagcaaggcagggcagcctgaaacaggctcccatgtgccgacgctgctggcggcatgaggcacagcaccaagaaaggcagctttcaagggcggcgttgtgctggagcaggcatggccgccagtctggagcgccagctacagcacgttgccgcgctcgatggccctgccaaccagcctcgacgcacagctgaagcgctgcaacacacccgtgacaaaccgtgcaacagcagccacacactgcgttgcttgaaccccctttccgtgacccaagacccgatccattccgtgatctctcccatctgcaacccagcacactcccccattccctggaccccatgcatgaaccctcccccttcctgaaccccaaccattccgatgaatgaaaaccacccccccgccgctgtgcttgccccacacatg

SEQ ID NO: 8677 - DNA, 511 bp, Chlorella sorokiniana
  Clone ID: LIB3602-109-Q1-K1-F12
ggcatgtcacacgctgctcctcaccgggcgctcgccaagcaagctgcttgtgtctcggtgtatgggaaccatcacgcacgccgaccggatctccacctacgattcgcgtttccagctggagcgcggccaagagacgggccattccgcctcacccgcaacatgcagtccttcattggcccacagggcatggaaggcatggtggtttgcgccatcactgcagcagcgcaggcgctgcaggcagagcctgccatcacttcatctatcgttgccctgttcttcagggatgacattctgtcctgggcagctcggcgcagtggagcgcgctgcatcgcggcactgaacgccagcctgaagacctcccagctggagacgtgcgtggcctggaacaccgcaacctgcctgaaccgtgtgggcaccatggcacctgcacgcaacggccatccgcagcagggcacccgggctcttgtggcagaagcagtagcgcctgccaatctgtgtcgcatgtgcccta

SEQ ID NO: 8678 - DNA, 507 bp, Chlorella sorokiniana
  Clone ID: LIB3602-109-Q1-K1-F2
gtcgctcaatctgtcggaaaatgaggacgatgatttctttcgcttcgacccaaagtaccgcaacctgtcgctgctgatcaccaccggggcaggccccgtgccctcgctggatggagagaacatcgtgattgggcaggtgtcagaggggcttgaggtggtgacagccatcacgcaagtgcccaccttcacgccgaacgacaatgcacgggcgttcaaccagtttgccaagttcatcggcgacgagcgagctgagaagacggcgcgcaagtggggccggcccctgcaggcagtggtcatcaccaactgcggcctcctctgaggcaaatttcgcccttcttttccttccgcctttctgctttcaagtgcattccatcgagctgctgctcactgctccgtttgatgttgccttctgctgatgtgccctgccatcccagagctgctgttatcaaccccacctctgtatgtttgtgctttctgtcgctggacttgtgcgcccctgagagtgat

SEQ ID NO: 8679 - DNA, 455 bp, Chlorella sorokiniana
  Clone ID: LIB3602-109-Q1-K1-F3
cggtgcgccgtccccagccctacaggcctcctgcgctgaacgccggtgccatccgtcgagcctgagcgctgcacgcagctacgcaggggggacagcgaatcccgcttgccagcctaggaaccgggcaccatggcgatggcacggcaggctccctgaagggagtgggagtgcccgtcaagctgctgcacgaggcgaccggccacatctgcacggtggagctgaagagcggcgagatctaccgcggcgagctgcacgatgcggaggacaactggaacgtgcagctcacaaacgtgcaggcgacggcgcgcgacggcaaggtgtcccacatggagcacatcttcatccgcggcagccgcgtgcggtacgtgattgtgcccgacatgctgaaaaacgcgcccatgttcaagcggattgaccccaagatgaagatgaagaatgtggcgctgggtgtgggc

SEQ ID NO: 8680 - DNA, 483 bp, Chlorella sorokiniana
  Clone ID: LIB3602-109-Q1-K1-F4
gagcggctcacgctctgccccatccagaagaagctgatcgccaaggagcggctcagccagaaggagattgaatgggtgaacgcttaccgccagcaggtctgggattcgctgtccccccggctggcgggcgaggaggaggagctggcctggctcaaggaggccacctcacctttgtgaacttgaagcgtgtgaatggctgcggccaactgcctggcgtcattcggccagcagcagagctggcctggctcaaggaggccacctcgccgctgtgaaacacgtgccaattgccgctcaacatggcagccagctgaccgcaacagtgccgctttgcaccaacaaccagcagcctagctgctgctgctgctgctgctgctgctgctgctgagccgccggatttctttcatctgtttcctcagctcgccacttgtaccctgaatccacgctcggttccatcagttgctctgtgtgaatgccaaacttgcc

SEQ ID NO: 8681 - DNA, 69 bp, Chlorella sorokiniana
  Clone ID: LIB3602-109-Q1-K1-F5
gaaaaaaaaaaaaaaaaaaaaaaaaaaaaacaaaaaaaaaaaaagtgcaaccactctaaaaatatcaaa

SEQ ID NO: 8682 - DNA, 412 bp, Chlorella sorokiniana
  Clone ID: LIB3602-109-Q1-K1-F6
gccagctgtgcaggcggcctgtgctgtgatgcggcacgcggcgtgagctcaccgactgcagccgccgcagagtgtggcagagccacgggtcgccgccgcgactttagcgtgctgctggactgcggctgcgagcccaagcagcagttgaagcttgcgggtgaccgccaatcatcctgacctgaggtggtttgcaagtgtgctgctgccctccgcagccgctgccaaaaacccaataagccttttgtacggaggttgccgcagcgcgcttgcttgatgcactctgctcccaccggccccatgcgccagtgccacccctgcactgtaccacattgttttgtactgccaatcggcgccccgcccgctttgcatgctttgctagcgcccccttttctttccactgtgaacgagtgag

SEQ ID NO: 8683 - DNA, 482 bp, Chlorella sorokiniana
  Clone ID: LIB3602-109-Q1-K1-F7
gcgggagattgccacgctcaaccagatgttcagcggagccatcatggcgcagagcgagcaaatagagaagctgtacgcggatgcggtggaggccacgcacaacatcagccgcgccaacgtgcagctggacaaggcgatacgcaccaaccggtcggctcgcaagtacatgatcgtcttcttcctggtggcctccctagccctgctgttcctggactggtggaactcgtgagggggcaggaagagcacagtcagccgattgctaatgcaagcggcagtttaggatctctctgcagcagctgcggcagctcacttccaaaccaaacgatctctgccaacccggcagtgccaacggctgctgaaccgaccgccactgcaccttgccacgtgtttgctccatgtgttgcacagcaaaacggttacacgaaccttcaacataacatgtcgatggctgcaaatacgcgcggtaaagagcggtttacaaa

SEQ ID NO: 8684 - DNA, 389 bp, Chlorella sorokiniana
  unsure (1)..(389): unsure at all n locations; Clone ID: LIB3602-109-Q1-K1-F8
ctgaagcagagcggcctggaagtggcgggcaagcgggtgctggtgcccggctgcggacggggctacgacttggttgagtttgtgcgggcgggagctgcagcggcggttgggctggagctggccccaacagcgcagcgcgaggcagcggcatacctggcagacaccctgacgccggccgagcttgcaaatgcagaggtgcacacgggtgatttcttcaagtgggagcaccccacgcacgcagcctgngacgtcgcttacgactataccttcttctgcgcgctgcaccccgccatgcggcgggactgggcggcgggctacgcacgccttctggcccccggcgccctgctgggctgcctgggcttcccaatcgtgccggcgggggagcaccc

SEQ ID NO: 8685 - DNA, 181 bp, Chlorella sorokiniana
  Clone ID: LIB3602-109-Q1-K1-F9
gaacaacaagatgctggtgcgcaccgcggcatgagctgagcggctgcatggcatgagcggtgcgcacggcggcggcccatggtgggggcatgggacgtatgcgtgagcggcgctggcctgcgtgctctggagcaccgtcctgccattcaatattgccatggcatgtaagagcagacatgtt

SEQ ID NO: 8686 - DNA, 513 bp, Chlorella sorokiniana
  unsure (1)..(513): unsure at all n locations; Clone ID: LIB3602-109-Q1-K1-G1
cgcagttctaccagaacatcacggccgccagccttcagtcggcgcgcgggtcgtacctgcaggccgagtccatgctgatgttcatgcgggtggtggagcagcagcacatgaagacctgcgacctggacgtgggcggctgggnctgaagaacagcgtgcgccacaagctgctgcgcccgccgcgcgtcttcacgctgcagctgggctggcagtcgcagcaggaggagccgcacagcatcgccgccacgctggcagcggtggacgagatggtcaacctggccgacttttacgagggcgtgcctcctggtaccccgcactacgcgctgcactccatggtgtgctactacggtgcccactactcggcgtttgtgtgggccgccgactgccgcgcctggctgttgttcgacgacgtgcgcgtcagccgcgtgggcagttggacggacgtgcggcgcaagtgcgaggccggccgcatccagcccagcgtgctcttctacgaggcaatggcgtgagcacc

SEQ ID NO: 8687 - DNA, 436 bp, Chlorella sorokiniana
  Clone ID: LIB3602-109-Q1-K1-G10
gcggcgacggcgtgagccacaccgtgcccatctacgagggctacgcgctgccgcacgccatccagcgcctggacctcgctggccgcgagctgaccgacttcatgatgaagatcctgaccgagcgcggctactccttcaccaccaccgccgagcgcgaaattgtgcgcgacatcaaggagaagctgggctacgtggcgctggactatgagcaggagctgcagaccagcctcaactcctccaccctggagaagacctttgagctgccagacggccaggtcatcaccattggcagcgagcggttccgctgcccggaggtgctgttccagcccagcatgatgggcctggagagcgcgggcatccacgagaccaccttcaactccatcatgaagtgcgacgtggacatcccgaaggacctctacttcaacatcgtgctgtc

SEQ ID NO: 8688 - DNA, 444 bp, Chlorella sorokiniana
  Clone ID: LIB3602-109-Q1-K1-G11
gtacaagatgcgcctggtgtacgcccatttccccatcaacatcaacatcgagaacaagggcggcaaggtggagatccgcaacttcctgggcgagaagattgtgcgcgtggtggacatgctgccgggcgtgacctgcagcgcagcgccgccgtcaaggacgagctgatcctgaccggcaacgacatcgagctggtgtcccgcagcagcgcgctgatccaccagaagtgcctggtgaagaagaaggacatccgcaagttcctggacggcatctacctcagcgagcgcggcaccctggtgaagcccgagtaagcggagcccgcacgttgcagtagaggtggcggcacgagcgcagcattgcgcagcgctcacgcccgcgccggcggagcatcggcggcggcaaccggccccagctgcggcgctgcacgccatgtaacgcacacttta

SEQ ID NO: 8689 - DNA, 305 bp, Chlorella sorokiniana
  Clone ID: LIB3602-109-Q1-K1-G12
cgcgaggctcctccatcctcatccgctcctacacctggccggagctgcgctcctccctgccctggctcatcggctccctgggcaccgtggcgctggatgcggccatctttgtgcagtggcgcacgctgggccatggcggcggtcggcggccccaaggaaccacccaagtgatgaggagagcccgctgctcgacccagacgtttagctggcccgcagcgctctgaaaattgggtggcatggcgtgccagctccttctgccatgtagtgcatgcccagagtaccctgtaatcaacccacccccctcg

SEQ ID NO: 8690 - DNA, 382 bp, Chlorella sorokiniana
  Clone ID: LIB3602-109-Q1-K1-G2
ccaagatcaagcgcaaggtgcagcgctacaacgacaagctggacgacttcgagctgcttcaagggtaggcctcagcccgaaccggtgtgctgtgcacgcatgtcgccatggccaccattgcggcgcagattggcttcctgtgtttacatcccagcttgtatcacccatgttctggttctgctcttgctcctgctccatttcttcacgcttgctggtcccctgctctccgctgctgctccgctccgctgctgcttacccgcataccattgacctatcagctgcccctcagcctgaccatttgtccatcctttggactcaacttgcgtggcatgacaccacatacccagcatgcctggctggctctgtaacaaaacgctgagca

SEQ ID NO: 8691 - DNA, 500 bp, Chlorella sorokiniana
  unsure (1)..(500): unsure at all n locations; Clone ID: LIB3602-109-Q1-K1-G3
cgccatcaagggtatcggccgccgcttctccaacatctgctgcaagaaggctgaggtggacctgagcaagcgcgccggcgagctgtctgccgaggagctggagagcatcatgaccatcgtggccaacccccgcgcctacaagatccccgactggttcctgaacaggcagaaggacgtcaaggacggccgctactcgcaggtgacctcctccgcgctggacaccaagctgcgcgatgacctggagcgcctgaagaagatccggaaccaccgcggtctgcgccactactggggcctcaccgtgcgcggccagcacaccaagaccactggccgccgcggcaagaccgtgggcgtggctggcaagaagaagtaagcagcttcttgcgggcgcggcctgcggcacgggcggatgctggcggctgggtgacggcggctggcgccgnccgcgcagcaaccccactggcagagccggcggcagcaggtggatccacaccaagtcgtgc

SEQ ID NO: 8692 - DNA, 368 bp, Chlorella sorokiniana
  Clone ID: LIB3602-109-Q1-K1-G4
ggtgggcggcctgtttgatgaccgcaagcgcctgaccaagtcggcgagccagccgcaggtggcggcccctgccaagtgatgtggctgcggcccctgggcatgctgcctcatggccctgcctgcttggcatgctgccccaagtatagaaaagaatgaatgctgcgggtgcggctgatgcccgcccgcccaccctgcccccatcagacggtctatgccggtgaaacactgccgctgctgatggactgacgatttacttgtgtggttttaagcctgtcgggcacactcgtgccgctgtcctcaagactgtcaacttggctcgccttgctcttttgcccgtctttatgtgtggtgtgcccccgtcccactct

SEQ ID NO: 8693 - DNA, 514 bp, Chlorella sorokiniana
  unsure (1)..(514): unsure at all n locations; Clone ID: LIB3602-109-Q1-K1-G5
gcaaggaggccccctccgacgaggagtgaagcctgngatgatgagtgtgccgcttcacaggtgctcaggaagagtgagcacctcgcctggtccccaatgctcagtaggagcgagtgcctgtggatgagtggaggcctgctcccgcccgggcaaggctggcccaccggctgggcatcgctctgtgttccagcccggggcgcccaaccacctctcccaaccgactcgcttcctgcctttaaccgcggctgttggtaatgcgccgcaccgcttcccacctcccacctgactgacgactgcacgtgctgtgccagcttcgaccggcgcgtgccgcctctcccgctgacccttttgccagactgactgacgctgccatgctcttgtttttgggcccattgccgttcttccaccttgtgacgaccgctccgctgctctcccatgcctgtttgacccacgccccgacccggacaagccactgtgctttcccatgagcactggtaatccactgtttgaaaaa

SEQ ID NO: 8694 - DNA, 275 bp, Chlorella sorokiniana
  Clone ID: LIB3602-109-Q1-K1-G6
ttccacattccttaacggacttgagggggccgttccagaccggacttgaacccaatttaaccgcttcctggacaccgcaagttggcgcttatataagccaaattgcaagcaagcaagccacacttaacccaagaagcaagttgtgtaacaaccgcctgcgccccaagaacttgcgccgcttgcgccgcccttgcgctgtgcacattaattgccctgctctgaaccgcccgcgtttctttgaaccccttaaccaagcccttgccacacccgcaacc

SEQ ID NO: 8695 - DNA, 407 bp, Chlorella sorokiniana
  Clone ID: LIB3602-109-Q1-K1-G7
gtggcgcctgtgtcaacagagcgggcatcatgggtatctcccgtgattccctgcacaagcgccgcgccacgggcggcaagcagaaggggtggcgcaagaagcggaagtatgagctgggccgccaggccgccatgaccaagctgtcctccaacgtgtgcgtgcgccgcgtgcgcgtgcgcggcggcaactccaagttccgcgcgctgcgcctcgaccacggcaacttctcctggggctctgaggccgtgacccgcaaggtgcgcatcctggacgtgaagtacaacgcgtccaacaacgagctggtgcgcacccagaccctggtgaagggctgcatcgtggaggtggacgccgctcccttcaagcagtggtaccagcaacactacggcgcggaggtgggccagaagaag

SEQ ID NO: 8696 - DNA, 249 bp, Chlorella sorokiniana
  unsure (1)..(249): unsure at all n locations; Clone ID: LIB3602-109-Q1-K1-G8
gccgcaactgccctgccatgactcgcgttgcaggggtgagcgctaacgcgcccccaacctgcagcggagcgctgtcagaggacgagaacaagcggataggcaanattgacttcttctatcaaccttcttgcacccttggcatcttaccgttccttttgcccgcccgctttgtgatcacttgccttgcttcctgccactctgtctcaaggccctatgctgcctttcattttatgcatgcatgccgttatc

SEQ ID NO: 8697 - DNA, 428 bp, Chlorella sorokiniana
  unsure (1)..(428): unsure at all n locations; Clone ID: LIB3602-109-Q1-K1-H10
gcgcccgtgcaagccatccgccggaaggaggcgcagcttcgctgtccctgccttcccacaactgtcaagatggctcccaagcgccgcacgaggcaggaggagaatgtgagcctcgggccggccacccgcgagggcgagctgggtggggncgtccccacatcttcgcctacttcaacgacaccttcgtccacgtgactgatctgtccggcaaggagacgctggtgcgcgtgactggtggcatgaaggtgaaggccgaccgcgacgagtcgtccccctacgccgccatgcttgccgcccacgacgtggccacccgctgcaaggagctgggcgtgaacgcgctgcacatcaagctgcgcgccaccggcgggaaccgaaccaagacccccgggcccggcgcccagtcccggctgggcgccctggcccgttcc

SEQ ID NO: 8698 - DNA, 236 bp, Chlorella sorokiniana
  unsure (1)..(236): unsure at all n locations; Clone ID: LIB3602-109-Q1-K1-H11
gcgaggggccgtangagggtaaagagcaaagatgccggcgggccaaggctaccgcgcgcgtacgcgccacatgttcatccgcggctttaggcagaaaggcttaatccgggggtgcagctacctgaccaactacaanctggtgactatgttggacatcaaagtcaacgctcctgtgcacaagggcatgccccacaagttctaccactgcaagactggctgcttgtggaatgtgacca

SEQ ID NO: 8699 - DNA, 371 bp, Chlorella sorokiniana
  unsure (1)..(371): unsure at all n locations; Clone ID: LIB3602-109-Q1-K1-H2
ggcgcttgccgccgccaactccagcaagggcaagaagaagaaatggtccaagggcaagctgaaggagaaggtgaacaacctggtcctgtgcgacaaggccacctatgagaagctgctcactgaggtgcccaagtacaagatgatcactccctcggtgctgtccgaccgcctgcggatcaacggcagcctggcgcgcgccgccatcaaggagctgctgggcaaggggctgattaaggaggtggccaagagccgcgcgcagcagatttacacccgcgcgacggcagccgccagctaagcagccacccagcagtttggcagcatgctagtgcactcgttgtgcttgccaatctggtaacaggtccctcgcnnaa

SEQ ID NO: 8700 - DNA, 498 bp, Chlorella sorokiniana
  Clone ID: LIB3602-109-Q1-K1-H3
gccggcgacgcccacagcaagcgagcctgagatcgtgcctgcgccacgcacgccggcggcaagcattgtgggaggcatgcgggtggcgggagcgagccccaagaagaagaagcgcaacccgatgcacaaggtgcagaagatgctgggcctcaagccctctggggcatccagcagcaagtcccgccgctgagcctcagcagcggggcggaaggcaggcccttgcaggcagcctgccaggctccacaagcaagcagtgtgcagctctggtgcccctgccaccaaaagcagcacgaatgttgccgactcgtgttggttttggccggcggggcccaatgcagcaggcggcgaaccacctgcctgtccgcggcacagtcttgctgcctaccaagaaactccaataagcaatctgtttttggtgcacacttttgtactacgctagtatcatagttacttcccttccaagaggtgtgtccttctcgatcccccttcctcctattt

SEQ ID NO: 8701 - DNA, 460 bp, Chlorella sorokiniana
  Clone ID: LIB3602-109-Q1-K1-H4
cccacgcgtccgcttgcggtggagcaggggctggagattgaccgcttgcgtcgcacaaaagatggcctgctgctgcgcctgcgcacaggagaggagcagctgctggcaacctaccgggacgaagctgccactgacctattcaggcgctggctgaggcgcgcgtggaggcggcacagcgcgactttgagatcatggagctgcaggggcaggtgcggaagaaggatgcgctgatcgataagctgcgagcgcagctgacacgtgcagaggccaagtatcgcgcgcggctggatgcagcacactcgccgggccccctagccgcagccctctctcctgcctcacgtggccttccgccgtcgccgtggcgagacgaggctgattctccggctgcgccgcagcagtctcaggcaggcagcagcgcggcagtgggtgcaatgcacgacagcccagcagcactggaggt

SEQ ID NO: 8702 - DNA, 486 bp, Chlorella sorokiniana
  Clone ID: LIB3602-109-Q1-K1-H5
gcgccgcgccacgggcggcaagcagaaggcatggcgcaagaagcggaagtatgagctgggccgccaggccgccatgaccaagctgtccgccaacgtgtgcgtgcgccgcgtgcgcgtgcgcggcggcaactccaagttcggcgctgcgcctcgaccacggcaacttctcctggggctctgaggccgtgacccgcaaggtgcgcatcctggacgtgaagtacaacgcgtccaacaacgagctggtgcgcacccagaccctggtgaagggctgcatcgtggaggtggacgccgctcccttcaagcagtggtaccagcagcactacggcgcggaggtgggccagaagaagaaggccgtcgtcgccgcgcccgccgagggcgaggccgcctcccagagcaaccacgtgaagcggaagctcaagcagcgcaaccagggccgcaagctggaccagatgctggacgaccaatttggcaccgggcggctgtacg

SEQ ID NO: 8703 - DNA, 455 bp, Chlorella sorokiniana
  Clone ID: LIB3602-109-Q1-K1-H6
ggtccaagctcggcgtgggggcaccagcagcgcgccaccatgggtcgcatgcacagcaatggcaagggcaagagccgctcggctctgcggtacaagcgcagcccccccctcctggctgaagatcacccccggcgaggtgtctgacaccatcgccaagatggccaagaagggcatgaccccctcccagatcggcgtgatcctgcgcgacagccacggcatcgcccaggtcaagtccgtgaccggctccaagatcctgcgcatcctcaagggccagggcctggcccccgagctgcccgaggatctgtaccacctcatcaagaaggcggtggccatgcgcaagcacctggaggccaaccgcaaggacaaggacggcaagttccacctgattctggtggagtcccgcatccaccgccctgctcggtactacaagcgtaccaaaaagctgccgcccaact

SEQ ID NO: 8704 - DNA, 323 bp, Chlorella sorokiniana
  Clone ID: LIB3602-109-Q1-K1-H7
cacgccaaactctgctcctttcgacatccccttctctatcatactgaacgtggcggttggcggcaagtgggcgggtgcaccggacgcggcctcctacttcccagcaaccatgctggtggattacgtgcgtgtgtgggactccttccaacaacaccagctccggtggcttcatttgggatatcctgaacaacccctcctgattcctgcacatttgtcattctcttggatggcccagcatttgggccggctgcacttgcacacccacaggcaggcaacgactgaccaatgccactactctattagctcaccagacgctgtaacat

SEQ ID NO: 8705 - DNA, 529 bp, Chlorella sorokiniana
  Clone ID: LIB3602-109-Q1-K1-H8
ggacggctctcgcagcaagcttgaaagcggggcctgacaccatctagcagcagcggcagcagcagcgatggacgaccaggtgctgctggcacccaacatagaggacatccctccgccagggctggcgctcgttgaagagctagacaagctgctgctggtgcagttgagagatgggcggaagatcatcggcacgctgcggtcatttgatcagtttgcaaacctggtgctccaaggggccaaggagcgcatcattgtgggggcgcagtatgcagagatccccctggggctgcacgtagtcaggggtgagaatgtggtgctgctgggtgagctggacttggctcgggagccaccggcggggctggagctggtcagcgaagcagccatcaagcaggcgcagcgtgcggagcgggaggcggacaagatgaagggcacgttgcgcgcacgctttgacttcttggatgacatataaaagggattgcagccgtagcagcgacaacaactgcttgtcgtatttcaatttgagcctgct

SEQ ID NO: 8706 - DNA, 562 bp, Chlorella sorokiniana
  Clone ID: LIB3602-109-Q1-K1-H9
cgcacgcgtacgcgcagccgcagcagggggcggggcggcaacaattacccgccctaccgcggccggcgctcgccgacacctgcagggggcttcatgcgcgatcgctcaccggcgacggcgcgtggcagccaactgcttgggctggccttaccttcatgatgaacgagcgggatgtggatgacaagtttgggcggtatggccgcctcaaggacgtccgcatcgtccgggacaagatcacgggagagagcaaagggtttgggtacgtgtcatatgacaatgacgacgatgcagccgaggccattcgcaagctggatggcaccgactggaacgggctgcgcctgctggaggaggtggcaaaacgcccaatgtgatcaacggcagcagggcgggcatcggccggcggcttgccggcagctggcgacgcaacgttgcggcgaaccttgtacggcctggatgcacctgcacgtgggaagcgccccatggacggggtgcctacagtctggccggatgttttttcttagggcctggtggtaaaacctaatttgcaaggcatcagctgcgc

SEQ ID NO: 8707 - DNA, 383 bp, Chlorella sorokiniana
  Clone ID: LIB3602-112-Q1-K1-A10
ggtggaccccatctaccccggtgaggcctttgaccccctgggcctggctgacgaccccgacaccctggctgagctcaaggtgaaggagatcaagaacggccgcctcgccatggtgtccatgtttggcttcttcatccaggccattgtgaccggcaagggccccgtgcagaacctgtccgaccacctggcctccccctccaccgacaacttctactccctgtacgccaagaccctggcgtaagcggcctgcacttgctcctgcttgagcctcgactggcggcgggcgtgaccctgtggcagtgcgctcccgcttgcgcccgctgcctgacttgacttcagctccactgttgcaccgaggggatggtgtaacatgtatgctgggg

SEQ ID NO: 8708 - DNA, 297 bp, Chlorella sorokiniana
  unsure (1)..(297): unsure at all n locations; Clone ID: LIB3602-112-Q1-K1-A11
gaggccgcccgtttgtggtgggaggagcgggtccagctgctgcctggcggctcgcctgtggtggagggagtggtggaggctgtcgcccctgttcgcaccaccctcattgacgacgagcgcaacccactctacatgagctacacggacgtgacggcctgcgtgatccgcancctcacccgggggagggcccgccgcctggccgcctgagcggctgtcttccttgcgccgtcctgtgcacgtgacggcttcggatgcatcgtgctgccggcgtggcgctgttgagccgctgcgcgctgg

SEQ ID NO: 8709 - DNA, 215 bp, Chlorella sorokiniana
  unsure (1)..(215): unsure at all n locations; Clone ID: LIB3602-112-Q1-K1-A12
ttgtgagcaagctggcggnacaagaatacaagaaggtcggcggcgcggtgcagctggtggcgtaagcacccccacgcccacccgcagcagcagcagcagtaccccagcagccccgattgactcctgagagcttgcccgcccacgcaaagcggccacatgcctgccgggggcgccccccggcggggccttagcgaggcgtgtaacccgcacctcgg

SEQ ID NO: 8710 - DNA, 243 bp, Chlorella sorokiniana
  Clone ID: LIB3602-112-Q1-K1-A7
ctgatgaggagcagccaactatcgcgcacccagcaatgagcagggctggtcaacatgccaataagaacacacaaaactttgccatccggcctccccaagcgtggagttttggtccgtctttcagtttcggttttcttgcaaaaggcagtagcagtgcttttgctacaggtggatattttgggcaatgtgccggctcaagctgagcacggggcaaagcatcaaactgtgacacgcaacacgtct

SEQ ID NO: 8711 - DNA, 211 bp, Chlorella sorokiniana
  Clone ID: LIB3602-112-Q1-K1-A8
ctttgccagcctcgacgagtactgcagcatcatgagggcatgttgggctcaggatcctggcgagcggcccacattctcagatgtggcgccccgcctgcgtgccctgcttgatgcgctgccggagtgaccgccgctggccgcatgactgacatgaacatccggcgagcagcagatgccgttttatatgctgtatcaagcagatctgcaagag

SEQ ID NO: 8712 - DNA, 564 bp, Chlorella sorokiniana
  unsure (1)..(564): unsure at all n locations; Clone ID: LIB3602-112-Q1-K1-A9
ggcaagaacctcaccctcgnagtggagtcaagcgataccattgagaacgtgaaggccaagatccaggacaaggagggcatcccccctgaccagcagcgcctgatcttcgcgggcaagcagctggaggacggccgcacgctcgccgactacaacatccagaaggagtccacgctgcacctggtgctgcgcctgcgcggcggcatgcagatctttgtcaagacgctgacgggcaagaccatcacgctggaggtggagtcgagcgacacgatcgagaacgtgaaggccaagatccaggacaaggagggcatcccccctgaccagcagcgcctcatctttgccggcaagcagctggaggatggccgcaccctggccgactacaacatccagaaggagtccacgctgcacctggtgctgcgcctgcgcggcggcaactaggcggctggggcacccacccacctgccttcacacccatcgtgtgcggtaggagcggcgcgcgcgtgcacatgtagcatcctgccctgtaccctcaccctctgtaccccacccctgtaaccgccgcgctct

SEQ ID NO: 8713 - DNA, 467 bp, Chlorella sorokiniana
  unsure (1)..(467): unsure at all n locations; Clone ID: LIB3602-112-Q1-K1-B10
cggncgcgtgggcggcaccggcgcgctgccatgcaagcactgcggcggcacggggcggctggggcccgcgcagtaacagggccaaggcaagtcagcccatggcaagtccccacatgcagccatcagctcgtgggtcccgtcctccctgctgcttgttctggtgtggtcgtgtgttcttttctggcctgctgactgtcagccgcttgcagtgcactgctgtgcgccacctcttccctttttccagcaaaataagctccagtgttcctcttctgctgctgaaaacgagtgatactaaaacagatgcatgccatcgtgtccatttacaaacccgtggccctgctgcctggtgcactacgaatgctgccttttcctgcatgcatgccctctccgaacgcacccttgcacccctcaatgtcctcagctacccctcagccaactcgcggaagaacctgtaataaatgacatcc

SEQ ID NO: 8714 - DNA, 488 bp, Chlorella sorokiniana
  Clone ID: LIB3602-112-Q1-K1-B11
cggccgcgtgggtgccaaccaagcacgcctgtgcagcacccgcccgtgacgcgagcaggggcctctgagaggcccctttctgtctcgccgctccgctctccagctgtgttcaatctgtcgcaagttctgccgtcccgcctcacccctgccgaccgtcctgttgtggcctaacgctgtaccaagtctctgctgaccgccgtcccctccggccgtgccccagcgcccctgctcacctcccctcttgagactgctcctccgtgcttgcggcgaatgggctcctgtagattagacagcccccatgcgtacccaccactgtgccctcttttcctgtactctcgccggccgcggcgcgcacacacatgctcgctcgaaaacccaacgaagccgcccgcccgccatacacacgcactgctgtatcactgatgcacccaccgtgtgagccctttttcccatgcctgtgctcaccccatgtaacccagatagagctc

SEQ ID NO: 8715 - DNA, 271 bp, Chlorella sorokiniana
  Clone ID: LIB3602-112-Q1-K1-B12
gccctttcttgactggccccaaggcccaggcagcttgcacaggctttcatccatttttttcaactggcataagcaggcctccctcccttgctgttgtaacgcagcccttgtgctaccagtctctcccctattttgtgttctgcccagctcagcccgcactcctgtccctgccaccccaatctgccctccttggcggctgctgattctacctctctcccctcattttcacctgtccattgcatgtcactgctcattgtaaacacagccaagc

SEQ ID NO: 8716 - DNA, 486 bp, Chlorella sorokiniana; identical to SEQ ID NO: 6579
  Clone ID: LIB3602-112-Q1-K1-B7

SEQ ID NO: 8717 - DNA, 563 bp, Chlorella sorokiniana
  unsure (1)..(563): unsure at all n locations; Clone ID: LIB3602-112-Q1-K1-B8
cggagtagggctagggccanaggagctcaagaccactactgccgcttcagtggcctcacgatctaccctggcaagggtgtgctgttcatccgcgtggatggccagcaattcctgttcctgaagcagaagtgccggtcgctgttcaaccagcgcaagcggcccgccaagcttgcctggtccaccctgtcccgcaagcagcaccgcaaggacctggaggcgcaagttgcccgcaagaagcggcgcaacgtgaacaaggcggtcacccgctccgtggcgggcgccagcctggaggtgatccagaagaagaagagcgagaagcccgaggcgcgcaaggcctcccgcgaggcggcgctgcgtgagatcaaggagcgcgccaagaaggccaaggccgacaaggcggtgcagaaggcgcaggccaaggcctcgggcgccggcaaggctgtcaagaacatgcctaagggcgcgggcaagggcggcgccaagagcaccggccgctaagccagcggcaatgcagcgggcgtagcggcctgctgggccgctgccgttgtaacgcacttcctcga

SEQ ID NO: 8718 - DNA, 500 bp, Chlorella sorokiniana
  Clone ID: LIB3602-112-Q1-K1-B9
ggcgggcgcggtgcagcaggagtgcgggctgcccatcacccccgaatgtttgtgaccagcaccctcaagtttgggctgaccgaggtggtgtaccagtgggcgcgcggcacgcccttcaaggacatttgcgggctgacagacgtgatggagggcagcattgtgcgggccatggtgcgcctggacgagacgtgcagggagttccgggatgctgcgcgcgtcatgggcaacactgccctgttccagcagatggagaaggcgtcttccgccatcaagcgggacgtcatcttcgccgcctccctctacgtggcgtgagtgtggcagaaagtgcagcggcagctttgagcattagcagaggtatcctgttcatgtctgctgcggaacattgtaaaacaacttaagaaaaaaaaaaaaaaaaaaaaaaaaaaaaaaaaaaaaaaaaaaaaaaaaaaaaaaaaaaaaaaaaaaaaaaaaaaaaaaaaaaaggggcgggccgttttaaa

SEQ ID NO: 8719 - DNA, 591 bp, Chlorella sorokiniana
  Clone ID: LIB3602-112-Q1-K1-C11
cgacagaaaaatcgaagtgggagaaggtgccttgacccaaatgggaaagggcagccgcaagatgctgggctacgctcagtaagctgcaggggctgccgctcccctggccccctttcctctgcattagcttagcaagccagccccaagctgcgcccgcaataaagcgcccgtccgtgccgcgatctgtgcgcgcccccagtcagcgccaacccctttcagttcctttttcctttcatttgcccccgccccaatgcatgcctgtctcctcctcgctacccgcccacccgcccacagagtgctgctctgcactagtttgctgctgctacggggtaggccccgcgcagccctctgctagctttgctcgtattcgccccgccatcactgattccctgcctgcactgctatcaagcaacgcgcccctgctgccactgctgtatagcgtcgcacctctgccatcccctgatccctgcccatgcctccactccccatccgatactgccatacgtgacatgttactgccacagcaccatgcatactgcccatcccctacctctattctgtgcatccttgcccctttctgcatccaccctt

SEQ ID NO: 8720 - DNA, 463 bp, Chlorella sorokiniana
  Clone ID: LIB3602-112-Q1-K1-C12
agcgtacaactccagcggggctggcctaccgcggcgccaccacggctgtggccggcggggccggcgctgcggtgatcatgagaacgagaaggtcaggctggttggccggtacaggacgctggaaagaacgcgcctgggaggacctttgcggccgccggggcggggcctactgcatgccccgcttacctgacacgcgccgccccaacccgggaccgctgctgtgcgcactgcactccggacggcctgagccagcgctggccactcttacaatggtgtgctgcctggggctgatcgcttgggccggcactgattgtggtgctgttgggcgtcggcatcaacctggtgatctccacctctgccctgggccagtaaatggcgacgccccccgcgtgggcagcagcagcatcagccagcagcattcccttgcagctaccccgcgagaagacaaaccctgaccctaccc

SEQ ID NO: 8721 - DNA, 576 bp, Chlorella sorokiniana
  Clone ID: LIB3602-112-Q1-K1-C7
tgagccctaaaaaaaaaaaaaaaaaaaaaaaaaaaaaaaaaaaaaaaaaaaaaaaaaaaaaaaaaaaaaaaaaaaaaaagaaaaaaaaaataaaaaaaaaacaaaaaaaaaaaacaaaaacataaaaaaaaaaaaaagggggggtcctttttttggagctcccttttttgccccccctttttccccccttttttttttttttttcctcccctttactatttttttggcctcgttttttatccccctttccccgggaaaaccccttggtttcccccctttttcccttttccctaaccacccttttttccccctgtttgtttaatggaaagggccctcccccggccctttttccccaattttctgcctttttttcttcgcaatggggccccccctttttccggctttttaacccccgttggtttggttttttccccttgttttctttttttttttggcggcttttttccccccgcttttttttttttgcccctttttttttgccgattttttggtttttttccccggaaattcttaaatgggggtttttttttgggtttcccttttttgtttttttgg

SEQ ID NO: 8722 - DNA, 607 bp, Chlorella sorokiniana
  unsure (1)..(607): unsure at all n locations; Clone ID: LIB3602-112-Q1-K1-C8
cgtccgnaaaaaaaaaaaaaaaaaaaaaaaaaaaaaaaaaaaaaaaaaaaaaaaaaaaaaaaaaaaaaaaaaaaaaaaaaaaaaaaaaaaaaaaaaaaaaaaaaaaaaaaaaaaaaaaaaaaaaaaaaaaaaaaaaaaaaaaaaaaaaaaaaaaaggggggggccctttttggagggtcccagttttccttccccttccttgcagttttttattttttttttggggccccctattttattttcttggcccggttttttcccccttggggctgggaaaacccttgggtttccccatttttttccctttgggaaaattccctttttccccggttgggtttttagaaaagggccccccccctttcccttttccaaaattttcccccccttttttggcatttggccccccccttttaggggccttttagcccgggggggtggggggtttccccccagggtcccctttttttttgccgggcccttagcccccttttttttgtttttttccctttttttttccccccttttcccggtttttccctgtaagtttttaattgggggcctctttttagggtccccttttgggtttttccggcccttggcccccaaa

SEQ ID NO: 8723 - DNA, 569 bp, Chlorella sorokiniana
  unsure (1)..(569): unsure at all n locations; Clone ID: LIB3602-112-Q1-K1-C9
cgcctctgccggcggcgacgatgatgacgaggtgtatgccgatggcctggacgaggaggaggacgcccatgctggccacgaccacgatcacgaccacgatcatgatcacgaccatgagcacgaccatgatgcgccggagcaggcctcggatgacgacccgtatgacgactccgagctttgatgattagcagaggagctctggtcgagacggggtgatgggtcagtggcggagaggcgcggctgctctgcggcggccggctgcttcagcgggcctgtgggcttggtacagcagctgcagcggcacattttgatggcatgcgtgcactggcagccaggccgcggcggggccagcggagctcatggcagcatggaagccgcgatggcggcgcatgcgtccccgcgccggcaagctgggctggcggtggctgacgtgcgctgctgcttcttgcaacccttttctgtttccttctgttcgttactcttgtgcactgcgggggccacttggccgctaagcttatgtcaaaatatcaggcncaaaaaaaaaaaaaaaaaanaaaaannnnnnnana

SEQ ID NO: 8724 - DNA, 538 bp, Chlorella sorokiniana
  Clone ID: LIB3602-112-Q1-K1-D10
aaaaaaaaaaaaaaaaaaaaaaaaaaaaaaaaaaaaaaaaaaaaaaaaaaaaaaaaaaaaaaaaaaaaaaaaaaaaaaaaaaaaaaaaaaaaaaaaaaaaaaaaaaaaaaaaaaaaaaagggggggcctttttaggggacccaattttgtttccccttttttgcaccttggttgccttttttttttgggggccccctaattttattcccttggcgggctttttcaaacgtttttttgggaaaacccttggctttccccactttattgctttgccaacaattccctttttaaccggtggggttattaacaaaaggccccgcccgacccctcttttttaccgtttcctaaccttaattggtaaagggcccccccctttttttgtccatttattcccggggtttttggggtttccccccattgtaccctttacttttgcaagccccttagcgcccgtttttttcttttttttccttttttttttcccccggttcgcgggttttccctgtaaatttttatttggggggttcctttggggttt

SEQ ID NO: 8725 - DNA, 115 bp, Chlorella sorokiniana
  Clone ID: LIB3602-112-Q1-K1-D11
aaaaaaaaaaaaaaaaaaaaaaaaaaaaaaaaaaaaaaaaaaaaaaaagggcggacagaatataaaagaacacaaaactaacaaacacataacatgcaaaagaaaaaactaatta

SEQ ID NO: 8726 - DNA, 291 bp, Chlorella sorokiniana
  unsure (1)..(291): unsure at all n locations; Clone ID: LIB3602-112-Q1-K1-D12
gggcacggcagtggcgatttatgcggngggcaagnagcacgccatggcgataggctacacaaccatgtctacggcgcagatgcgggagcagaacaagggcatcggcgtgaacaacctgcactacctcacagacggcctgtggaagacgccacagctggactgaactgtattgagcggccatcagcagcggcgctggctttacacatgggcgacgcaaaacctcatgatttagcatgttgcttatgaatcgtgccgcccggcatcccccaccagtgtaacgcaacctgctgc

SEQ ID NO: 8727 - DNA, 513 bp, Chlorella sorokiniana
  Clone ID: LIB3602-112-Q1-K1-D8
gccacgggctacatcgttgctaactcggagcgcggcaatatctttgcggtggagcccaagcagctgtacacctaggacccccaccagtgaccgggccgagcgccagggcctgggcggcgtgcagggcctggctgtgctggcggcggcaggagcaattgtggcggctgtgacactcggcattgccaagaaccccgccgatacgctgcagggcctggcggctagcggcgcagccgacagcctgactgcgattgctgaccgcatctcgtcctctctctgatgacggaaagcgcacaatgatgcagcttgacagtcgaggctggccagagattggtcgccagctgtccatgttgcctgcagcccaccaaaagcctgcccatttttccgaaaagaacgccggagccacgctccctgtgcactgagttttgttgctgctgtttcacgcctgctgcggctccgcagcccagttttgccatgcgctgactttatgcactgtaagtgacacacccatgaaaa

SEQ ID NO: 8728 - DNA, 574 bp, Chlorella sorokiniana
  Clone ID: LIB3602-112-Q1-K1-E10
caccacagcagcatggcggccctcactagccagttctgcggccagagcctgcagcgcagcgccgtggcgccggccatgcagcagtccgcagcagcccgcatgcctcggcagttcagcgtgcaggcaggcgccatgacccgccgcgagtcgactgagaagcggcaccgccgcatccgcagcaaggtggagggcaccggcgagcggccacgcctggcggtgttccgctccaacaaccacatctacgcgcaggtgattgacgacgaggcggggcgcacgctggctgcctcctccacgctcaaccccgagatccggcaggcgctggcgggcgaggacgcgtcctccggcaacgtggaggccgcccgcatggtgggcgccaagatcgcggagctgtgcaagcagaagaacattgagaaggtgtgctttgaccgcggcggcttccgctaccacggccgcgtgcaggcgctggccgatgcggcgcgcgaggccggcctcaacttctgagcaccttcccccgcccagcagcccgcagcagcagctcccctctttgtttcccttgcgcccgccatttttcggt

SEQ ID NO: 8729 - DNA, 537 bp, Chlorella sorokiniana
  Clone ID: LIB3602-112-Q1-K1-E11
cacgccctggcagcacggcacagcacagccaagtttgagaggcgctgaggggcccggccgcagggccagctgacgcagccagtcacgtgggcgggccatgctggcctgcccaacccagcccacagctcgattcggtgaggagcaccaacgttatgccgaaaatgccatattaagccagcggcgcgcagaacgcgcatgccctgcgccccgcagcttgccagcacaaccagaaagcctgttttccctctttgtttctgctgtttcactacacgcacgctgtatctgcgctgtacactcctttgcgcccgttctctctgcatgcaattttcagttggaagcatgaggcacccctgttgttccacctttgtttgtttctgccgcccgggtgcgctgctgtacccctgagcatgccggccgcccttgctgcccgcctgccccttccctcggccctcagcccgcccattcacgcgacattcttcatctcaaagctcatcctcaccgctctgcaagcattataattgtaagctctggcatggc

SEQ ID NO: 8730 - DNA, 449 bp, Chlorella sorokiniana
  unsure (1)..(449): unsure at all n locations; Clone ID: LIB3602-112-Q1-K1-E12
cggtngaataagcccttctggcgcaagctggagaaccgaggcgtgcagcccattgacaggacagaggtggaggccagccaggtggagccggaggcggccagcctcttcttctctcagcgccagttcaccgactgagcaaagacaacccaaactcacgacagaatgagcgactgacctgcggcgtctgctggaagcgcccagaaccgagagccccacacagcccgagggccggattgagggcagcaactcgaccgtcctaactgcagcagcctgctttctgtcacgctgctgctctgcccgacttgaaacataaccttgctttcagcagaccatgaccatgctgaccacccctgtaaagtaggcctctgccgcagccgctgcagctcaatccttgtgaggcgcattgctgctttgtgttcctgcgccgcctgccactttcgatgcgttgc

SEQ ID NO: 8731 - DNA, 463 bp, Chlorella sorokiniana
  unsure (1)..(463): unsure at all n locations; Clone ID: LIB3602-112-Q1-K1-E7
ccacccatcccactcacncgttccctccgnnccacaacctctgccacccactcaccacccatcacccgctcaacgccctccatgcaccatcctccccatccaccaaatctgccaccccaaacgcacgtccgccgctgcaccacctgccgccccctcacccgcacccatcttccacccgccacctttcctgccgctcaccgccgcacatcctacctcccacacctcactccatgtccacccttcacccgcgcttcacacagcggctgctgccatgcaaagctgctgccaaacccatccatcatgctcgcacacccactcacccacacgtccaacgtatccagacccattttcaaggcccgactgtacagtgcctttttgcgtccttatgccgatctggtaccaggacttaatgtgtaacaaatggtatgtaaaaaaaaaaaaaaaaaaaaataatatatatttt

SEQ ID NO: 8732 - DNA, 524 bp, Chlorella sorokiniana
  unsure (1)..(524): unsure at all n locations; Clone ID: LIB3602-112-Q1-K1-E8
gcgagtaggttccttacacggtaagggtgtgcgtctcacgcgggggcctgcaaaggccttgcgcgtggccgccgccgccgcgccggccccccggccgcggcgccggccggccagctactgccggcggctttttgtggatctagccgcctgaaaccgtcgcgcggcggcgcggcgccactagcagcgccgcaaccgctctctttccaccgggaggcatggtgtggtgaggtgtggtgtggtngtggagcgcccgcccacctgccgcagcgcgggcggcagcgccgagcgctgtgctggcgcagcgggcacggcgggcgcagcgcccgcctgctccaactggcaagcgccccaaaggggaggcgcttactcgtcggccgccagctcggccagcttggccttgagcttgtccttgcgctgctcgtaggtcagcttgaccttcttccaccgcttggccttggcgggcttgctgcgggccttgggcttggcngagggggtggncccggttcgccttttgcaccttggtg

SEQ ID NO: 8733 - DNA, 589 bp, Chlorella sorokiniana
  unsure (1)..(589): unsure at all n locations; Clone ID: LIB3602-112-Q1-K1-E9
gcgccaagnagtggccaccgccatccgcggcgccatcatcctggccaagatggccactgtgccggtgcgccgcggctactggggtaacaagatcggcaaggtgcacaccgtgcccaccaaggtcaccggcgagtgcggcagcgtgaccgtgcggctgatccctgccccccgcggtgccggcattgtggcggcccgcacccccaagaaggtgctgcagatggctggcattgaggactgctacacctgctcccgcggctccacccgcaccctgggcaactttgtgaaggccaccttctacgccctggccaacacctacggcttcctcacccccgacctctggcgcgagaccgtgttcaccaagagcccgctgcaggagtactccgacttcctggccaagccggtggttggcaaggcctactgagcggcctccccatgcccgccgccccgcgcgccgcggcggcaggagcagcagcgtaacagcagcgccctgacgcgaggatagatgagagttgggaccccagtggccgctggggcgctgcgctggcagggcaagccggcgccccggcacacacctcacaccctggtgttg

SEQ ID NO: 8734 - DNA, 590 bp, Chlorella sorokiniana
  Clone ID: LIB3602-112-Q1-K1-F10
gctggcaggacttcagggagcccggcagccagagcaagcagtacttcctgggcctcgaggccgtgttcggcggctccggcaaccctgcctaccccggcggccagtggttcaacatgctgaacctgggcaagacccccgaggagatgaagaagctgcagacaaacgagatccgcaacggccgcctggccatgattgcgtgcctgggctgcgcggcgcagggcgtcatgacgcagaagggccccttcgccaacctgctggagcacctggccgaccccgtgtccaacaacctgctgggcaacctggccaccatcctgaagcagtaagcgtgctgccccaagccccggcctgggtgtgagggctgccagggcggcggccagccacatctagagcctttgcattccttggctcggggcggcgactggtggcgggccctccggccgtgcctgcctgccgccccgcagcgcaccctcactcaccccacttcacccctgagaagaaatcaactgcccaactcttgttttgttgccgctcctacgcttccgtgtgcctcttgtatgggataattgctgctacactcctgacagtgtaac

SEQ ID NO: 8735 - DNA, 585 bp, Chlorella sorokiniana
  unsure (1)..(585): unsure at all n locations; Clone ID: LIB3602-112-Q1-K1-F11
cacggtggcatgctgctgctgcggccctgcaaacagtcatgcggcacatgctggcagtactggaggcccagcccaagctgcgattctcgcatggagcggcagagcaggactttttccactggtatttcaagtacacgggcatgcggctgccacttgagtacaacacgatggcatcagacagcctggcgggcaaccgcacgctgggcgggcgggaccctgttgtggtgcacttcacgcgcaacaagcccttccacggcccgcagcctggccggccagggcaccaattcctgtgcagactcgaagaaatggactgagggtgttgcgccagcagcggcagctgtggtggtggcgcctccagagaaccccaatttttgccctcagtaattgtactgataccacaaatgttgcccgggctcaatgacttgcaccctgtaccttagcactgcttctttcctcctctggctctgtattctgggctccctactcattacttttgtgtttcagcatggcagcatctgtggccgctgcaaatctgtgtaacattcaagaagtnnaaaaaaaaaaaaaannnnnnnnagggcggcc

SEQ ID NO: 8736 - DNA, 63 bp, Chlorella sorokiniana; identical to SEQ ID NO: 6547
  unsure (1)..(63): unsure at all n locations; Clone ID: LIB3602-112-Q1-K1-F12

SEQ ID NO: 8737 - DNA, 93 bp, Chlorella sorokiniana
  unsure (1)..(93): unsure at all n locations; Clone ID: LIB3602-112-Q1-K1-F7
naaaaaaaaaaaaaaaaaaaaaaaaaaaaaaaaaaaaaaaaaaaaaaaaaaaaaaaaaaaaaaaaaaaaaaaaaaaaaaaaaaaaaaaaaaaa

SEQ ID NO: 8738 - DNA, 565 bp, Chlorella sorokiniana
  unsure (1)..(565): unsure at all n locations; Clone ID: LIB3602-112-Q1-K1-F8
naaaaaaaaaaaaaaaaaaaaaaaaaaaaaaaaaaaaaaaaaaaaaaaaaaaaaaaaaaaaaaaaaaaaaaaaaaaaaaaaaaaaaaaaaaaaaaaaaaaaaaaaaaaatttttttttttttcccggggggggcccttttttggggttcccctttttctttcccggggggtggcgaggtttttggttttttttttggggccccctaattttccttcccgtgggccggttttttccacgctggggatgggggaaacccctggggttcccccaatttttggccttggggccctttcccctttttcccggttgggtttttgggggggggccccccccctttccccttttcaaaattttgccaacgtttttgggcattgggccccccccttttgcgggccttttaaggggggggggggggggggttccccccatgtttcccctttcctttggccgggccctttgcccccgtttttttttttttttccccttcttttggggccgcggttggggtttttcccctgagattttttgttgggggtttctttttggggtcccgttttagggttt

SEQ ID NO: 8739 - DNA, 555 bp, Chlorella sorokiniana
  unsure (1)..(555): unsure at all n locations; Clone ID: LIB3602-112-Q1-K1-F9
catgtttngagcacaacgccgtgttccccgcgcgcaccaacacgagttcgttgaggtgctgacccctagccacgtgcgcatgcacgtgtgggagcgcggcgcgggccgcacgctggcctgcggcaccggcgcctgcgccaccgtggtggcgggcgtgctggagggcaagacggagcgcaagtgccaggtcgacctgcccggcggcccgctgcacattgagtggcgggagagcgataaccacatctacatgaccggccccgctgagctggtcttctccggcagcgtcagcgtttgaacacagcagctagcagtgtgcctatgggacggcaggcggcccctgtctgacaagaaccgtgaactgaacatgtgggcagactgatgatgcagccggcggctgggcggcttgagaacgttaggcccgcccagtcactagcattgccatggcagcagcagtgccccgcctcgcatttgctcctcagcaatagatcagcagcctgactgtgcgcttgtatcagtgtctattagccagccagtatgtaagctcagcttgggtca

SEQ ID NO: 8740 - DNA, 596 bp, Chlorella sorokiniana
  unsure (1)..(596): unsure at all n locations; Clone ID: LIB3602-112-Q1-K1-G11
atctgttcttcctggtccgcacatctccccttacttctggtccgcgctcggcattagcctgtgcgtggggctgtcaatcatcggcgccgcctggggcatcttcatcaccggctccagcctggtgggtgccgccatccgggagccgcgcattacatctaagaacctcatcagcatcatcttctgtgaggcggtggccatctacggagtgatcgtggccatcatcctgcagaccaaggtggaggcagtgaagcacaaccccgacggctcctacggcctggcagcagccaatgcaggctacgccatcctgggtgcaggctcggtcacaggctgggccaacctggcatgcggcctgtctgttggcattgtgggctcctcagcggcgctgtcggatgcagccaactccacgctctttgtcaagatcctggtggtggagatcttcgcatcggcgctgggcctgtttggtgtgatcatcggcatcatcatggcaggcaatgccaacttcactgcgcaaggctgaccttgcagcaagcagcgcggctgtgctgccacgacagcggcagccatgcggntagcaagcttggaacatttgccgctgc

SEQ ID NO: 8741 - DNA, 577 bp, Chlorella sorokiniana
  unsure (1)..(577): unsure at all n locations; Clone ID: LIB3602-112-Q1-K1-G12
tgcggcgcgtgggcggcgggtatgtgaggcccccaaacccctgatccctgattcttacattcacaagctctctgttccgcacgctttcatgtgtttgtcgctgcgcgctgtgctcttgtccagattggttgccatgccatgagacttgcaaactctctcccgcctgcactctgcccttgcaagccacgtctgccctgctctccctgcctgcatggcgggctcagccttccccgattcattcctttcttcagtgcatgtcccccatggtgccgagatgcactgtgtgcactacccgcctgtgaatacattggccgaaaaaaaaaaaaaaaaaaaaaaaaaaaaaaaaaaaaaaaaaaaaaaaaaaaaaaaaaaaaaaaaaaaaaaaaaaaaaaaaaaaaaaaaaaaaaaaaaaaaaaaaaaaaaaaaaaaaaaaaaaaanagggggggcgccttttaaaaaaaccaaattttacttcccggggcttgcaaaagtaaaagtttttttttggggcccccaaaataaatttacggggccgcggttttaaaacgtgggaatgggaaaaacctggggtttccc

SEQ ID NO: 8742 - DNA, 244 bp, Chlorella sorokiniana
  Clone ID: LIB3602-112-Q1-K1-G7
actgtgtatgatagccccattttcggccgcttcaggtcgattttgtttccacactgtgcccctttcttgtcccccctctcacctgatccgaatctctttctcagcctgaccccgccccacccagcaccggcgggctgcacctcgagcattgccttccaccctgcaactgagcgcctgagcgtgggacttgcactccattggcctcggggcagggccacttgcaacgatgtaaataatgaggaac

SEQ ID NO: 8743 - DNA, 408 bp, Chlorella sorokiniana
  Clone ID: LIB3602-112-Q1-K1-G8
cccacccgtgctggccgccctgctggctgtgcacctggctgtggagctggtggacgaccaggtcgcgggcgagggcatcggcatgatcctgcgcttcatcgaccggtccctgatctgggccatcaccattgtgtggagcatggtgtgcggcgtcacctacgtagtacacccctgagattgaccctgagtaacgaccatgagtacgaccatgacttttgactgaccctctaagctgacgcccaccatgaggcggacggcgcggggtatgcccaccaaactgtcgggcttatgttgcagcttgtgctgcatgtggaccctcatgtgaactctaaatccaaaaagaaaactcagtatataactccctatggagaacacttgcgttaacaccgtccctatggggctcccgac

SEQ ID NO: 8744 - DNA, 591 bp, Chlorella sorokiniana
  Clone ID: LIB3602-112-Q1-K1-G9
cacatctgcgcacacataacggccatggcgagcgagagccggccgccgctgcctcccttcacgctggagacggcgcggcacaaggtgcaagccgctcaggacgcctggaacacgagagacccagaccgagtggcgctggcatacacagaggacacagagtggcgcaaccgagccgagttcgtcaaggggcgggaggcggtgcggcagttcctgcgccgcaagtgggagcgggagcagggctacgtgctgcgcaagtacctgtttgccttccaggacaaccgcatctcggtgtgcttcgaatacgagtaccacgatgccagcgggcagtggtaccgcgcctacggcaacgagaactgggagttcagcgagcagggcctgatgcgcaagcgcatcgcaagcatcaacgaggcgcccatccggcccgaggagcgccgcattgctgtgccagaggggcagcaagttgtgtacaactcctggctggcggagcagggcattggcggcgaggagttcccgctgtgcggcggcaaccagccagcctattaaaggcagctggcgcgctgcaacaagtggcggcacgccttgacggcggca

SEQ ID NO: 8745 - DNA, 578 bp, Chlorella sorokiniana
  unsure (1)..(578): unsure at all n locations; Clone ID: LIB3602-112-Q1-K1-H11
ggcagcagcagccgcggcagcaaagccaagncgatgcctactgggacgggcatgccaaccccaaggcaaagcgcgaccaaaagcgggaggagcaggagcggcagcgggaggaagcggccaagaagaaggcggaggcaaagcggctggcagcagaggaggaggctgcgctggcggctgctggcaagaagaaggcatccaagcctgcgccacccaaggtcaccgcagcgcagctggccagcatgcgggagcgggagcagcgggagatggcgcagcaggcggcagagcagcaggatgcgcagcgccgcatggtgtcagaggaccagtacgcagcagctgtggaagtggacaaccgcaaccgggaggagggcgtggtggaggcgcgcagcatggatgcggcgctgcaggcgctgtcactgggcaagcaggaagtggaccggcaccccgagaagcgggccaaggcggcgtgggaggcctattacgaggagcagctgcaagtcctcaagcaggagaagcccggcctgcggctcatgcagtacaaaagcatgatcttcgagcggtggcagcgcgacccacgcaat

SEQ ID NO: 8746 - DNA, 534 bp, Chlorella sorokiniana
  Clone ID: LIB3602-112-Q1-K1-H12
cgcctcaccacctgttggcataagcggtgcccgtgctcgtctgtgtttacccaaaacgaggagatctacgccatcgccatcaccaagggccacggcactgaaggcgtggcgacccggtggggtgtgttccgcctgccccggaagacccatcgcgggctgaactaaggtggcctgcatcggcgcgtggcacccggcgcgcgtggtctggaccgtgtcccgctccagtgccatgggcttcaaccaccgcactgagatgaacaagaaggtgtaccgcatcggagtgaaagtcgaggccatgcatgccgccaccatcgagcacaacttgaccgtgaaagacattaccctcatgggcggattgccccactacagcgtggtcaacgatgactactgtgatgatcaagggctcctgccccgtggttaagcgccgagtaatcaccctgagcaagagcctgttcccccagaccacccttaatgcgctggaagatatccgtctgaaattcatcgatacgtccagcaagttctgcaacgtccgct

SEQ ID NO: 8747 - DNA, 581 bp, Chlorella sorokiniana
  Clone ID: LIB3602-112-Q1-K1-H7
ccccgcgtccggcgggcgggtgcttacggcgctccagaagcgcgtgcggtgcgctgctgcatgagcgacgcaggcagcagcggccagcgcaccaccgtctatccagacctggttgccatcactagggagattctgtaccaccacagcctgctggagccagaggagtgacctgcacctgctgagtacggtacctgcacagcctgctggagactacgtagcgaaatgcttcaagtttagtaccaccgcaaatgctttccctgtagcaggagcagtgacgtgttttcacacgccggctgctgcactgtttgatgtttcacccaacttgctctttgccctggcttgagcagccaacgcatggttttactgcttttcctttttgcctggcttaagcagccaacacataaatgtactgctttccctttttgcctggctccaggagccaacacatgactatactgcttgttcagaatactgttaagctgtgccgttgctgtgcaggaaggttcacttgtgttttcatatcggccaaaccacggcagtgcgttttgcaatctcggccaaccacagtggttcattgtaat

SEQ ID NO: 8748 - DNA, 565 bp, Chlorella sorokiniana
  unsure (1)..(565): unsure at all n locations; Clone ID: LIB3602-112-Q1-K1-H8
tccgnaaaaaaaaaaaaaaaaaaaaaaaaaaaaaaaaaaaaaaaaaaaaaaaaaaaaaaaaaaaaaaaaaaaaaaaaaagaaaaaaaaaaaaaaaaaaaaaaaaaaaaaaaaaacaggtcgctccccaactaaaggggcgccggcctttttgtgtagggcttcccaattgctatacctacctgggcctcttgtttaggcgcccccttttatttttgttggcccctgcagtttactttcctgggccgccttggaaaacccttgggtttggccaactccctgggctttcccaattttccccctttgggcccctttccctttttctcaagaggccttattcgcaatgggtccccccctgttcccccttttaaacggtggctgaaccgggttgtgaatggggcctcccctttacggggccctttagcttccccccgggttgtccttcccccttgcgtgcccttttcctcccgttcctcctttttccccgctttttttttttttggccctttcttttttggccccgtttgcggtttttcccggggcttctttaaggggggggttcttttg

SEQ ID NO: 8749 - DNA, 199 bp, Chlorella sorokiniana
  Clone ID: LIB3602-112-Q1-K1-H9
cggacgcgtgggctagttcgggatttcgagagagcggtaacacagaagacgtaaaagcaaaaaaatataaaaagaaagcaattaaaaagaaataaaaaaaaaaaaaaaagagaagaataaatataaaaaggggccctcctttttttggcgctccttgtttccataccgttcctttttttgggggttgtttttttttttg

SEQ ID NO: 8750 - DNA, 600 bp, Chlorella sorokiniana
  unsure (1)..(600): unsure at all n locations; Clone ID: LIB3602-113-Q1-K1-A10
tcggcgcggngttggtgttgaccagcggcaagctgggcatgacaggggcgatccaaaggcggaggagattgtaaagacgatgcccaacgcctacatgctgcagcagtttgacaacccagccaacccagaggtgcactacacctcgcggggccggagatttggcgggacacagacggcaaggtggacttcctcgttgcgggcgtgggcaccggcgggacgatcacgggcgcgggccagttcctgaaggagcagaagccctcggtgcagctggtggctgttgagcctacggagagcgctgtgctcagcggcggcaagccgggataccaccagatccagggcatcggcgcgggctttgtgcccaaggtgctgaagcgcgagctgattgacgaggtgcagcgcgtgacgagccaggaggcggtgaccatggcgcggcggctggccacggaggagggcctgctgtgcggcatcagcagcggtgcggcggtgcaggcggccatccgcgtggcgcagcggccggagaacaagggcaagatggtggtggtggtgctgccgtcctttggcgagcggtacctgtcgacagtgctgttcaaccacatctgg

SEQ ID NO: 8751 - DNA, 580 bp, Chlorella sorokiniana
  unsure (1)..(580): unsure at all n locations; Clone ID: LIB3602-113-Q1-K1-A11
ggcagccgcatagnagtgtggtggagcgtacacatggagcaggagggcggagaggagaccagcgtgaacaagtggtggggcgcttcgctggacagcaaggcagcaggagagacagatggcgaggggcggcaggtgtacattctcaagtacgacccagacacggagagcgggttcgcggagcatgagatgcgcgctgtgaccttcctagatgaccacatgctgtatgaccatgttgagggcgaagacgcctgcgacctgctgcactggcggcgggagggggaggcctgggagccgcctgctgatgaggcggaagagggggaagaggcggcgccgctctcgctgggcgacattgtgcagcagatcagcgcagcggagcggtgggttgagccgcgtaccgtggctggctattgcacatccgtgtgttgctgttgctcgcgcactgcaccttttggggatgtcgccaaaggcgcactgcacagcaggccacggctgcagggcggcgagtcgttgctgtggcttaccctcgcaggctgcacaggcgctccttacaagcctgccatgcgctagctgagccgcctgc

SEQ ID NO: 8752 - DNA, 453 bp, Chlorella sorokiniana
  Clone ID: LIB3602-113-Q1-K1-A12
ctgcagcgcacatgttcagtgcatgggggctcgatcagccaaatcttcgcccagcgcggcgggccgccacactacgaagtgcagctgccatccccaccggcggcgccagcgcagcccgaccctgcagcctatgccgccctgctgccaggcgtagctgcagctgagctgcgcaccgctgtggtgccggtgtcgaccaagctgctggttgaaggcaagcccgcgccgctgctgctgatccacgaccggcggcggggcgagctgtcgcagcacaaccagcaggtgggtgtgtgctgaggggcgggccctgttgccagttgcaagccacaccagccagaggtaaacaaaccgggacactggtgcaggtggcttacgtgcctgggctgattggcagcctgactgggacgatggcctgccatgcccttggtgcgggtgggcacgatgggccagcatgcc

SEQ ID NO: 8753 - DNA, 253 bp, Chlorella sorokiniana
  unsure (1)..(253): unsure at all n locations; Clone ID: LIB3602-113-Q1-K1-A7
cgnaatgnaggggagcagccaactatttcgcgcacnnccagcaatgagcaggnngctggtcaacatgccaataagaacacacaaaactttgccatccggcctccccaaagcgtggagttttggtccgtctttcagtttcggttttcttgcaaaaggcagtagcagtgcttttgctacaggtggatattttgggcaatgtgccggctcaagctgagcacggggcaaagcatcaaactgtgacacgcaacacgtc

SEQ ID NO: 8754 - DNA, 584 bp, Chlorella sorokiniana
  Clone ID: LIB3602-113-Q1-K1-A8
gcaccaaggccggcaccaataaggcacccagtaacaggccaccaccaagaagctgcccccaagaagtcttcctctggcgccagccagtggtacggccccgaccgccccaagttcctgggcccctacagcacgaacttcgtgcccagctacctgaccggcgagttccccggtgactacggctgggatacctctggcctgtcggccgaccccgccaccttcgctcgctaccgcgagatcgaggtcatccatgcccgctgggccatgctcggcgccctgggctgcgtcgtgcccgagctgctggacggcaccaaccacattgcctggttcaaggccggcgccgagatcttcggcgacgacggcatccagtacctgggcatccccggcctgatcaacgccaagtccatcgtggcgaccctgatcgtgcaggtggtgctcatgtcgtatgttgagggctaccgcgtcaacggcggcccggccggcaccggcctggacgctgtctaccccggcggcaacttcgaccccctgggcctggctgacgaccccgacaccctggctgagctgaaggtgaaggagatcaagaacgg

SEQ ID NO: 8755 - DNA, 279 bp, Chlorella sorokiniana
  Clone ID: LIB3602-113-Q1-K1-B10
cgagtgttctcttctcatagtgttggttctgatttacaggtaattaatataaacaagggaatacgtcatcatctgtgtagccggcactcctgccacgtgcgatgcaattaatgcaggcggtatattttgctaggattatgtgcaccaaagttcgtgacgacgtagtgttttgaattcttgtaaggctcctcttcaaagcccacgccgaagcacatctgagtacttcaaatttaatgtatatccatatgagcaatctaacgagttcaagaattttaattt

SEQ ID NO: 8756 - DNA, 494 bp, Chlorella sorokiniana
  unsure (1)..(494): unsure at all n locations; Clone ID: LIB3602-113-Q1-K1-B11
gctgcgccggcggcaggccgcctaccgcaccaccattgagcaggacgatgccatcattgctgacccaaccaccggcccccgtcagaccgtggccgcgcgtctgctgcgcatcngaaaagcagatcctggcgggcgccacccaggcggcgctggcgctgccgggggcggcagaggccgccgctctggggccgctgcctacggcagtcaagatggagtaacagtcttccttgctgtggtgcgaaatcatgcacaaggtttggttacctgtcagtgccgcgtgccgcgtcacccgatgtgcgggctttagcctgcccaacccagccccgtttcctttttcactgccgggctccccctgcccaccggttttattgtatcatagcagcatgcgcccttttcccccggctcgtatttcgtggcgttttcaggactctcaccccacagcacccccaccccttctctgcgataccctcagcacttgtaacgcactgcagctt

SEQ ID NO: 8757 - DNA, 581 bp, Chlorella sorokiniana
  Clone ID: LIB3602-113-Q1-K1-B12
cccgctgttatgaattgctctcttccatagaggctgtcgtgcgcgctgcggacgctgtggtctgcccacactcacccttacccacttgctgccacgctccctttcacaggaggctgtcgtgcgcgctgcggacgctgtggtggccgccattgaccaggcggccctggccatcttcctggcccaaaagtgcggggaggagggtccgggagccgcggcacgcaagaaagagatggaggagcggaaggcagccctaattgaggccctggccgccaagtgcggagctctgctggagctgcagactgccggcggcaaggccagcaccgcagctggtgctgacaagcccagcaccgcagccggtgccctggctgccgcgagtggtggcgaggcgccaccggcgagcggcgctgccactgcagctggggacgcgggcaccggcgcgagcgcggcgggtgatgcggcgggggccagcgcttttgaggctgcattccgcgagctgcgcaagtgggtggacaccgccgctgatgagaagtacgtgctgctgcatgccaagcgcgaggcgctggctgggcggctggcctctg

SEQ ID NO: 8758 - DNA, 490 bp, Chlorella sorokiniana
  unsure (1)..(490): unsure at all n locations; Clone ID: LIB3602-113-Q1-K1-B7
cggncgcgtgggcgggcggccctccctcccagcagatgggtgcgggcgcgtctggcatggcagcgcaggccggcccccccgccatctccaccgaagcgcccaagctctcccgcatctctaccgagtatggcgaggtggaggggcagcccttcatctcagggctgggcatgaagcgcggcccgctgtcgccccgcgctcaggccgtcaaggaccgcctggctcgggagctggaggagtccacccgcgtcattggctagccgctcacaagtatgtacaataagcggcaagcagctgcaatatgaaccagctatgagccagtgcgcctgcgcggcaagcccagcagcaccactgcaactgcgccgacggcatgcgacgataaacaagcgacaccaagccccccacggttgatgtatgccctgtatgaacccgtgaacacgtaatgtacccctcagttgccctgatgaactcaacatgtaacaacgcatgccaa

SEQ ID NO: 8759 - DNA, 575 bp, Chlorella sorokiniana
  Clone ID: LIB3602-113-Q1-K1-B9
gtggcttcacgcagtttgccgctgtttgccaaaagtgctgcggcagcagccagcccctctggcccctctggccatctgcttttcacaatgaatgaagctgtcctgtacctgctgcagctgcggcagtatgcgtaccttcttaccaattgacaccttccacaagtgatgcctccctccattactcttcccttgcagctctccctctgcgcatgcgaatgcaccctcctgcccaccaccaaacgagcgctcgtgcgccgctccctactcctccccacaacactcccactcatcctgctcatgccatctgcatgggtgaatgcatgtttgtgaagtgagtttgccgcgctgcaaatgccttggcacctcaagtttttctgaaacgttcccatgagcgcctgttgtgcctgcccgtccttccgttccgtgtgtgcacccgcgatgccttgccgtgtccactctcctgttcaagagcgcctgttgcgcgtgcctgcatgcccttcctgcctcctcattgcacatgcctcctccataccaccttgagtgtgtgtgtcgacacattacaatacgcataccat

SEQ ID NO: 8760 - DNA, 598 bp, Chlorella sorokiniana
  Clone ID: LIB3602-113-Q1-K1-C10
gtttttcctcaccgagtttgcggtgacagtggcagatggcgagccgcagctcacacctgaagtggacgcctgggccgcgccctacctcgtgcgcatcgtggcagcacacgtggcagacgcaaacaacgaccgcctcatgtccggcaccgcctgcatcaagtttcccaagctgcaagaaatgggcgctgagggtccgttcatcctgcaacgctacaaagacttgtatcgcgaggcgcaggagtatgagaaaaagttcaagcgctgggcgccgggctcgctggtccgcatgtaccaggggagcgctgtccaagcaaagcagcagctggacagcgcgcaagagcgaggcttcactatggacgacatgattgaacccaagacagccggcctgctgcagcagtcgcaggaggactggcacgaggtgcaccaagctgcgctggaccgcgcacgctgcgccgcctgcacccgcgtcggcatcggcctcatgcgctgctcagcctgcaagtcggtcaagtattgcagcagcgcctgtcaaaaagccgattggaaagcccacaaggaagtgtgcgcctcgttggccgcagcgcacgccgaccgccgc

SEQ ID NO: 8761 - DNA, 586 bp, Chlorella sorokiniana
  unsure (1)..(586): unsure at all n locations; Clone ID: LIB3602-113-Q1-K1-C11
cgcaagaaatcgagtgggaggaggtgccttgcccagtagggaagggcagccgcaagatgctgggctacgctcagtaagctgcaggggctgccgctcccctggccccctttcctctgcattagcttagcaagccagccccaagctgcgcccgcaataaagcgcccgtccgtgccgcgatctgtgcgcgcccccagtcagcgccaacccctttcagttcctttttcctttcatttgcccccgccccaatgcatgcctgtctcctcctcgctacccgcccacccgcccacagagtgctgctctgactagtttgctgctgctacggggtaggccccgcgcagccctctgctagctttgctcgtatccgccccgccatcactgattccctgcctgcactgctatcaagcaacgcgcccctgctgccactgctgtatagcgtcgcacctctgccatcccctgatccctgcccatgcctccactccccatccgatactgccatacgtgacgtgttactgccacagcaccatgcatactgcccatcccctacctntattctgttcatcctgcaccctttctgcatccacccttt

SEQ ID NO: 8762 - DNA, 101 bp, Chlorella sorokiniana
  Clone ID: LIB3602-113-Q1-K1-C12
agcggtagcaccacccccccccctactgtggggaacggggtggcaccttgggccctgtcttccatatgatggtttgtttgggggttggtacacccaatttg

SEQ ID NO: 8763 - DNA, 524 bp, Chlorella sorokiniana
  unsure (1)..(524): unsure at all n locations; Clone ID: LIB3602-113-Q1-K1-C8
gcagcccgagccgctgcgctggnaggcgtttgagccggtgctgctgctgggcaagcagcgcttctccaacgtggacatccgcatccgcgtcaagggcggcggccaggtgtcccagatctacgccatccgccaggccatctccaagggcattgtggccttctaccagaagtacgtggatgagcagagcaagaacgagatcaaggacatcctgctgacctacgaccgcacgctgctggtggccgaccctcgccgctgcgagcccaagaagttcggtggccacggtgcccgcgcgcggtttcagaaatcttacaggtgaaggctgccccgtgggacggttgggcgcctctggaggcttcttctgcgccgctggcgtggcggcagcggcgtctgcggcctaggcagctgccctggagcagcatgccctcagcgaaagcaccatgagtacaccttgcgtgtgtaacaaaacgccncacanaanaaaaaaaaaaaaaaaaaannnnannnnnnaaaannnnnnannnnna

SEQ ID NO: 8764 - DNA, 355 bp, Chlorella sorokiniana
  Clone ID: LIB3602-113-Q1-K1-C9
tggtcgcgtggggcaagccgcaccgcctgcgcaagtgtgctttaagtgcggatggggcatcttcatgcccaccggatttaaccccctgtattgtttgtaagtcccacctgagggaggcgaacgacttggccggctagattgtttataagccccgttcaccccccccccccctattttagctgcaacacacagggtgggtgtgcctttatgaaggcacagcacccaccttttttcttttttttgtgccagcaaccccccccctgtttgcccttctggggcggtcaaaaccaataaactacctttgttgtttaggggggggggccaaaaaacaccctccccaaaaaaaaggcccccc

SEQ ID NO: 8765 - DNA, 313 bp, Chlorella sorokiniana
  Clone ID: LIB3602-113-Q1-K1-D10
caatcggcgcccccggccgcgcgccccccgtctgtgcgcggccggccgccctgcactgcaccgcctttgatgcaattgcccagcgaatttcgctgcccgcacacacacacacttgcgtttcatgcctgatgagtagaacgccctcgagccacgcacccacctaccaccccaaccacaccaacctgcaccccggtttctcatctttgattcagccgcccggttgaggctgccggaggctccatccccttcttttccgctttcattcgtcactacactttgagttttgcggctgtggttgtaacgcaatttttgt

SEQ ID NO: 8766 - DNA, 554 bp, Chlorella sorokiniana
  Clone ID: LIB3602-113-Q1-K1-D11
tattgatcactgcgccggtcagtctgtattactatgcccctgccctcccatgcaccgcatgggagcgggtggcttgctcagcgggcagcgcctgcctcccttggaggtcccttcaaagaaggtccaggcctgccgcctcagtccgtactaaacaaatcagcacctttcgttcgtcgcctttcattccgctctcgtcctccctgcctacctggtctgcctgccctagtgtgctggactggtagcaccctttgctgccccagcgtctgtctgcctctgcctccttgtgctttcatgcagctttcatgcagcttatgcagcatcgttgcggctgtcccgctgttcacccctttgcctcacctccctgcccctgctagctccttcccctccccacaaatgaacccaacagctggcctcgctcggctgtgaaccagcccctaaccttgccagaacaattcgttcgcttcgcgcgcttgcaccctccatactgcaccgctgccgaccctccttcccttccctcctgcacaccaaaacaccctgctgcacacgtccctgcc

SEQ ID NO: 8767 - DNA, 314 bp, Chlorella sorokiniana
  Clone ID: LIB3602-113-Q1-K1-D7
gcccgcgcgccccatgcagccacacctcatagagcgggcgccggcggcgcggcgtggcgcgccccccatgcacaggccggcccgcagtcaccccgcccctgctgtaccaccccttgcttgcttgttcaccgccccacactgctttgccacacgcacacacttctttccgcacacccaaacctgaacagactgcggagggtttcccgagcgtctcgccactctgttgccctgcctctcatgtgcccttgtacattggcgtaagggctattttctttgatgttgttgcctggatttgggcgttacattaactatgc

SEQ ID NO: 8768 - DNA, 425 bp, Chlorella sorokiniana
  unsure (1)..(425): unsure at all n locations; Clone ID: LIB3602-113-Q1-K1-D8
ggctcgcagaaggtgggggagcgccgcggcaccaggcgcctacagcgcgacatccgtgtggctgccagtggcggcgagaactgccctgagagcgacgaatgagcacccgagggtagcccgcttccagctgcaagccatcccgcagttgcacccaagttttgcccccgaccggcactgcatatatagctccccttgcctctgtaccatgctgcccaagcttgcaacgagcctgccttgccaccttactgtttgcgaagatgccccccgtgtgcctgtgccccgtgctgcacttgaacccgccttgccaaattcatgacccgcgccgcatccaactcctctctcttgccgcctgcctcccttgtctcccaagcatttgctaactgttgcacactgactgtagagcatgtaaagtgaacatggcnnna

SEQ ID NO: 8769 - DNA, 239 bp, Chlorella sorokiniana
  unsure (1)..(239): unsure at all n locations; Clone ID: LIB3602-113-Q1-K1-E11
ngagcggcataagcccccctgtttctggcgtcttgctcaccgcccagcttgctacacccgcgggcggcgcaaccttgcacgcatgttgctcgcatacagttgccggcctgcattttccttctagtcaacccgatttgtccaaacgccattcgcttccttttgtgggcgcccattccgccaattcattcatgcgcccaaccaactcaactcgtacgctcctgcaaagcgctgcagctggc

SEQ ID NO: 8770 - DNA, 572 bp, Chlorella sorokiniana
  Clone ID: LIB3602-113-Q1-K1-E12
ttcacccccaaccgacccaaggctctgtccctcaagtgaccgccactttcggcggcaagaccaaggctggcaccaaggccggcaccaagaagggcacccagaagcaggccaccaccaagaaggctgcccccaagaagtcttcctctggcgccagccagtggtacggccccgaccgccccaagttcctgggcccctacagcacgaacttcgtgcccagctacctgaccggcgagttccccggtgactacggctgggatacctctggcctgtcggccgaccccgccaccttcgctcgctaccgcgagatcgaggtcatccatgcccgctgggccatgctcggcgccctgggctgcgtcgtgcccgagctgctggacggcaccaaccacattgcctggttcaaggccggcgccgagatcttcggcgacgacggcatccagtacctgggcatccccggcctgatcaacgccaagtccatcgtggcgaccctgatcgtgcaggtggtgctcatgtcgtatgttgagggctaccgcgtcaacggcggcccggccggcaccggcctggacgctgtctac

SEQ ID NO: 8771 - DNA, 573 bp, Chlorella sorokiniana
  Clone ID: LIB3602-113-Q1-K1-E7
gtttggatgtgctgcctgctgggcccatttgggtgcacgctgcgctggaagctgtcccactggaactacaagctggctggccagtgggcctggttccccgcaggcacctttgccgccaacatgctgggcaccaccatcgactttgcgctgcagtgcgtgctgcagcggcggggctccgccctgggatactggggcaccctgatgatcaactcagtgatcaccggcttcaacggcagcctgaccacagtcagcacgtttatcaccgaggtcgtgaagtttgcggatgccatcccagacaacttccgggcctacacctacaccctgctgtcgctgggctgcggctttgcgataggcatctgcctctacggctggtcggtctgggcctactgatacactactgatatacacggctaacagctcccagctgcatttcaacaggacctgctgccgctgcttgcgtgctgctgcggtgcactcaatgacctggctcaagtattgtttgcagttggttgcattacagatcccgtgtggtacacgtcttggctgttacttgtgcagaaactgctacatgtg

SEQ ID NO: 8772 - DNA, 279 bp, Chlorella sorokiniana
  unsure (1)..(279): unsure at all n locations; Clone ID: LIB3602-113-Q1-K1-E8
gnctagttctagatcgcgagcggccgctcgccttgctgcattgaagagccatcagccattttcgcaccaagcccgccgagttgcctggcacttgcatttcattaccgcctgcccgacattacgcttgcccgagttgattgtacctgcatttcaatccagagacacaccgcgcctgccaatcctcgcactgccggtttagtaccctgcaagttctgcatgctcttgcctgcaatgccggaccttggcgtgaagcagcaccagttgtaagtgagtgttgtg

SEQ ID NO: 8773 - DNA, 425 bp, Chlorella sorokiniana
  unsure (1)..(425): unsure at all n locations; Clone ID: LIB3602-113-Q1-K1-E9
tgcgacgtgatcgacgacatcgtcaccttcaccgattggaccgagaccgacttccgtaccggcgaggctccctggtggaactgagcgggtggcggcagcagcggctgatgaggcgcaatgttggacccccagcagcacaccccgccagcccgcagctccccactcgccgcccgttgagcggcggcggcttgtaaacccggcccagctccgcggctggctgtcctattctttgattgcagctttcgtccccttgtgggctgcgcgcggccggggcggcgggcagcgcggccccgccccctgctgcgctgcaccccgccaatcttatcatcccctaccgagaagaatcgctcaatattctaatgacactcctccgcgtgtgtaagcacaaaanantnnnanaaaaaaaaaaaaaannnaaannaana

SEQ ID NO: 8774 - DNA, 247 bp, Chlorella sorokiniana
  Clone ID: LIB3602-113-Q1-K1-F10
gcagcggcggcatgcagcggctgatggcgggccgcggcgcatcacgcggtcgctggccaggctggccagcagctgcctgcccagtgcaagtatgcgttcgtgagagttagcctgtacatctgatgctgtccaatctgtcttcaatctgttcctggtactctgcttcagcaaactgcttcccatcttcctgaatcccctttggtatgtccaacgctgatattgaggtttctgtaaagcgcttctgttg

SEQ ID NO: 8775 - DNA, 439 bp, Chlorella sorokiniana
  unsure (1)..(439): unsure at all n locations; Clone ID: LIB3602-113-Q1-K1-F11
cttcggcaaggtgggcatgcgcntacttccacctgaaaagaacaagtaccactgccccgtgatcaacctcgacaaggtgtgggctctggtgggcgaggacgcgcgcgtggcggcggccaaggacaccgcggccgcccccgtgattgacatcaccaagcacggctacttcaagctgctgggcaagggccagctgccgcagcagccggtggtggtgcgcgccaagtttgtgagcaagctggcggagaagaagatcaaggaggtcggcggcgcggtgcagctggtggcgtaagcacccccacgcccacccgcagcagcagcagcagtaccccagcagccccgattgactcctgagagcttgcccgcccacgcaaagcggccacatgcctgccgggggcgccccccggcggggccttagcgaggcgtgtaacccgcacctcgg

SEQ ID NO: 8776 - DNA, 163 bp, Chlorella sorokiniana
  Clone ID: LIB3602-113-Q1-K1-F12
cccccccccccccccccttttctcttaacacaaaccctccccccccccccccccccccccccccgggggggggcccgcccgccccccccccccacccacccccccccccccccttctttccttccacctcaccccccccccccttttttttttttcttgttgt

SEQ ID NO: 8777 - DNA, 602 bp, Chlorella sorokiniana
  unsure (1)..(602): unsure at all n locations; Clone ID: LIB3602-113-Q1-K1-F7
cggaccctcgtcatccccngagaggtgtctatcgaggtcaaggcgcggcgggttcgcgtgaagggccctcgcggcacgctgcagcgcgacttcaagcacctggctgtggacatgttcctgactgaggaggagggcaagaaggtgctcaaggtggactgccactttggcaagcgcaagagcctggcgtccatccgcacctgcacctcgcacgtgcagaacatgatcaccggcgtgaccaagggctacgagtacaagatgcgcctggtgtacgcccatttccccatcaacatcaacatcgagaacaagggcggcaaggtggagatccgcaacttcctgggcgagaagattgtgcgcgtggtggacatgctgccgggcgtgacctgcgagcgcagcgccgccgtcaaggacgagctgatcctgaccggcaacgacatcgagctggtgtcccgcagcagcgcgctgatccaccagaagtgcctggtgaagaagaaggacatccgcaagttcctggacggcatctacctcagcgagcgcggcaccctggtgaagcccgagtaagcggagcccgcacgttgcagtagaagtggcggcacgagcgcagc

SEQ ID NO: 8778 - DNA, 513 bp, Chlorella sorokiniana
  Clone ID: LIB3602-113-Q1-K1-F8
acagcgggtgatgttcggcggcaagcagctggaggacggcctgtccctggaggcttgcggcatcagcgatgactcccagatgtacatcctgatgcgcctgctgggtggtgccaagaagcgcaagaagaagacctacaccaagccgaagaagcagaagcacaagcacaagaaggtgaagctgcgggtgctcaagttctacaaggtggacgacagcggcaaggtgcagcgcctgcgcaaggtgtgcccccagtgcggccccggcatcttcatggccacccacttcaaccgcgtgtactgcggcaagtgccacctgacgtacgtgtacgacaaggagggccagaccgcctaagcgccccgctcccccctgcggatgcacgcttagcagcagcacacgcggcgggtgcgcccggcatgccggcacaccagccacggagcggcggggcgtccctggcagcggcgcagcgcctgcaagcccttctgttgtgttctgtgccgctgtaatacccctgctgc

SEQ ID NO: 8779 - DNA, 630 bp, Chlorella sorokiniana
  unsure (1)..(630): unsure at all n locations; Clone ID: LIB3602-113-Q1-K1-F9
gccccaaannnggggnnnaaaagaggggggggggaaaaaaaaaccccccccaaaaaaaaaaaaaaaaaaataaattttttttgggttgtggggggggggggnnccccccgggntgttaaaaaaaaacccaattttaataaatgaaaaaaaaaaatttgaggggggggggagaagaagaaaaaaaaaaaaaaaaaggggggnggggggggggggcnncncccttttttaaaaaaaaaaaaaaaaaaaaaaaaaaattntntnnnttnntntnttttttttttttttttttttttttcttttctctctttaataatatatggggggggggaaaaagaggggcngggggggggggggggcgggggtgtttttctcccgcgcggggggggcgcccccctttttggggggttttttttttttttttaaaaattngggaaaaaaaaaaaaaaaaaagagggggggtgncggaggganaaagaaagagaagaagaaaaaaaaaaaaaaaaagagagggggaaaactcattttttttttttttcttcttttttttttctctctctttttctttttctgctttgtgttttttttttatataaaaaagaaaagaggaggggagggggggagttttttttt

SEQ ID NO: 8780 - DNA, 166 bp, Chlorella sorokiniana
  Clone ID: LIB3602-113-Q1-K1-G10
gcgggcttggcgatcagcggcgcctgcttaggtggcgggatccgtcatgggcgcaagggctgcatgagagacgagattaaattgcatgggcgcctgttgaggtgctgctattgactcttccttgccttgactgtggcgggacctgcatgtaacgccccgcaactgc

SEQ ID NO: 8781 - DNA, 587 bp, Chlorella sorokiniana
  unsure (1)..(587): unsure at all n locations; Clone ID: LIB3602-113-Q1-K1-G11
cgcagnatggatccacggccagcgacgagcacatcgcaaccgcccgctggtttggtgcagcgctggcgtgtgacgccgccaccaccctgtctgtggggctgtctgagggcagccaggatgccaagcgcaacgcactgcgcgcaaacggcctgtgctgggtggcctgcggcggcatgcacctctacaacgccggcgctggtgtgcagaagaaggaggttgcctactcgtccgctgcgctggcaggcgtgctgggggcgctgtgcctgtggcgcggcttccgcaacaacgatgacgatgccaaggagctgtgagcttcaacataatttctgacaccttttgtgtttgatgcgttgcacaactgatgggaacaatgagcaggacgcccaggcatgtggagacgggggctaaagggcagttgggggatgccgagctgcagcaggaggcagctggcggacagcaaacagcctgactctgaatgatttttgtgcacagcagggacgaggcgcttgtgcatcgccctgccctggcacacgctcctgacgcccttttggctttgatccgttgcatagcgcaaattcgactagcgt

SEQ ID NO: 8782 - DNA, 569 bp, Chlorella sorokiniana
  Clone ID: LIB3602-113-Q1-K1-G12
gcgccggcgaccgcatggccattgtggagtcggtcaaggccgccagcgacatcatctcgcccgtgtctggcgagattgtggctgccaacgaggagctgtccagcgactcatccaagatcaacaccgacccctacggcgagggctggatggtcaaggtgaagctgtccaaccccgaggagctcaaggagctgatgagcgccaaggagtacgaggagttctgcgcatgagcggcagcatcctttttgccccccggaaggcatcctggtggcagtctttctctgtagttttgtaggtttggtggcctggccgaggggcgcgtcagcgccgtgtggccacgcctcatgttgtttacgttgcgggtgccgccgtggccggtccggccctgcgtgccccgcaaccctctgctttctctctgttgtgtgttcctgctctcaccgcatccgcgccagttccgctgtcctgccgcactgaaccaaaacgcattcgttcgcacccccacgaccaacgaatttatactgcacagccggcccagctgtgccgcctgaccctgcctgtaagcacacatgcag

SEQ ID NO: 8783 - DNA, 575 bp, Chlorella sorokiniana
  Clone ID: LIB3602-113-Q1-K1-G7
cgctgctcatcatctccattctgccccgcgccgctgctgcccttcgcgtgggccttctccggcaccgccctgaccgggtggtttgtggtgggccacgactgctgccaccgctcgttctccaagaacaagctggtggaggacattgtgggcaccatcatgttcatgccgctgatctaccccttctagccctggcggatcaagcacaacgtgcaccacgcacacaccaacaagctggtggaggacacagactggcaccctgtggagcgcgagaagatggagaagtggagccccgcggagtctgccatctacaagctgttcctgggcaccccgctgaagctgtttgcctgcatcggccactggtggatctggcactttgacctgagcaagtacaccgagcatcaaaagccgcgcgtgctggtcagccttgcagcagtgggcctgttcatggccgtctgctggccgctgcttgtgtactacaccggctgggcgggcttcgtcaagttctggctgatgccgtggctgggctaccacttctggatgagcaccttcaccgtggtgcaccacaccgggccgca

SEQ ID NO: 8784 - DNA, 450 bp, Chlorella sorokiniana
  Clone ID: LIB3602-113-Q1-K1-G8
ggcttgaagagggcacgctgcacaacccatccgccgccagcggcaaggaggtgctcaccctgaccggctgggcagcgctggcgggcgtgtttgccctagccaccgtggtgctctctggagtggtctttggcgtgcgccgctggctgggcatgggcggcaacgccagccggaggggatataccctggtggttaagcaagagctggcgcaccaaggcggtcgctcgctagaagaaggcgacggcgggcaggtggcgggccatggcctgccgcggcgccacggctgaccaaggagcgagcgtacaggctgtgaagcggcgcttgcaagcccgctgctgcttgtgcgagcgcggcgtggctgcaactgccgcggccagcgatgcactcaagagttttcgtgtctatcataagcgtagctgtatgcagcatgtgcgtgtgtgacagagtgatcag

SEQ ID NO: 8785 - DNA, 552 bp, Chlorella sorokiniana
  unsure (1)..(552): unsure at all n locations; Clone ID: LIB3602-113-Q1-K1-G9
tggtcgcctgcagtaccgtccgnattcccggtcgcccacctccggatggaatgccaggctgcttcaccatcacgactgtgttcagccacagccagaccgtggtggtgtgccccagctgcaacaccgtgctgtgcgtgcccaccggtggcaaggcccgcctgaccgagggctgctccttccgccggaagggcgactgagcgcgcccccgctagcggcagtgttggcgctgggcagcggttattgtgatgtccacgggcagcccgtagcagcggcactcgcactcctctcttgttgggatggagcaacaccttgcacgggcgtcggaggagactgatcgcccacagtgaggagcacgcggccgggggcctccgcccctgcagccgcgtgtgaagagccacgagtatagcaccccgcgctgccaggcctcgcggccggcgcgcacaaatgactagcacccgcgcctgcggccggcgctgctggccggtcgcggccgggctggctgtcccaggaagtgacatgcactgatggttttgcccatgcatgcggcactgt

SEQ ID NO: 8786 - DNA, 583 bp, Chlorella sorokiniana
  Clone ID: LIB3602-113-Q1-K1-H10
gagacatactgctgcctccgcgcacagccatggctgctggcggcactatcgatgcatatctttatggcgacaaccttgtggattcgggcaccccttcaaacatgttcccaacacgggaccgcgtgcgcttccccttcagggtggttgctgttggcaacggctacatcgacattgaccgcccgctgcccatcgagctgcgccccgcctggacgcccgtcatcgtgccgttctcgagcagcacctcggacagcgggctggagcactttaccgttcgcttcaagtgggacacgtatgatgagcatctggatgccaagggctacaacgcgattgccatgtatgataccatcaactgctgggtccgccatatcagcatcgtggatgcgacctacggcgttgccatgaacggcaacgagtttgcagcaatcagcgacatcgccttcagcatcactgccgcccgcggcaggaacagcatggcgacccgcggtgtgcacggccatcatgcaacctcaatggctcacggttcctacaacctgcagacgaggttgtacttcggcacccgctactaccatgatctgtcggtgga

SEQ ID NO: 8787 - DNA, 589 bp, Chlorella sorokiniana
  Clone ID: LIB3602-113-Q1-K1-H11
gcacacgacacgcggcatgcggctggtgcaggcggagacgagccatgagcaagggctggcctctgggcgacggcatcgcgctctttgggctgggttcgcacgtaggcggcagcacctctgcgggcggcaagcgcggctcgcaggcagacctgagcgtggagctgaacgccagctccagcgcagcggcaggcggtgcaggcagctcagcagccagcacctcacggccagcattgtttggcagtggggcggctggggcggcgagtgaggcggggcgtgccagcccacccagcaaggcggcgctgatgcgggagaagtatgcgaaccgcagctcaaagagccttgccgggccagcggctggggggtcatcagcagcgcctgcgcccgctccggcccccgaccggcagcagcggcagcagcagttggagcacgacgaggcggcggtggaagcgctgttcgctggggtggaggcgcggcccagccggcagcagcaggcgcgcctgctggacgaccagcacaccgactcggcgggcggcggctacctgagcagctggaagggcctgcgacgatagatgctgctagtgattactcg

SEQ ID NO: 8788 - DNA, 62 bp, Chlorella sorokiniana; identical to SEQ ID NO: 1367
  Clone ID: LIB3602-113-Q1-K1-H7

SEQ ID NO: 8789 - DNA, 383 bp, Chlorella sorokiniana
  Clone ID: LIB3602-113-Q1-K1-H8
tggcgagtggctggacttgcggccccgctggccgctgaccgaccgcaaggacccgcgcagcttcacggcgcctcgctccgccaagaagaagcgcatcttcaccagcctcacccaactcatgcaccagcagcagcagggcgaggcggcggcagaggcgggggcagcaggcgaagcagcggcggcagaggcggcagctgcaggcggggcgcaggagcaggagcagcaggcagcggcggcaggcgcgcagcgatgagggcctgcgactctcctactaatggaaagttgctgtgcgcgctttacaaagatgcccttaaagtattgacgagttcgtgggtactaagttgatagtgagaatggagggccgtttaaagcaaaggacatgg

SEQ ID NO: 8790 - DNA, 435 bp, Chlorella sorokiniana
  unsure (1)..(435): unsure at all n locations; Clone ID: LIB3602-114-Q1-K1-A10
gcgcggtaccactgattcggtggatgtatacggccgcaccgccacctgctngaacatcgcacagcgcagcaatgattccagctgtgcagcggcggcttgcgctatgcaggaggccagtaagcacgcccagttagcaatctgccctagtgttgttttcccgctgctaccccccacctccacatgccctcacctcccgctacctggttgcacccctcattccaagctgattcttgtcccttcgtgattcctcccccaagatgccctattcgtcctgccgattatcaaggctgctgcgattctggcttgccccaccgatgtgtctacctcccttccctcaagccctttcatttcagtcgcaagtaaatggctaagccttcatgtacaggcggtggcgcaagtgcactgtagcacaacttttctgtcacaaatggccgc

SEQ ID NO: 8791 - DNA, 55 bp, Chlorella sorokiniana
  unsure (1)..(55): unsure at all n locations; Clone ID: LIB3602-114-Q1-K1-A11
gggggggggggnnnngagggggggggnnngggggggggggggggtgtcgggggga

SEQ ID NO: 8792 - DNA, 415 bp, Chlorella sorokiniana
  Clone ID: LIB3602-114-Q1-K1-A12
gcaggctgctgattggcgcggccgtccttgtgcgggctgcgcgccctgcgggaggcgcttccatacccaccctggcagcgcttgcttgctaggcttgtaccaacaccttgacctgaccagcgttgtgctggcacctcggcggcccgtgttgttggctgccccaattcccctgcctttttgcctccctgccgatagccctgaatagcccttactaccctttgtttctctccctctgctggtgtgcagcagctttttcattttgtggccgccgcagcgccaagctgttgcagccaccacagtgcatgctgaagccgaacgacgcactgtgcaacgcaactctcacacctgtcgattgttcacattgggtctactttttgggatcgcctccctgttacatttaaagcaaggatctgat

SEQ ID NO: 8793 - DNA, 415 bp, Chlorella sorokiniana
  Clone ID: LIB3602-114-Q1-K1-A7
gcttcaacacaatttctgacaccttttgtgtttgatgcgttgcacaactgatgggaacaatgagcaggacgcccaggcatgtggagacgggggctaaagggcagttgggggatgccgagctgcagcaggaggcagctggcggacagcaaacagcctgactctgaatgatttttgtgcacagcagggacgaggcgcttgtgcatcgccctgccctggcacacgctcctgacgcccttttggctttgatccgttgcatagcgcaaattcgactagcgttgctgtactgtaatcgtatggacacaaaaaaaaaaaaaaaaaaaaaaaaaaaaaaaaaaaaaaaaaaaaaaaaaaaaaaaaaaaaaaaaaaaaaaaaaaaaaaaaaaaaaaaaaaaaaaaaagggggggccggttttaa

SEQ ID NO: 8794 - DNA, 580 bp, Chlorella sorokiniana
  unsure (1)..(580): unsure at all n locations; Clone ID: LIB3602-114-Q1-K1-A9
ggcagccgcatagtagtgtggtggagcgtacacatggnagcagagggcggagaggagaccagcgtgaacaagtggtggggcgcttcgctggacagcaaggcagcaggagagacagatggcgaggggcggcaggtgtacattctcaagtacgacccagacacggagagcgggttcgcggagcatgagatgcgcgctgtgaccttcctagatgaccacatgctgtatgaccatgttgagggcgaagacgcctgcgacctgctgcactggcggcgggagggggaggcctgggagccgcctgctgatgaggcggaagagggggaagaggcggcgccgctctcgctgggcgacattgtgcagcagatcagcgcagcggagcggtgggttgagccgcgtaccgtggctggctattgcacatccgtgtgttgctgttgctcgcgcactgcaccttttggggatgtcgccaaaggcgcactgcacagcaggccacggctgcagggcggcgagtcgttgctgtggcttaccctcgcaggctgcacaggcgctccttacaagcctgccatgcgctagctgagccgcctgc

SEQ ID NO: 8795 - DNA, 598 bp, Chlorella sorokiniana
  unsure (1)..(598): unsure at all n locations; Clone ID: LIB3602-114-Q1-K1-B10
gcggtgcagcacgcggcagnagcggcggcggcggtgggcatggtgcctcccgaagagcaggagctgctgacgcgtgtcatgcagccctcgggcagccgcatcgagcgggtgcgcaccatcaccggagtgctggagcggctgagggagatggaggcgaggcctgagccgcacagccgcacgttgggcctgatcagcgccctggtggtgcacgagttgaacatgctggtggacgccatggactatgaggagctgtacgccgcatttgggggcccccacccccacaaggggctgagcgcggagcgcattgccgcgctaccggccgtgaaattgagcgaggcggggcttgcggcgctgcactcgcacacctgcgctgtgtgcctggaggcgtttcaagcgggggaggtggccaggccgctgccgggctgcggccacacattccatgccgcctgcgtggatgcctggctggaaagcaagccgctgtgccccgtgtgccgcgccaatgtggcgccgccggaaggggaggtcacagcagcggcgggtgcggcaggggcagaggaagcagcggcgggtgcagctggngaggtagcagcggcgggtg

SEQ ID NO: 8796 - DNA, 582 bp, Chlorella sorokiniana
  unsure (1)..(582): unsure at all n locations; Clone ID: LIB3602-114-Q1-K1-B11
gtcgtgcgcgtgcggtgccctgnacaagtcgtggaacgagatccgctccgagggcctgacctgcaactgcaagatccccggcgtgcacgatgctctggaccctgagtactccatcctgaagcagcgcattgcccgccggctgcggcacgagggagccaccgacgagtccgtgaagggcctcaacctgaccgacatcaccaaggtggctgagcgcaccatcagcgacgacctggagttcctgatctcccaggccgtggaccccaagaaggccgactacgcagtgatcactggcgtgcagatccacaactgggccaacaactttgaggatgactcccccaacctggagtttgtggctcccactgccgcctacgtggtggtcaacggcgtgaagacccacattgacctgaccgccgtgccgcctctgacgccgcgccagacgcgcctgctcaacggcacccccgagctgagcgccaaccagggcggcgctggcgtgctgatggaggagtcgcccgacttcagctacgactccaaggacgcgcgccgcgcgcagcgcgagcgcctgcagaactatgtgcgcatcct

SEQ ID NO: 8797 - DNA, 365 bp, Chlorella sorokiniana
  Clone ID: LIB3602-114-Q1-K1-B12
gcacgttttgcaaagcggtctcatttcatggcatcgtgcttcaatgataacctgcccaggcgtccactgcgatttgttttcaccccccaatgcatgtgcccctgttcccaatctgctgccggcctgcgccactcgtgccgccagcgtgttaccctacatttccgcagtcgtgtgtttttttctgccctggtgcaccacattccctgcgccgcttttcccctggatctctacccttgtggattcattccccagttgcactgcgtgctgctttgcctgatctgcaccttgcgcctccccttctgcatgcctttcatgtgcctctctgccggcaccgccgagtcattctggaatgtaacatcgctcag

SEQ ID NO: 8798 - DNA, 97 bp, Chlorella sorokiniana
  unsure (1)..(97): unsure at all n locations; Clone ID: LIB3602-114-Q1-K1-B7
naaaaaaaaaaaaaaaaaaaaaaaaaaaaaaaaaaaaaaaaaaaaaaaaaaaaaaaaaaaaaaaaaaaaaaaaaaaaaggggcgggccggttttaga

SEQ ID NO: 8799 - DNA, 594 bp, Chlorella sorokiniana
  Clone ID: LIB3602-114-Q1-K1-B8
ggaaacgctatactggaccaaggacttcaccctagcgcggaactgaagttcatagaacgtgaccaaagcaagcacagcggaagacccactacgccgacctctcctccaagcccttcttcggcggcctggtggagtacatcatcagcggccccgtggtggccatcgctctggagggcaaggacgtggtggcccaggcccgcaagatcatcggcgccaccaaccccctggcctccgaccccggcaccatacgcggcgcgtacgccatcgacattggccgcaacgtgatccacggctccgactctgtggagaacgcgcagaaggagctggcgctctggttctccgagggcctggtggacaacacccccgtgctgcgcggccagatctacgagtgaaccgcgcacagcaggctgtgagggcgcccaagcactgggcgcctggcagctagcagcggcaggcttgcgcccgagacttggtccggctccaaaaattgaatcgaaaaagctgacttgtcacattccattctggtccccttgtttcatgctgcatgccccacttggaattggcaagcaggaaccaatcagccttttgttacaa

SEQ ID NO: 8800 - DNA, 573 bp, Chlorella sorokiniana
  Clone ID: LIB3602-114-Q1-K1-B9
ctgcagcgcacatgttcatgtgctgggggctcgatcagccaaatcttcgcccagcgcggcgggccgccacactacgaagtgcagctgccatccccaccggcggcgccagcgcagcccgaccctgcagcctatgccgccctgctgccaggcgtagctgcagctgagctgcgcaccgctgtggtgccggtgtcgaccaagctgctggttgaaggcaagcccgcgccgctgctgctgatccacgaccggcggcggggcgagctgtcgcagcagaaccagcaggtgggtgtgtgctgaggggcgggccctcttgccagttgcaagccacaccagccagaggtaaacaaaccgcgacactgctgcagctgccttaggtgcctttgttgatttgcagcctgactggcaggattgcctgccatgccctttctcgttctgtgcacgatgggccagcatgccgggcatgttgcctccggtcataatggagcgtcagcagccacccacattggtgagacatggcccccatgcaggccaccatgctaactgtttcgctggacacgggcttcggcatggaggtct

SEQ ID NO: 8801 - DNA, 589 bp, Chlorella sorokiniana
  unsure (1)..(589): unsure at all n locations; Clone ID: LIB3602-114-Q1-K1-C10
ggcgggcggggcggttgagcaccanagcgctccgccactttcattctccacgacttcatgtgtaccagcgggcgggtgcttacggcgctccagaaggcgcgtgcggtgcgctgctgcatgagcgacgcaggcagcagcggccagcgcaccaccgtctatccagacctggttgccatcactagggagattctgtaccaccacagcctgctggagccagaggagtgacctgcacctgctgagtacggtacctgcacagcctgctggagactacgtagcgaaatgtttcaagtttagtaccaccgcaaatgctttccctgtagcaggagcagtgacgtgttttcacacgccggctgctgcactgtttgatgtttcacccaacttgctctttgccctggcttgagcagccaacgcatggttttactgcttttcctttttgcctggcttaagcagccaacacataaatgtactgctttccctttttgcctggctccaggagccaacacatgactatactgcttgttcagaatactgttaagctgtgccgttgctgtgcaggaaggttcacttgtgttttcatatcggccaaacc

SEQ ID NO: 8802 - DNA, 537 bp, Chlorella sorokiniana
  unsure (1)..(537): unsure at all n locations; Clone ID: LIB3602-114-Q1-K1-C11
cgccctcctgcaccaccccccaccccaaactgccaccccaacgcacgtccgccgctgcaccacctgccgccccctcacccgcacccatcttccacccgccacctttcctgccgctcaccgccgcacatcctacctcccacacctcactccatgtccacccttcacccgcgcttcacacagcggctgctgccatgcaaagctgctgccaaacccatccatcatgctcgcacacccactcacccacacgtccaacgtatccagacccattttcaaggcccgactgtacagtgcctttttgcgtccttatgccgatctggtaccaggacttaatgtgtaacaaatggtntgtnaaaaaaaaaaaaaaaaaaaaaaaaaaaaaaaaaaaaaaaaaaaaaaaaaaaaaaaaaaaaaaaaaaaaaaaaaaaaaanaaaaannnaaaaaaaaaaaaaaaaaaaaaaaaaaaaaaagggggggcggntttagggggtcaaagtttanntacggggggtggggaaggtattagtttttttttgggg

SEQ ID NO: 8803 - DNA, 301 bp, Chlorella sorokiniana
  Clone ID: LIB3602-114-Q1-K1-C12
agcaggcggcagcagcagcagcggcacaactgtgaggaacggggtgccacattgggccctgtgtgccatctgatggcatgcaagggggcgcctccatccaacttgcggtaccgtgttgctcagctttgcgcaactctgcagcgtgcaagaggcagggctgcagcgggccgctgctgccgccgccacctgaacacgccggagcggccaggaagcgtgcgcatgacaactgtatgagtgttcagagcattgcacagtgacttcatgaaatcgagtgcattttcgatgctgtaagcacagtgac

SEQ ID NO: 8804 - DNA, 544 bp, Chlorella sorokiniana
  Clone ID: LIB3602-114-Q1-K1-C7
aaaaaaaaaaaaaaaaaaaaaaaaaaaaaaaaaaaaaaaaaaaaaaaaaaaaaaagaaaaaaaaaaaaaaaaaaaaaaaaaaaaaaaaaaaaaaaaaaaaaaaaaaaaaaaaaaaaaaaaaaaaaaaaaaaagggggggcccttttttgggaggtcccagttttacccccggtggcttggcaaagtttttacctttttttttgctggccccctaaattaaatttcctgggcccggctttttcccaccgttggagcggggaaaaacccttgggttcccccattttattcccttggggaacattccctttttcgccgcttgggtttttacgaaaggggcccccccggtccccttttccaaaagtttcccccccttgattggaattgggacccccccttttccgggccttttaaccgggggggttggggggtttccccccggggggccctttccttttcccggccccttttcccccgttcttttcgttttttcccttttttttttcccccctttgccggttttccccctgaggtttttaatgggggg

SEQ ID NO: 8805 - DNA, 52 bp, Chlorella sorokiniana
  unsure (1)..(52): unsure at all n locations; Clone ID: LIB3602-114-Q1-K1-C8
naaaaaaaaaaaaaaaaaaaaaaaaaaaaaaaaaaaaaaaaaaaaaaaaaaa

SEQ ID NO: 8806 - DNA, 309 bp, Chlorella sorokiniana
  unsure (1)..(309): unsure at all n locations; Clone ID: LIB3602-114-Q1-K1-C9
cggnagcgtggggcaaggtgcagcgcctgcgcaggtgtgcccccagtgcggccccggcatcttcatggccacccacttcaaccgcgtgtactgcggcaagtgccacctgacgtacgtgtacgacaaggagggccagaccgcctaagcgccccgctcccccctgcggatgcacgcttagcagcagcacacgcggcgggtgtgcccggcatgccggcacaccagccacggagcggcggggcgtccctggcagcggcgcagcgcctgcaagcccttctgttgtgttctgtgccgctgtaatacccctgctgc

SEQ ID NO: 8807 - DNA, 537 bp, Chlorella sorokiniana
  unsure (1)..(537): unsure at all n locations; Clone ID: LIB3602-114-Q1-K1-D10
ccccgctcgcctcttcctgcgctgcccgctgccctgctcttcttcctgccttgctttgcatctgatacacaaaacagtcactggcgtcatggcacaatacaagccatgcaaactgaaagcctacacaacgctatcagcgtctcgctgtgatgcagcaggcagctgtaccatgtgcagctgtaccatcggcgctcagcggaagcgctcaggagaaggaggggtccagcaccaccaccacctcctcaactcggtcagcagggaggcccgcctgcagacaaatcaagtcgagacgagggtggcacgttgtcgcaggtgcctgtgtaacacacagaccggaaaaaaaaaaaaaaaaaaaaaaaaaaaaaaaaaaaaaaaaaaaaaaaaaaaaaaaaaaaaaaaaaaaaaaaaaaaaaaaaaaaaaaaaaaaaaaaaaaaaaaaaaaaaaaaaaaaaaaaggggggnggcgttttaaaggatcaaattttatttacccgtgcttgcaaagaaaaagtttttttttggggcccccaaaataaa

SEQ ID NO: 8808 - DNA, 587 bp, Chlorella sorokiniana
  Clone ID: LIB3602-114-Q1-K1-D11
tgatcaaggtgcagtgcggcgacaagcgctggttcaagggcgccaagcgggaggccattggcgcctgggactccttcaccgtggtgtaagcacttgcaccgtggtgaccccgccgcagtagccgccgcagcagcagcacagcacacgagaagaaacaccccccccccacactttcccttgcttgtacgttcctccgctcttgttggccgtcccgcgggcgccagccacaatctgatttttcgctcagcgtgtgtgccacaccatgtgtaacgacttgcccgcaaaaaaaaaaaaaaaaaaaaaaaaaaaaaaaaaaaaaaaaaaaaaaaaaaaaaaaaaaaaaaaaaaaaaaaaaaaaaaaaaaaaaaaaaaaaaaaaaaaaaaaaaaaaaaaaaaaaaaaaaaaaaaaaaagggggggcccgttttaggggaaccaaattttacttcccggggtttggaaaagtaataattttttttttggggccccctaaatttaaatcaatggggccgggttttaaaaccgtggggagcggggaaaaaccttgggtttcccaaattaattgccctttgaaaaaaattccccttt

SEQ ID NO: 8809 - DNA, 589 bp, Chlorella sorokiniana
  Clone ID: LIB3602-114-Q1-K1-D7
ggcgctgcgcggccaggtgccccgcacctggatcaaggcaagccgcgcgccacggagcacagttgggagaagatgtttgacgcgcacctgcactggaagcgctggacgcaggagcgcatggtgaggctgctagctgcagtgtgtgtgctgttgaagcttgctcaagcattgggcgggcaggacgaagacggtttgtgcgcacctgcaccggaagcgctggacgcaggagcgcatggtgagccttctgccggagccacttcttgcagcagtggtttcaagctgcaggggtctgctgcagccgctgcccgctgcaggggtctgctgcagccgctgcccgctgcagctccctgcttgcgccgccggtctgctgctgccaccgcaactgctgctgctgctggctacacttcactgctaactccgcttctcgccctgcgcctgccaatcaaccctcctttgaaacccattcctcccttgccagggcccttggtactctccttcctaagcgccctcctaagccacgctggcgcaagccaagccctgccggccagcggcagcctccctggagtggtgcagcaggcgcctgccgaaa

SEQ ID NO: 8810 - DNA, 578 bp, Chlorella sorokiniana
  unsure (1)..(578): unsure at all n locations; Clone ID: LIB3602-114-Q1-K1-D8
cggncgcgtgggnaaaaaaaaaaaaaaaaaaaaaaaaaaaaaaaaaaaaaaaaaaaaaaaaaaaaaaaaaaaaaaaaaaaaaaaaaaaaaaaataaaaaaaaaatatattttaaaaaaatatatatatatttttttttaattttataaaaaaattataaatttatttttttactatttttttacattcgtgttcttttggccgttttttttgctgtcccccctcttgattaacctccgctttttttccttttttttttgcggctggcttttttatccttttttgcgcgggcttgcctgtctttttccagcggttgttaccctttggtttttcccctgttttttcttctttttttttgcttttttttctgcggctttttttggtggttttttcttcgcggggtctttttttttttgtcccccctttttgccccccccttttttccgctgcgcttctttttgttgtttttcttcctttttttcctgcttttttttttttgttgtttttttgggggggttttttttttttttgtcttttttttttttggcttcttttttttttgggttttttttttttttt

SEQ ID NO: 8811 - DNA, 600 bp, Chlorella sorokiniana
  unsure (1)..(600): unsure at all n locations; Clone ID: LIB3602-114-Q1-K1-E10
naaaaaaaaaaaaaaaaaaaaaaaaaaaaaaaaaaaaaaaaaaaaaaaaaaaaaaaaaaaaaaaaaaaaaaaaaaaaaaaaaaaggaaaaaaaaaaaaaaaaaaaaaaaaaaataaaaaaaaaaggggggggccgtttttgggggtttccatttttcgtcccctttttttgcacctttttcctttttttttgggggcccttaatttaatttactgggcggtgttttacaaagttgggttggggaaaacccttgttttcccccattttattcccttggagggacttccccttttccccctttggattatttgcaaaagggcccggccgattggccttccccaatgttggcccactttaattgggaatggggcccccccttttacggggcttttaagcccgtggggtggggggtttccccccatggttcccttttcttttcctagttccttagcccccgttcttttttttttttcccttctttttttgggcggtttcctgggttttcccggtaaacttttataggggggcttcctttaaggttcccttttaagggttttggggcccctggcccccaaaaatttttttggggggttgttcccc

SEQ ID NO: 8812 - DNA, 559 bp, Chlorella sorokiniana
  unsure (1)..(559): unsure at all n locations; Clone ID: LIB3602-114-Q1-K1-E11
cgcgcgctgntgagtactttgtcaagcgcaagctgtaccccacgttgacttcttctcggggctggtgtaccgcgccatgggcttcccgccccagttcttcaccgtgctgtttgccatcccgcgcatcacgggctacctggcgcactggcgcgagacgctggccgaccccgacaccaaaattgtgcgcccgcagcaggactaccggggcgaatggctgcgcggctaccagcccatggcgcagcggccgcaagtggtggaccccaaagcagaccagctgggcccggtgccaccctccaacgcgtacgtgcgcagggtcagcggcacgcaatggcagtgaagcgcgcagcaggctgtgctgccaaattttgacaatcgtgtaaactaatctgcagacttagtgcaatttttgtcctgtactgccagttcatagcgccctagcgagtgtttagcctcgagccctgcccctgtgtctcatcatcttgcaactcaacaacttgttaccgagagcacgtcatgaaaggttcgtaatgaaaggcaggggcgtcggtgcccgttcctt

SEQ ID NO: 8813 - DNA, 586 bp, Chlorella sorokiniana
  unsure (1)..(586): unsure at all n locations; Clone ID: LIB3602-114-Q1-K1-E7
cgcagtcaaaagnacagctacgacactttgaaggaagctgggcaccaggctgccgggcacattgatatgtggcgcaggcacggcagcgtgtacaagacgcagagccgggcaggtgctgcggctgacccatatgaggcgattcgggagtcgattggcaaggggcggcgccaggagctcttctcctttgccgtggcgcagctgctggtgatgggcacgcctgagcgggcggcgctgctgctcagccaggacacgggcgcccggctcaactttgtgctggcggcgctgcgcccatacctgctcgagctgcaggccaaggcgagcttgaaacgcagcctggagtgagtgccaaatgggctgcacacagaaataatccctcgtttttgcattgcggcggaccccgctgccgccgcctcaagcaaatgtgtgcccggctctgttccccgggcagcacatgaacatgcatttccccgttccaactgtactttgcacccaacagtagctctcactgccaatgccctcaaccgggcacaccctgtacctctgctcttctgtttacgcctgtaccctcgcggctgccggccgctcc

SEQ ID NO: 8814 - DNA, 346 bp, Chlorella sorokiniana
  Clone ID: LIB3602-114-Q1-K1-E8
ggcgcccgtgccgcagcggtggtgctggtgcgccccgggcagtcggagactgactactgatcccagcgacggtgcagcgctcagctattgcagctctgagcactttttttgctgatggctgcagcgctccacagcgtgtttgctcagtctcggcagatctgctgcctgcctttgcttctcgttgctgctcctgcactgctccctgtctctgcttcatgatacttctcacgctcttttctctgtgctgacctcagcttgctcctccctgccattccccatgctccccgttacatgcacattgactggttgcttgtgttttcgctatgatgcaaggaataacaacaca

SEQ ID NO: 8815 - DNA, 593 bp, Chlorella sorokiniana
  unsure (1)..(593): unsure at all n locations; Clone ID: LIB3602-114-Q1-K1-F10
gccgtcggcgcccctgcagccaagcacccgtccagccgctccctccgtcgcccagcggccagcccagcgccgcctagacatcgcatgcgcagccagcagcagcgccagcagcagcgcgggcagcgccaccggcgactatgccgcgctgcaagggcggacggtctactctgccgccagcggcgccgaagtggagctcccctcgctgtggcgggcagagcctggcaagcgctgcatcgtcgtgtttctcacccactttgccgacctgagctccactgagctggcccagaagctcaaggccgtgctgccagagctgcaaggcgcgggggtgggcgtgattgcggttggcctgggcaacgtggccgccgcccgcaagtttgcagacctgctgcagttcccgctcgacctgctgtatgcggatcccatgggtgacctttacaccgccctgggcttcagccgcggcgcgctgccggacgccccggtgtcgccctatgccaagctgctgctgatgctggcgggcattgagtctcccggcaccatccaggaggtgctgcgggggtatgtgggcgaccgntcagccaaacccgtgtttgccc

SEQ ID NO: 8816 - DNA, 534 bp, Chlorella sorokiniana
  Clone ID: LIB3602-114-Q1-K1-F11
gtgctctgagtgacgtccgcaggcgatttgtgagagcccagtggcctgacacgcaggtggtgtctatcggcgactttcggataggtatctgccacgggcaccaggtggtgccctggggcgaccgtgatgcgctggccatcctgcagcgcaagctggactgtgacattctggtgactgggcacacacacgagtttgcggcatacaggcatgaggaccggctggtcatttctacgggctcggccaccggcgcctacagtgcactgtctgcgtcagatggtgggcggcggcccacaccctcgttcgcgctcatggacgtggatggcagcaaggccacagtgtacgtgtacgaacttgtggacgaccaagtcaaggttgacaagctggagtttaccaagcgacccagcggcggctgcggcggcggcgccctgcagctctgacgggcagttcgagtgaatggcttcccctggccgcttggccgtccagagggctgcgcaagatatcgaacacgctgtaatgatgtaagctgagtgccca

SEQ ID NO: 8817 - DNA, 589 bp, Chlorella sorokiniana
  Clone ID: LIB3602-114-Q1-K1-F7
gataggtggaggtgcagaagctgggcggcctgcacgtggtgggcacggagcggcacgagtcgcgccgcatcgacaaccagctgcgcggccgctcggggcggcagggcgaccccggctccacccgctacttcctgtcccttgaggacaacctgttccgcatctttggcggcgaccgcatcaaggggctgatgagcgccttccgcatcgaggacctgcccatcgagagccagatgctgaccaacgccctggacgaggcgcagcgcaaggtggagtcgtacttctacgacatccgcaagcagctgtttgactacgaccaagtgctcaacacacagcgtgacaaggtgtacgctgagcggcggcgcgcgctggaggcgtcagacctcacgccgctcatgatcgagtacgctgagcgcaccattgatgacatcctggaggccaacatcccgcccaccacgccgcccgaggagtggccgctggagccgctggtggccaagctgcggcagtattgctacctgctggaggacctgaccccgcaggcgctggcggccgaagcgggcggcgactacgagcgcatgcgcgactacctgcg

SEQ ID NO: 8818 - DNA, 573 bp, Chlorella sorokiniana
  unsure (1)..(573): unsure at all n locations; Clone ID: LIB3602-114-Q1-K1-F8
ggcagcgccggggggtagagccgatgcagcatcttcgtgaacaccctcacgggcagagaccatcaccctcgaggtggagtcttcggacaccactcgagnaatgtggaaggccaagatccaggacaaggagggcatcccccctgaccagcagcgcctgatcttcgccggcaagcagctggaggacggccgcaccctggcagactacaacatccagaaggagtcgacgctgcacctggtgctgcgcctgcgcggcggcgtcattgagccgtccctgtagcatcctggtccgcaagtgtaaccatgacaagatgatctgccgcaagtgctacccccgcctgcgcccccgacctgtgaactgccgcatgaagaattgcggctccaccttgcagctgcgccccacgaagaaactcacgcgaactgctcgctcccgcaccagcggaagcggcttgagcggtagcaaccgctgccccccccccgcccctccagtcgggatgccgtgacagttccggctgctcatctgctgatgtgctgcatgttaattgctgctgcgggaaatgtaacggtggtagcgat

SEQ ID NO: 8819 - DNA, 537 bp, Chlorella sorokiniana
  unsure (1)..(537): unsure at all n locations; Clone ID: LIB3602-114-Q1-K1-G10
tccgnaaaaaaaaaaaaaaaaaaaaaaaaaaaaaaaaaaaaaaaaaaaaaaaaaaaaaaaaaaaaaaaaaaaaaaaaaaaaaaaaaaaaaaaaaaaaaaataaaaaaaaaggggaaaaaataatttaaaaaaaaaaattggaggggcccttttttgagggtccccggttttcttttttttttggcccccaattttttctttttttttttggcggccctctaatttttttttttttgggcgcgctttttttcccccccggggggggggaactccccggcgttccccctttttttccccttggggacccccccttttttccccctgggggtttttttcctttggggcccccccttttttttttttcgggcgttgccccctttttttttgctttttggccccccctttttttggtctttttccccccccttttttttttttttttccccccgggggccttttttttttctctctccttttccttttttttttttggttttttncctcccttttttgggatttttgggggtttttccttgg

SEQ ID NO: 8820 - DNA, 477 bp, Chlorella sorokiniana
  unsure (1)..(477): unsure at all n locations; Clone ID: LIB3602-114-Q1-K1-G11
cccgggtcgnacccacgccgtccgggccggcatgcccctccagccccagcgcaacgcacagcgggcgcagcagcggcggcagcagcaccaccagcagcggcggcggcggcggcggcggcggcgggccactgcggggtgtgacggtggggggccgggcgctgcaccagcagagctttggcggcggcgctggtggcggcggcggcggccaggactggcaggcagggctgttgcagtacagcgatggggactccccgggaggtcgcgcgcagcatccggcggcagcggcgcacgcggatgaagggcaggagctggcgcctcagcagcacattgcggcgcacgtggctggggagcaggaggacgaagtgatagaaattcacagcgatccaggcggcgacgcgccgagcggcggcggtgcctgaggcacaggaggcagcttgccgttcagcggctggcacctcctgagctcttttataggct

SEQ ID NO: 8821 - DNA, 416 bp, Chlorella sorokiniana
  Clone ID: LIB3602-114-Q1-K1-G7
gcaaggctgctgattggcgcggccgtccttgtgcgggctgcgcgccctgcgggaggcgcttccatacccaccctggcagcgcttgcttgctaggcttgtaccaacaccttgacctgaccagcgttgtgctggcacctcggcggcccgtgttgttggctgccccaattcccctgcctttttgcctccctgccgatagccctgaatagcccttactaccctttgtttctctccctctgctggtgtgcagcagctttttcattttgtggccgccgcagcgccaagctgttgcagccaccacagtgcatgctgaagccgaacgacgcactgtgcaacgcaactctcacacctgtcgattgttcacattgggtctactttttgggatcgcctccctgttacatttaaagcaaggatctgat

SEQ ID NO: 8822 - DNA, 253 bp, Chlorella sorokiniana
  Clone ID: LIB3602-114-Q1-K1-G8
gcctgtgctgctcctagaggcacgaagcaagcgtgcaatagcatccctacaagagctcccccattggaagtgcaccctcggagcactggcacctgctaacctacctgaactccccaacgtgtaaaacatagcaacccatgccgtgaccccccgcccctgcctgaccatattgcccagataccctcacctctttttcctgctgtgaaccaaaccccaagtttttgtgccccctgccccgggtgcgctgaccata

SEQ ID NO: 8823 - DNA, 448 bp, Chlorella sorokiniana
  Clone ID: LIB3602-114-Q1-K1-H10
cggtgaagaagcccttctggcgcaagctggagaaccgaggcgtgcagcccattgacaggacagaggtggaggccagccaggtggagccggaggcggccagcctcttcttctctcagcgccagttcaccgactgagcaaagacaacccaaactcacgacagaatgagcgactgacctgcggcgtctgctggaagcgcccagaaccgagagccccacacagcccgagggccggattgagggcagcaactcgaccgtcctaactgcagcagcctgctttctgtcacgctgctgctctgcccgacttgaaacataaccttgctttcagcagaccatgaccatgctgaccacccctgtaaagtaggcctctgccgcagccgctgcagctcaatccttgtgaggcgcattgctgctttgtgttcctgcgccgcctgccactttcgatgcgttgc

SEQ ID NO: 8824 - DNA, 591 bp, Chlorella sorokiniana
  unsure (1)..(591): unsure at all n locations; Clone ID: LIB3602-114-Q1-K1-H11
naaaaaaaaaaaaaaaaaaaaaaaaaaaaaaaaaaaaaaaaaaaaaaaaaaaaaaaaaaaaaaaaaaaaatataaaaaaaaaaattataaaaaaaaaaataaattattaatttattaaaaattttatagataaaaaaaaaaaaaaaaaaaaaaaaaaaattttttaaaaaaagaataggggggggggccccttttttgggagcccatttttttggcgggggggtgtgtgaaaattttttgtttttttttttggggcccattttttttttttgggggggggttttttaaaatgtgggggggggggaacccttggggtcccccttttttttgggttttttactttttcttttttgggggggggggtttttttgaaaggggccccccccccgggccctttttcaaaggggggggggcttttttttggttttttttccccccctttttgtggttttttttgggggggggggttgtggggttccccctcgggggcccccttttttgtgcggggcttttggggggcggtttttgttttttttctttttttttcccgccctttgggggttttttttccggggtggtttttttgggggg

SEQ ID NO: 8825 - DNA, 549 bp, Chlorella sorokiniana
  unsure (1)..(549): unsure at all n locations; Clone ID: LIB3602-114-Q1-K1-H12
ccaaaaagaannnttttttaaaaaaaaaaaaaaaaaaaaaaattatttggtgggggggttactcaatataaaaggtctttttgtgggccggggggggggggantttcccccacggggcccccccccccccggggggggggggccccgcccccccccctcttttttttttgttgttgccccccccccctcccccccccccccntggggacaaccccccccccttttttttttttttttggggggggaccaccccccctccttctttttttttccccccccccctttcccttttttttttttttcctcacccccccttttttttaccaaaggagcgcccggcccggggttttttttccccccccctcttttgttgggggggcgccccccccccttttttttgggggtttttttttttgagcccccccccccccaagaggngcgtttttttttgttttnttttttttttcccccccccttttgagggggggggggggggggtgtttttttttatttttttttcacccccccccttttttccggcgggggggg

SEQ ID NO: 8826 - DNA, 595 bp, Chlorella sorokiniana
  unsure (1)..(595): unsure at all n locations; Clone ID: LIB3602-114-Q1-K1-H7
cgctcggcaagcccggnaggcgcggccagnaacagggcgaggctcagactgactacaccaagatgctgctgctgaccgtgccgcccgcgctcattgttggcggcacgctgattggcgccgacctgctggcgggcgctcccctcatgcacctgcccggcaccgtgggcgtggtggtgtggtgcggcctcatcctgccctcggcgtacgtgctggcggcctcgttcgccaacctgctgttcaaggacgcgctggtgctgaagggcgcctgccccaactgcggcgaggtgaacaccacctactttggcgacatcctgaccgttgcgggcaaccgcgacaagaacgtggtcaagtgcccctgctgcgagtcccagctgacctttgacgccgacaagcgccaggtcaccgtcaccgagctggcggcataaagcagagcgtagccagcctgagcacacggcggcctgagctcagctatcgcggctcagctcagcctgggcttgacttgcaagtgccttagcgagcttgagctccgcatgatgggcttgaccgggaacgcaccgggcagcggctgccaattgcacataacgagcgttccgct

SEQ ID NO: 8827 - DNA, 445 bp, Chlorella sorokiniana
  Clone ID: LIB3602-114-Q1-K1-H8
cgcgggcgtagaacaacaagaaagaacaagggcaagactgaccaccaaaagagctgaggaccactgctcgagccaatgccccgctccgccacgaaggcctaaaaagcggtcaaggagccgtgcgcagctggcgaggcaatggagaccgccgagccatcacacgagggagcgggggaagacggggctgccacccaagtacaaggcggtgggggagggcacggataaggcggaaggggagggcaaaaagaagcggagccggagcccaccttctttacagtggacaacccggcgcgcgtggagcccagccaccgcaagttcatctacttaccacagggcaggggtttgctcccatccgccccacccccacagtttttgtgctgctgcgtgacactcattcggactctgggccagtggagtatctgttccaagaggacaagcccgccga

SEQ ID NO: 8828 - DNA, 510 bp, Chlorella sorokiniana
  unsure (1)..(510): unsure at all n locations; Clone ID: LIB3602-115-Q1-K1-A10
ccaanaccaggagtgcaggtgttccgctcctcctggctgggcgctcagggccacgacgagcggaagaagctggcagaggcagccgcacgcatcgaggcgcagcaggcggcgcagcgcagccagatgccctgagcgcagccagatgcgcttgcccaagcgctggccgccccccgcgcggcagagcgcagcagcagcggctgtgctgtcgtagcggcagtcggtgcgggcatgcggtcgccatgaggggcgtggttgcattgactgcaactggcgcttgagggcatttacttgctagttaacctgctgccgtccgcgtccgtgttgggacggttcatactgcactctgcacactctacacaggctttctcttgcgattttccggctcggaccaccagttttgagcatcggacactttttcaccctggctttttgcgcacgccatgccatgtgcgccgactgcgccatgccttgtatgttagtattcatgcatgcctgtaatgcgcgacttac

SEQ ID NO: 8829 - DNA, 414 bp, Chlorella sorokiniana
  Clone ID: LIB3602-115-Q1-K1-A11
gcgatctaggccgcgctgcggcgcctggctggtgcaaccgacctgttgaaactttcagtctctcagaccccgcttcagccccatttcgcatagctgtgccctccagcctgcatgcccttcttttgtgcaccaagacccttccgaaactcaagcaacaccactgaaacgctccctcgagtgtgctatcacctaccatctgccacatcctgcattacaggcctgcttaccaatcctgcttgcttgctcaacgctgcctgccttctggtgccagtggccgtgtacagtgcggcctgcccgctggccgagtgttgcctttcacaccaccaactccctgcctgtcgctccatccctttttccgtaatacctcaaatggcacaagtcttccttttgttgaaacctgtgacctcatgtgtg

SEQ ID NO: 8830 - DNA, 575 bp, Chlorella sorokiniana
  Clone ID: LIB3602-115-Q1-K1-A12
gtgtgccgcaccccgggggcggtgactctgggattctgtcggggctgctcaagcagcgcgcagggctgcaggaggatgcggcggcaaccggcacgcgcgacgccgatcaatttgggcgggagcgcctcagcaatgtggcagacacgtgggcaggccgggagctggacccctcgcgcattctgggcccgcagcgccatggggagtggttccagcagcagagcggccagggcccggcgccggggccggcctggggcgtgactgctctgccgcccggaatggacgagtccaaaatggatccaaagctgctggcaatcatgcgggcgcagcagggcaggtagcggccagcaagatgcctcccgcagcagcaagcccacgcaccactgtatcgtgtgctgccgctgtggcacacatgtaggggctgctgccaggacaaccttaagcttgcagtttagtttgcagaccgtacgttgcagcgcatgccagccaaacgatgcatgcctcatgtccaacacgcccatccaataagtgcattgcttccccgcctgtgctttcgcatcggctctgtacctgttgtt

SEQ ID NO: 8831 - DNA, 494 bp, Chlorella sorokiniana
  unsure (1)..(494): unsure at all n locations; Clone ID: LIB3602-115-Q1-K1-A7
ccgacggcgagcagcgcatgttctacgatatcgtcatcgcccctagctacacccccgtgggcctggaggtgctgaagggcaagagcaagacgctgcgcattcttgaggccaagccgcgcgccccctcgggccgctcgctgcgccaggtggccgccggctggctgctgcaggacgccgactcgctgcacccctcgcagattgagttcacgtgcgtgagcgagaagcagcccacggcgcagcagctggaggatctcaagttcgcctggctgtgcgtgaagcacgtcaagtccaacgccatcaccgtggcaaaggacggcaagctgctgggcatgggcagcgggcagcccaaccgtgtcaagtcggtgcagatcgcgctggagaaggccaaggaggaggtcaagggctcggtgctggccttcgacgccttcttccccttctcctggaacgactcggnggagattgcctgccaagcgggcgtgagcgccattgtgcac

SEQ ID NO: 8832 - DNA, 585 bp, Chlorella sorokiniana
  Clone ID: LIB3602-115-Q1-K1-A8
gggtccagcgccggaacagaatgcctggctacagagtggatacctttatgacacctctgaacgactaccggacgcagaatgaggagcgagtgccgagcggatctacgtatccgcgttatgcttgctgtggacaacttcagcatgctggaaatggagtactcggacctggttctgctggacgctgagaatgctttgaacgctaaggggcacctgcgcatgcatgctggggtgctgaagatacaccacccgcaaggccccttgctggaacggatccacaacctgggaccgatgaggaatccgcctgaccatgctcctaatcgatctactttccgcacgggcagtgtgcacagcacatgacctccataagaatatgaccaggagtccacgatcatgctacgatccaccaccagtatggatgcatgcggaatgcggaagctagtctgattgcgcaccgctgaccacgcctggcgcggccaggtgtgctgccactgcgacacagcctcacgtaccacaaatcatcaagggttttttgcacactatcagatttttcagcgtagcgcatttttgagttccgtctagcgaacc

SEQ ID NO: 8833 - DNA, 524 bp, Chlorella sorokiniana
  Clone ID: LIB3602-115-Q1-K1-A9
ggacgggcatacgatctgtggaaagctgaccgtacgaggacgcgcgccccgggcgcctgcgagtcggctggtccgagaacgcgggcatacccgccctggccaataacaagcgggccatgaagaaccctgagatagctggcggccagcaaaaagacgccgctggtggcccgctgcctgcacggaaagattgcctatgtgcgcgccgactcgtattaaacgggcgggtccccccgcccccaaacgggcaggcgccgagtgacactgctcgtcggcgggccgtggcgcgcgagcctccctgccatagcgcttgatgggcggcttggcatgcccgcgcccccgcccgcacctctgcttgtgtagtttccgcgctgatgctctgcttctcttccctttgtcctttcgctacacataccacttgctccacgatttgctttggcggctgccacgcccgtgctcgcttgcattctgcggttgagcgctgcactgcatgcggacgtgccccctttgtttggcaggcccatgca

SEQ ID NO: 8834 - DNA, 568 bp, Chlorella sorokiniana
  unsure (1)..(568): unsure at all n locations; Clone ID: LIB3602-115-Q1-K1-B10
cgggccttgggcgagctcggtgtcccgctcctgcgtcacccagccatggcggcgatttccaanacccgcaggccgtcgccgatggcgtcttctacgctgaactcaacgagctcctcatgcgggagctgggcggggagggctactctggtgttgaggtccgcgtcacccccatgcgcacggaggtcatcattcgtgccacgcgcacgcagaatgtgctgggcgtcaagggccgccgcattcgcgagttgaccagtgtggtgcagaagcgcttcaagttcccggagggctctgtggagctgtacgccgagaaggttgccaaccgtggcttgtgcgccgtggcacaggcggagtccatgcgctacaagctgctgggcggcttggctgtgcgccgtgcctgctatggcgtgctgcgcttcgtgatggagagcggcgccaagggctgcgaggtgattgtgtctggcaagctgcgtgcgcagcgcgccaagagcatgaagttcaaggatgggtacatggtgtcgagcggcaacccggtgcgggagtacatcgactcagccactcgccatgtgct

SEQ ID NO: 8835 - DNA, 541 bp, Chlorella sorokiniana
  unsure (1)..(541): unsure at all n locations; Clone ID: LIB3602-115-Q1-K1-B11
cggnggggttgtagcggcaggatggctgacagcgctcccatggaggtggagcaggcacagccagtggaggagaagaaaggcaagggcaaggccagcggcaagcgcttcgagatcaagaagtggaacgcagtggccatgtggtcctgggccatttgcaccgacacgtgtgccatctgccgcaacaacctgtacgagccaagcatagagtatcaggccaacccgaccggcgatgctgaccacccgggcctgtccattgcctggggcacctgcggccacgtgttccacctggactgcatccagcgatggctgaagacgcgctccgcctgcccgctgtgcaatcgggagtgggagttctccaagatcgagcgcatcgtgggcggctctgccaacgccgaatgagtcgacgcggcgagcgcacgtgcggcagtgcgcctgacccagccagcgcgtctgcaggatgcgctagacttgtgcaagcatctgcaaattttcatcagcttccaacacggctctgctggtacacttgtaacatagcaagtcc

SEQ ID NO: 8836 - DNA, 404 bp, Chlorella sorokiniana
  Clone ID: LIB3602-115-Q1-K1-B12
gccgggtgggggatcccacaccctagcagtcttgcaaggatcgcctctggacagtgcacatagactgactgcgaacgagcaaagcaggccagaccttgccgttgatgagccgcgtgggcgggcgcacaacatgctagcacttgcggcagtgacatgcctgccattcattgaaggatacccatttcttgctgtcaccactcctgccagtgagcgtgtcaaatgtgaccactcgccaacaagggcaaaaaagtaccgagtgatctgggagcaaggtgacaccgcgcccacagaagcgtcgggcccctcctgtccaagatccaaaataacctgccccctgctgccatgggaaacatgatccatgtgatgctctacccctacgcatggacggtggtttcatcgccgga

SEQ ID NO: 8837 - DNA, 570 bp, Chlorella sorokiniana
  Clone ID: LIB3602-115-Q1-K1-B7
ccgacccgtgctcgtggagttctcgccactggtgcggcccctgccagagatgggcaaaattctggatgacgtggctcctgccatgcggggccgggtgaagtttatcaaggttgacaccgaaaagtatcctacagtggcggggcagtaccagataggagcgctgcccacgctgatgctgtttaagaatgggcggccggtggaccgagtggaaggagtgctgatgggtcccgacctcaaagccaggctggaatacctgctggcccagcgctgagcatgccctgctgcgcctgctgcgccaagcctcgccggggcgtagcgcggcctgcgccaggcacatgctgcgcctgccagcccgactggcgcagcacatggtgaatacatagccaagagcgatacatgctgcacgatacatagctgcacgattaccagcagcctcaaacttttccctctgtatgcatgacagacccaacggatgctttcagatgaaccattcagttttgccgctcaggctgccagccgtttttgcgtgttggcaactgcccaaattttcgggtcgtgcgattgcgcatg

SEQ ID NO: 8838 - DNA, 598 bp, Chlorella sorokiniana
  unsure (1)..(598): unsure at all n locations; Clone ID: LIB3602-115-Q1-K1-B8
gctgatcgccttataccacaagcgcgtgacgttaagtggcggacagtgaaggccctgggtgaggagttcaagggctacgtctttaaatatcatgggctgccaataacaagcagggacctacctatgaagcagggcgtgctgaccaacggtcgacatcaggtgctgttgtctgccggcgaccagtgcttacgaggttacggccgccgcaacggcgagcgccgccgcaagtcggtgcgcggctgcatcgtgtcccaggacctgtccgtgctcaacctggtgatcgtgaagaagggcgagcaggagctgccgggcctgaccgacgaggagaagccccgccagcgcggccccaagcgcgcgtccaagatccgcaagatgttcaacctgaccaaggatgacgacgtgcgccactacgtgaagatctacggcaagaaggtggagaagaacggcaagaccaccatcaagtgccccaagatccagcgcctggtgacgccccaggtgctgcagcgcaagcgccggcgggccgccatcaagaaggagcgcatctcgcgcaagaagaaccgagccgncgagtaccacaagctgctggtgcagcgcctga

SEQ ID NO: 8839 - DNA, 578 bp, Chlorella sorokiniana
  Clone ID: LIB3602-115-Q1-K1-B9
ccgcgacccaggtattggagacctgggcaagcgctgcgccaagtattacgagcagggcgcccgcttcgccaagtggcgcgcggtgcatgaagatcggcaacggctgccccagcgagctgtccatccaccagaacgcctacaccctggcccgctacgccgtcatctgccaggagaacggcctggcgcccattgtggagcccgagatcctgtccgacggcagccacggcatcgaggtgtgcgccgacgtcaccgagcgcgtgctggccgcctgctacaaggccctgaacgaccaccacgcgctgctggagggcaccctgctcaagcccaacatggtgctggcgggcgcccaggccccccaggagaaggtgatgaccgcgggctggctcacggcgcgcacgctgagccgcaccgtgccccccgccgtgcccggcatcatgttcctgtctggcggccagtcggaggaggaggcgaccgcgcacctggcggccatgaacatggtgcaggacgtgaagaagccgaggaccctgtccttctcctttggccgcgcgctgcaggcgtccgctctcaaggcgtggggc

SEQ ID NO: 8840 - DNA, 482 bp, Chlorella sorokiniana
  Clone ID: LIB3602-115-Q1-K1-C10
gccaccccagttattccctgccccagcctagacagacaccacatatagtgggcccctgcaaacggggccacatgtgcctgggcaagctatcatagatatagaaggccggtatggtctgattgcccggctctgctggggagcggatgcacggacagccaagtggaacgcgacatggtgacgagtatacggcctgctggagggggggtagatgcaactccgactttgatgagtggaactgctgcctgtgtgaaaattgatgacaacaaaagatagctgggcagcacattgtgcctttgtatgaaatgtgctcactgcttatcatgctagagcacacttgtaccatggcttcttttggtcctgaaatatatcaagcttgtagacctccatgcatatgcattggtgctatggcatgggacagggggaccccccaacacacactcgctaccccattgggcctccgttctggcagaattgaggtaagc

SEQ ID NO: 8841 - DNA, 467 bp, Chlorella sorokiniana
  Clone ID: LIB3602-115-Q1-K1-C11
gcggccgcccgtttgtggtgggagaccggatccagctgctgcgtggcggctcgcctgtggtggagggagtggtggaggctgtcgaccctgttcgcaccaccatcattgacgacgagcgcaacccaatctacatgagcaacacggacgtgacggcctgcgtgatccgcaacctcacccagggcaaggcccgccgccaggccgcctgagcggcagtcatccttgcgccgaccgaagcacgtgacggcatcggatgcatcgtgatgccggcgtggcgctgatgagcagctgcacactggcagccacataccaccacgagcggttcagaccaagggaataaacaaccacaaacagggcacccagtggcatgtgaacgggcattgctcaattttgaccacaccgccatctgctgacttgacttccactttgattttgcgtcccaaggttgtcttgtgtgaattcgatgcgat

SEQ ID NO: 8842 - DNA, 593 bp, Chlorella sorokiniana
  Clone ID: LIB3602-115-Q1-K1-C12
cccagaaggcaccaccatcatcttccccggcaccggcaccggcggctgggagtcggcgctcaccaacaccctgtcccccggcgacaaggtggtgaccttccgctacggcctgttcagccacctgtggatcgacatgatgcagcggctgggcctggatgtgactgtgattgagggccgctggggcgatggcgcatacgaggacaagctggctgaggtgctcaaggcggacaccgagaagaagatcaaggcggtgtgcgtggtgcacaacgagaccaccacgggtgtgaccagcgacatccctgaggtgcgccgcaccatggatgcccacaaccaccccgcgctgctgctggtggatggcgtcagttccatcggcgcgctggacttccagtttgacaagtggcgggtggacgtggcggtgacgggcagccagaaggcgctgtccatccccaccggcctcggcatggtctgcgcctcggacaaggcgctggcggccatgaagacggccaccagccggcgcgtgtactacgactttgccgacatgctgcgcaccaaccccaccggcaacgtgccgtacactcccatcctgccgctgc

SEQ ID NO: 8843 - DNA, 139 bp, Chlorella sorokiniana
  unsure (1)..(139): unsure at all n locations; Clone ID: LIB3602-115-Q1-K1-C7
gnagtcaccatcgccgacgtgtaagcagccatttcagctgtggaagctggtcgcacggtgcgcccctgaccgccgctggcgggcgggtcggcccttcggagccgcggccgccgccgcccgccacgcaccccnctngccc

SEQ ID NO: 8844 - DNA, 566 bp, Chlorella sorokiniana
  unsure (1)..(566): unsure at all n locations; Clone ID: LIB3602-115-Q1-K1-C8
atgaaggtcgcgcaactgtgcagcaaggcaaagaggtgcattacaagcctccactgtaccactgctgaccctctgcaccctgacggaatgctcatgttcaccatcttctggctcgagctggaggacaagctgtgcatgctgggctctgacaccgtagtacaccacctgcatatcggtccgctcgacatcatcgaggataatgcatgggtgtttgcagccatcaagcaccaacagcagttacgagggcggagatccaaataacgcggctctgccaacccattagctccccagcagctcgaatgatggccagcatgcttgttccttcctgcttcatttccctctgttcggctcattctacctgctgcccctgcgttccggctggagcctggcgacagtggttcatactgatcctgttctaaactgagcatttgccaatatgccctaacataatatgaggggcgacctggtgagcccgcctaccagttagcttagatgattgcagnattgtgtcaattgctcacttgccaacttcttcccctgcctgccatgccttgatgaaatccgtt

SEQ ID NO: 8845 - DNA, 590 bp, Chlorella sorokiniana
  Clone ID: LIB3602-115-Q1-K1-C9
cgctgatccgcttcgcgccagcttgcagcttctgtcccgccctcttagccccgccagagcgaaaccatgctggccctgcagacttctcgcatcgcggcgcctgccaaggtgcaggtgacccggcggcagcaggtggtcgtgtgcgcgaccgcgcagcagcaggaggcggcggaggcggtgccccggcgtgcggcgattggcctgctggccgctgccgtgctgggcctgagcgcggacgctgcccaggctgtgggcgttgccaagaacggatcccgcgccggctccgagggctacgtgctggagggcaccaagaagcagggcatcagccccaagcgcaagcgggccgtgctggacaaggtgcgcaaggccgccggcaagcagtgagcctcgctcgcaactcacgagcgctgagcttccgtcccggctgcgccactgttccggcgaggcacgcgcagcggcaccctcccttgcggccctgccctgccctgaatgtgaaccagccctggctctgtaccctcttaccgtcttcacttcccgagcagaaaacttgcatcgagactgcgtttttggcacctcaccttgtcctgctg

SEQ ID NO: 8846 - DNA, 94 bp, Chlorella sorokiniana
  unsure (1)..(94): unsure at all n locations; Clone ID: LIB3602-115-Q1-K1-D10
naaaaaaaaaaaaaaaaaaaaaaaaaaaaaaaaaaaaaaaaaaaaaaaaaaaaaaaaaaaaaaaaaaaaaaaaaaaaaaaaaaaaaaaaaaaaa

SEQ ID NO: 8847 - DNA, 65 bp, Chlorella sorokiniana
  unsure (1)..(65): unsure at all n locations; Clone ID: LIB3602-115-Q1-K1-D11
naaaaaaaaaaaaaaaaaaaaaaaaaaaaaaaaaaaaaaaaaaaaaaaaaaaaaaaaaaaaaaaa

SEQ ID NO: 8848 - DNA, 592 bp, Chlorella sorokiniana
  unsure (1)..(592): unsure at all n locations; Clone ID: LIB3602-115-Q1-K1-D12
tccgcccctgcgtngatcacagnactccccagcaacatgcaggccgccgtcgctcagcgcctggcgctcgtcaaggccagccgggccacccgccaggtgaccaaggcttccgccgagttctatggccccgaccgcgtgaagttcctgggccccttctccggcaacaccccctcgtacctcaagggcgagtaccccggtgactacggctgggacaccgcgggtctgtccgccgaccccgagaccttcgcccgctaccgcgagctggaggtgatccacgcccgctgggccatgctcggcgccctgggctgcgtgacccccgagctgctgcagcgcaacggtgccgccaacttcggcgaggttgtgtggttcaaggctggcgcccagatcttccaggagggcggcctcgactacctgggcaaccccaacctggtgcacgctcagtccatcgtggccatcctgctgacccaggttgtgctcatgggcctgattgagggctaccgcgtcaacggcggcccggccggcgaggtggtggaccccatctaccccggtgaggcctttgaccccctgggcctggctgacgaccccggcaccc

SEQ ID NO: 8849 - DNA, 542 bp, Chlorella sorokiniana
  unsure (1)..(542): unsure at all n locations; Clone ID: LIB3602-115-Q1-K1-D7
ccgacggcgagncgcgcatgttctacgagnacgtcatcgcccctagctacacccccgagggcctggaggtgctgaagggcaagagcaagacgctgcgcattcttgaggccaagccgcgcgccccctcgggccgctcgctgcgccaggtggccgccggctggctgctgcaggacgccgactcgctgcacccctcgcagattgagttcacgtgcgtgagcgagaagcagcccacggcgcagcagctggaggatctcaagttcgcctggctgtgcgtgaagcacgtcaagtccaacgccatcaccgtggcaaaggacggcaagctgctgggcatgggcagcgggcagcccaaccgtgtcaagtcggtgcagatcgcgctggagaaggccaaggaggaggtcaagggctcggtgctggcctccgacgccttcttccccttctcctggaacgactcggtggagattgcctgccaagcgggcgtgagcgccattgtgcaccccggcggcagcctgcgcgaccaggatgccattgactggtgcaacaag

SEQ ID NO: 8850 - DNA, 590 bp, Chlorella sorokiniana
  unsure (1)..(590): unsure at all n locations; Clone ID: LIB3602-115-Q1-K1-D8
ggcgcgcngatgcctggcagnacggcctctggtgatggttggcgactcactgatgcgctaccagttcctcagcctcatacactggctggagctgggagtgtggccgtcccccaccactggaactccagagcaccccagccccgtcattgaggcggagtgggccattaatgagcaggacggcgagagctggccccgcttcttcagaggcaccaccgagctgttcaacggcacgcagcagtgccactgctaccgcaactgggatggagatcacatcgacatccgagaggaccgcttttaccgcagcggccgcctgtcggcgagcttctactggtggatggggcacccctaccaaccgctgcagggccgctgggcgttcccgcccttcggcaacggcacggcgtgcgagccggggaggtgcggcccgcaggccgactacgcactgccgctgtacgaggcaatacgcaaggtcattgcgcagctcaagccctctgtgtttgtgttcaactcggggctgtggcgcgccatgctgggtggcgagccctggtctccagaagtgcacgaagcgctgctgtcggcggccgacgcggcgg

SEQ ID NO: 8851 - DNA, 72 bp, Chlorella sorokiniana
  unsure (1)..(72): unsure at all n locations; Clone ID: LIB3602-115-Q1-K1-D9
naaaaaaaaaaaaaaaaaaaaaaaaaaaaaaaaaaaaaaaaagggcggaacgatataaaagattcacaaaga

SEQ ID NO: 8852 - DNA, 593 bp, Chlorella sorokiniana
  unsure (1)..(593): unsure at all n locations; Clone ID: LIB3602-115-Q1-K1-E10
gcgagccatcagggcatgaagaagtgcagtatgatgagctgtcggacgaggcgattgcggcggcgcggcggcggcggcggcgcgaggtggagaaggacatgctgccgatggacctggacaagattgagctgcccngaaaaccacccctttgctgtgcgcaagaagctggcgccggaggaggaggagctgcagcgcagcaggctcagcgcgaggcgcggcctgtcgcccgaggacatgcgcaagctgcgggagcagcaggcgctggcggacaagatggacgctgaggaggaggctcgccaggcagccatgcgcaagcagcgcggctaagtgctgagcagcttgtgccaccagccacatgtacctcgttgctgcccgggctcagcactcagccaaggcgaatggaagcacagaggccaggtcgtcggccctcgcaccttggacacttttggggcagatgcctgtgtatccctttcttgcctccctgccctcccccctctccgcttgcaacggttgctcctgcttttctcgcccactcacctactactgtcacccacagccctcccctctgctgcgcttgccatgctgctgtacag

SEQ ID NO: 8853 - DNA, 575 bp, Chlorella sorokiniana
  unsure (1)..(575): unsure at all n locations; Clone ID: LIB3602-115-Q1-K1-E12
cggnacgcgtgggtggcggnccaggcaacggggcacgcgcgccaactggttgcagatgagcattacctcataccgaacgaaagcctgggccatgcgtaccgccggtgtgcacacgcgggtcacacgcggcgggagaagcgcaagccctacaagcacctgtgcacgccctggggcaagacgttcaccttcagcaccgactcccgccagcgcattgcgcgctccacgctggaccgcatccaccggctcaacacagtggatgaggagctgtggagggaggcggaccgcatcctcacggagaagctggcggcgcagcggtcagcaaacgcgctgcaggccttcccgccacccccagcgccttttgcgccgcagcagctgcccagccgcaagcgcaggctgcgcagcttagatgcgccgccaccgctgccgccagcagacggggagggcgaggagggcggggcagcagcagcagcagcaacaagcacgccgccagcctcatcgacgcagcagcagcagcagcagcagcagcagggcagccaaggggcggctagtgtgccgtcgccagcaacagaaccggt

SEQ ID NO: 8854 - DNA, 523 bp, Chlorella sorokiniana
  Clone ID: LIB3602-115-Q1-K1-E7
gcccgtggcgccttacctcacaaaccttcgcgaactgctggtggattggcgcacactgccggccagcccgggcttcctggggtctgccacccagctcagccgcctggttctgcaacgcttccagtcgctggtgccgccagtccctggcggcggcgccgggttcattacccacccgctcggcgccggagaggcgctgctcgctgcactggcggccatgccctcgctgcagcgggtggacgatgtttatgaagcgggcaatcaaacccacttagtgacaggtgacatggcgcatgtcatgtggcagctgggccggcgctgcccacacctgcagcttggccagccccgctccaccaacctgggctggacgctttccacgctggttgcggagctgccgcacaatgcggggggcaccacgctattgggggagtaggcatgcggcacgtgcttgctttttgttcatcatttattgtgatttgattgccaccacgtgtatcagagcttgtgctgtaagcaatgtgactca

SEQ ID NO: 8855 - DNA, 442 bp, Chlorella sorokiniana
  unsure (1)..(442): unsure at all n locations; Clone ID: LIB3602-115-Q1-K1-E8
gcttctatcacagctactcagactgacatgcttgccataactgagggctggcgccccacctctggcaatgttcgagtgccaccccacctctgctgacccggcgtggcactgcttacatgcgatccatccctcttgagcaggagctaatgtaaacgtccgccggcaaaaaaaaaaaaaaaaaaaaaaaaaaaaaaaaaaaaaaaaaaaaaaaaaaaaaaaaaaaaaaaaaaaaaaaaaaaaaaaaaaaaaaaaaaaaaaaaaaaaaaaaaaaaaaaaaaaaaaaaaaaaaaaaaaaaaaaaaaaaaaaaaaaaaaaaaaaaaggggggnggggnnngggaggaaacaaagaaaagaaaggggggggggaaaaaaaaaannnnnnaaaagggggaaaaaaaaaaaaaaaaaggggggggggnnaaaaagggggggggggggaaa

SEQ ID NO: 8856 - DNA, 251 bp, Chlorella sorokiniana
  Clone ID: LIB3602-115-Q1-K1-E9
cagctagcagtgtgcctatgggacggcaggcggcccctgtctgacaataaccgtgaactgaactgtgggcagactgatgatgcagccggcggctgggcggcttgagaacgttaggcccgcccagtcactagcattgccatggcagcagcagtgccccgcctcgcatttgctcctcagcaatagatcagcagcctgactgtgcgcttgtatcagtgtctattagccagccagtatgtaagctcagcttgggt

SEQ ID NO: 8857 - DNA, 543 bp, Chlorella sorokiniana
  Clone ID: LIB3602-115-Q1-K1-F10
gcagggttggctttcacacacaggctggttcggctcacagcgctcaataggactgaagcagtatcgcacacaaaaaggcacacacgcacacaaagcagcggcagcgatatgaagagcggggcatgtttgagaacggctggcggcttggggcgacagatgggtacaagcagagtatcagggggcgaatgaaagggggaggacacaaggggcaagggagggcacacgaagcgggctggctcaatgcgagcgaagcggcgccgcagcagcacgccaccgcagccaaccgggcactgcaagcacggccagcagctggtttgtcaaaatgtggagcgcaactggccgccggctgctgccggctggcttgctcagagaattgctgagtgcgagcacgtttggtttctcagagagttgtgggatagcttagtctgctagctcttggcggctggcttgccctagtagaacggccagttgcttagcgaccggctgcttgtcagctggttgctcagagggtgttgagggtggggtagtcgtaggccaggtcct

SEQ ID NO: 8858 - DNA, 62 bp, Chlorella sorokiniana; identical to SEQ ID NO: 6592
  unsure (1)..(62): unsure at all n locations; Clone ID: LIB3602-115-Q1-K1-F11

SEQ ID NO: 8859 - DNA, 578 bp, Chlorella sorokiniana
  Clone ID: LIB3602-115-Q1-K1-F12
cttcccaagcaggagctgttgagccagctgcacagcgagctgactgcccagcctgactgggaggccgcggtgcaggccaccgtcgatgcaaatgaggccctgctggcggggctgaacagcacagtgctcgtgcgcctgcaggcctacatggtccgctccggtggctcgcccactgaggtgcttgctgcgctggccactggcgcggaggcaatcgctgccagctccgcgctggtggcgctgaatctggtggctccggaggccgacccgctggctctgcgagactactggatccagatgcaaatattcaagttcatccgggagacctaccccgatgccccgtttgcgctgcatgctggcgagctggagcaaggcctggtgccggatgctgacttggactggcacatcagcgaggcggtcaaagtggcgcgcccacgccgcatcggccatggaaacgacttgccgtttgagcgtgacgcgctggcaacgctgcaagagatgaagcggcagggcacggtgctggaggtactgctgtcgtccaatgaagtgctgctgggtattgagggcactgcacacgcgct

SEQ ID NO: 8860 - DNA, 247 bp, Chlorella sorokiniana
  unsure (1)..(247): unsure at all n locations; Clone ID: LIB3602-115-Q1-K1-F7
naaaaaaaaaaaaaaaaaaaaaaaaaaaaaaaaaaaaaaaaaaaaaaaaaaaaaaaaaaaaaaaaaaaaaaaaaaaaaaaaaaaaaaaaaaaaaaaaaaaaaaaaaaaaaaaaaaaaaaaaggttttttttcgggggggggcctttttaggggccccaattttcctccccgggcttgccaagtttttattttttttttggggcccccaaattaaattccggggcccgggttttaccaccggggggcg

SEQ ID NO: 8861 - DNA, 579 bp, Chlorella sorokiniana
  Clone ID: LIB3602-115-Q1-K1-F8
acccccgtgacctcctcccccgccatcgcttggtacctgtccaacctccccgcctaccgcaccggcgtgtcccccctgctgcgcggcgtggagattggcctggcgcacggcttcctgctggtgggccccttcatcaagctgggccccctgcgcaacgtggagaacgtcgctgagattgtgggctgcatcaacggcgccgccacggtgctgatcctgaccctgtgcctggctgcctacggcgcggtcaccttccagggcgagggcccccaggtgggcgtgaagaccctgtctggtcgcagcatcccccgcgaccccctgcagtctgctgagggctggaacaagttcaccgccggcttcgctgtcggcggcctgagcggcgcggcctggggctacctgtgcacccagatcctgccctactacagctgaacaccctattcctagccgtgggggcgcgcaggcgtgcgcgtgagaagagcaaccaccgttagcgcgccgcctgccgcggccggctgcccgccgggcgcaccctgggcacacgaccttggtactgcttgtttctgcgtgcgctccgcggctgca

SEQ ID NO: 8862 - DNA, 443 bp, Chlorella sorokiniana
  Clone ID: LIB3602-115-Q1-K1-F9
ttccgcgggcttgcgccgttttagtttttttttggggtcccctaatttaatttccttggccgtggttttacaccgtggggcctgggaaacccctggggttccccactttattggccttgcagcatttccccttttccccagttggcttattaccaaaggggcccgccccgttcccctttccaaacatttgcccaccctgattggcaattgggaccccccctgtagcggccctttaaccccgggggttgggggggttccccccagggtgcccgttacctttgccagccccttagcccccgttcttttggtttttttcctttcttttttccccactttccccggttttccccgtaaagttttaattggggggctccttttagggtcccgttttagggttttagggcccctggcccccaaaaatttgtttggggggatggttccct

SEQ ID NO: 8863 - DNA, 580 bp, Chlorella sorokiniana
  Clone ID: LIB3602-115-Q1-K1-G10
cttcatcaccaccaccggcaacagggacatcatcatggccgccgacatgtccaagatgaagaacaacgcgatcgttggcaacatcgggcacttcgacaacgaatcgacatggccggcctcatggggtggcctggcatcaagcggcagaacatcaagccccaggtggaccgcttcatcttccccgacggccacggcgtgattgtgctggctgagggccgcctgctcaacctgggctgcgccaccggccacccctcgttcgtgatgtcctgctccttcaccaaccaggtgattgcgcagctggagctgtggaacgagcgcagcagcggcaagtacgagaagaaggtgtacgtgctgcccaagcacctggacgagaaggtggcggcgctgcacctggccaagctgggcgccaagctgaccaagctgactgcggaccaggccgcctacatcaacgtgcccgccgagggcccctacaagcccgcccactaccgctactgagcgtgcggtgcctgcggtgcggcggcggtggcctgcactgctggggcgtcggcggcccctcctgcgtcctgctcgcgtctcccgc

SEQ ID NO: 8864 - DNA, 460 bp, Chlorella sorokiniana
  Clone ID: LIB3602-115-Q1-K1-G11
cggccgcgtgggcggacgcgtgggcagctgcactgagcaactgagccagccaggtccagccagcagcttgcaaactgccatgccgcggcagctcactcacagcctgtgctgcggtcgccccgctgcggcgcaggggtcgcggcgcaatcaagtgggctgggcagtgttcctggcggcagcagcggcagtggttgtcgcggccagcaggcagggaaagcggcagcaccgcggccaacatcagtaactgttcgcaaattaccagcaacctgacccacttgcattacacattacaatgttgtgagggccatttcatgtgactcgatggtttagccaaaaaaaaaaaaaaaaaaaaaaaaaaaaaaaaaaaaaaaaaaaaaaaaaaaaaaaaaaaaaaaaaaaaaaaaaaaaaaaaaaaaaaaaaaaaaaaaaaaaaaaaaaaaaaaaaaaaaaaaaagggggg

SEQ ID NO: 8865 - DNA, 614 bp, Chlorella sorokiniana
  Clone ID: LIB3602-115-Q1-K1-G7
aaaaaaaaaaaaaaaaaaaaaaaaaaaaaaaaaaaaaaaaaaaaaaaaaaaaaaaaaaaaaaaaaaaaaaaaaaaaaaaaaaaaaaaaaaaaaaaaaaaaaaaaattatatatattaaattttttatatagattttttaataattatttaattaatatttaatttttttaaaaaaaaaaaatggggggggcccttttttgggggtcccctttttttgttgggtgggtgtttgaaaatttttattttttttttttggggtcccattttttttttttttgggcggggttttttaacctgttgggtttgggaaccccttgggtttccccttttttttgttttttgaactttttcttttttggggggtggggttttattgggggggccccccccctggccttttttacaatagtttgtgccttttttttggtttttttccccccttttttttggttttttttagggggggggttttttgggttttccccttgggggcccttttttttttttgggggtttttggccgcctttttttttgtttttttcccctttttttttttcccccttttgggcttttttttccttgaggtttttttttggggggggttttttttttgg

SEQ ID NO: 8866 - DNA, 592 bp, Chlorella sorokiniana
  unsure (1)..(592): unsure at all n locations; Clone ID: LIB3602-115-Q1-K1-G8
gcaggcctcgcagcagcagcagcagcagcagtcgtcgccaccgcagcagcagctgtcgcagccgcagcactggcacccgcagcagcacccacagcccgacgaggccgcatttgcagccgcggccggcatcgactggagcaatgcgcagcaagtcaatgccttccttggctggctgcaccacgagcgcctgcgccgccacgggcagcagccagcgcaggagcagcagcagcacccgggtgcggcctagccgaatgctgcaggattgagtagcgcgcaactgccaagcggcaaaccggtcctaactgccgaccattacccttaccagtgccacgcactcccttcacagccaagccagcagtctagctactcacctcatagtgtccctgacttcacactacgacccttgcttcccaggcagctttcattagactcagaacactaggtgcagcgcaggccgttcactaggcccagcagcaaggcagcatccctccctctgtccccttgtacatctagcctgccgccttgcctctgcctgtacctgccccgtgtgtgctcgctccccactgtcccgctctccccaccgngcttgctc

SEQ ID NO: 8867 - DNA, 90 bp, Chlorella sorokiniana
  unsure (1)..(90): unsure at all n locations; Clone ID: LIB3602-115-Q1-K1-G9
naaaaaaaaaaaaaaaaaaaaaaaaaaaaaaaaaaaaaaaaaaaaaaaaaaaaaaaaaaaaaaaaaaaaaaaaaaaaaaaaaaaaaaaaa

SEQ ID NO: 8868 - DNA, 376 bp, Chlorella sorokiniana
  unsure (1)..(376): unsure at all n locations; Clone ID: LIB3602-115-Q1-K1-H10
gncaatgccgaggacttcagccccatccacaacgtggcgccgcccgcagatggagggcagtacccggtaaggggcagggactgaggccaaaggctgtggccagctgttttcatgcctcctgctccgtgccggtgacgtttgtgctctgactgcccctgccccgcaggcgtacatgattaccacgggcgaccacgacgaccgcgtggtgccactgcactcccacaagctgaccgccacgctgcagcacgtgcttgctggtgcacccaactcgccccagcgcaacccgctgctcacacgcatcgaggtgcgggcgggccacggcgccggcaagcccaccagcaagatcatcgaggagcagtcagacatgtttgcattt

SEQ ID NO: 8869 - DNA, 160 bp, Chlorella sorokiniana
  Clone ID: LIB3602-115-Q1-K1-H11
cgcctctgctgcgctacgctgcgctttggcacgctgcagcgtgcgccctgccccagtttttgcatttttgccacccccaatcgctgctgtgttgaccatcttgacggctgctgcgcatgcccgcaaacacaaccgctcgtcatgtaaccgccgcactgcg

SEQ ID NO: 8870 - DNA, 488 bp, Chlorella sorokiniana
  unsure (1)..(488): unsure at all n locations; Clone ID: LIB3602-115-Q1-K1-H12
ccctcgtcggcctcggtcaagaatggcaaccatgaagacgacgagggcgagattgtcgatctgtacaacccccgcaagtgctcgtggaaccaacaagctgatcacggccaaggaccacggcagcgtgcagatcaacattggccacctggacgagagcggcgtgtacaccaactcgttctccaccttcgcgctctgcggccaggtccgcgtcaagggcgaggctgacagcgctctggaccatctgtgggccaagaagcgggctgagatcggccagtgaagcgctgctgagttctagccgccagccggctgggctacacagctgccagccggcggtgggccagccagccttgggtcggccagtgatgcgctgcgaagcaaagtgctgagcgggcgggcgctccggcgcgccgccgccagccacgcagtgcaagctgtaacgcgcctccttgtttacnaaaaatttaaagaattttcaggatcaaattatt

SEQ ID NO: 8871 - DNA, 247 bp, Chlorella sorokiniana
  unsure (1)..(247): unsure at all n locations; Clone ID: LIB3602-115-Q1-K1-H7
agctgcaggagnatgacgtggagggcgtgccgcccgcgctgcaggcagatgtggagcagggcgcgctgcggccagacgaggcggtgcggtatgcaggcgagctcaggcttgtggagcaggcagcagacaccgacggcgcatatgtgcgggtccccaagattgccacgggcgcagatgcgtgaatgcttgttggccggccgctgctggctggcatgtgccgtgccgccctgtaacttacactgccacc

SEQ ID NO: 8872 - DNA, 393 bp, Chlorella sorokiniana
  unsure (1)..(393): unsure at all n locations; Clone ID: LIB3602-115-Q1-K1-H8
cccggngtcgacccacnnncgtccggcctgnggnagctgctcaagtttggnaactacggtngaataataaggagagcaagctgtatggcgcacactttaaagagtgcgacttctcgcagaaggccaccaagatctccttcgacagcgacgacgagtgacggggctcaggggctggatgtattctcgtgttgtgtgatgctgacgccagagtgttgtgttgatgccggcgccacacacagcagcgacgctttgcatacggccacgagcaacagagctcattgtattgttgcgattctttgcccttccaccttcctcgctctgctgtcccttcttctcgcgccgcaccaccgtgctctgtccctctggtctcccctgtaaactcgcgcggcnnna

SEQ ID NO: 8873 - DNA, 571 bp, Chlorella sorokiniana
  unsure (1)..(571): unsure at all n locations; Clone ID: LIB3602-115-Q1-K1-H9
ggagccggngcccaccatctaccgcatgaagctgtgggccaccgacgccgtgcgcgccaagtccaagttctggtacttcctgcgcaagctgcgcaaggtgaagaaggccaacggccagatcctggccatcaacgagatctttgagcgcataccccaccaccgtgaagaactacggcatctgggtgcgctaccagtctcgtaccggctaccacaacgcctacaaggagtaccgcaacaccaccctgaacggcgctgtggagcagatgtaccaggagatgggcagccgccaccgcgtgcgctccccctgcatccagatcatcaagaccgccacgctcacggcgtcccagtgcaagcgcgcggccacgcagcagctgcacgacagcaagatcagcttcccgctggcgcgcaaggtgctgcgcccctcgtcccgcaagttccgcaccaccttcaaggcggtgcgccccaacgtggccatctactgagcgcctcgccccaaggcggctcgcggccacactggcggcagcagcggcggcggcggcgacccagcttgtgctctggagcggcgccgctg

SEQ ID NO: 8874 - DNA, 289 bp, Chlorella sorokiniana
  Clone ID: LIB3602-103-Q1-K1-A1
ggtgatacagtgaaagcgcttgcacccctgccaccgcggcacgcaaggaggactgaggcggcggtggcaggggtgcaagcggtgatacagtgaaagcgcccagcctgcactccagttgcagcgtctcaacctaactggtgctgagcttgctaagacatcctcttctgcttggtttcgcaatgtttgtatggagtttggcaccatgtagcgagttgctttctccccattcttttgcacgcctggccctgactgtacagctgacaccctgactgtaaatgttcccgcacca

SEQ ID NO: 8875 - DNA, 345 bp, Chlorella sorokiniana
  Clone ID: LIB3602-103-Q1-K1-A10
gtggtgaagaccggccgcaccatgattggcgccaccaacccgcttgcctcgccgcccggcaccatccgcgccgactatggcatcgatgtggggcgcaacatcattcatggctccgactcggggactcgcatgcgggagattgcgttgtggttccgcgccgatgagctggcaaactacacccccgtggcaaccgcttggatttacgagtgaatggccgctcatcagtgcacagcagggtgggctggtgcattgagcgccactgcatgaccttgatggccctggttggttgggctgtagcagctgatgtgtgagtgttgatcactctttgtaagaagctgcttgaat

SEQ ID NO: 8876 - DNA, 497 bp, Chlorella sorokiniana
  Clone ID: LIB3602-103-Q1-K1-A11
tgatggtggaaggtctggagcggcagctggctctgtgcgactccggcacagccccttcctggtgctccgacacccagctgctgtcgcagctgcgcacggcgctcgaccacctgtggagcacgatcgtgaacaacgctgacgtggccttctccgaggtgtggagctggaagtttgaaaacggcggctaccgcaccgcctccctggcggagacctctgcaaccagcacagagagcaatgcagttcagctgtggagccatgccttcatcgctgttcccggtcccagcggcggtacactgctggagctttgatgtggccactggcggctggggatcccacacgctagcaagcttgcaaggattgcctctggcgagtgcacatagacttactgggaacgagcaaagcagtcgggacctcgccgctgttgagccgagtgggtgggtgcacagcatgctagcagctgcggcagtgacatgcctcccattcattcaagtgtagcc

SEQ ID NO: 8877 - DNA, 163 bp, Chlorella sorokiniana
  Clone ID: LIB3602-103-Q1-K1-A12
gcttgccacttgcgacatgcttgccccacaatcagccccgatggctgatttctcgatgtgtttggatgaggtttcccatttcttgaacttttgaacagcaattccccaccctccataagtcagaatgatcttgcacataccctttttaacatgctcgctggac

SEQ ID NO: 8878 - DNA, 127 bp, Chlorella sorokiniana
  unsure (1)..(127): unsure at all n locations; Clone ID: LIB3602-103-Q1-K1-A2
tcggctggctcgaaaacccaacgaagccgcccgcccgccatacacacgcactgctgtatcactgatgcacccaccgtgtgagccctttttcccatgcctgtgctcaccccatgtaacccagatngag

SEQ ID NO: 8879 - DNA, 485 bp, Chlorella sorokiniana
  unsure (1)..(485): unsure at all n locations; Clone ID: LIB3602-103-Q1-K1-A3
agcggcggcagcaacacgggctgccggcggcggcgcccccgccactctcttcttctcacagcccacctcagacgccgtgaccgctgtgctcagcatgccgcacgagcgctgggcagcggcggggctggcagaggcacggctggggtggaggcataccaagctctgctggcagccagcttccccaccctgccaaagcagtgggcagaggcgatggcggcgcagctggcagagcgcccgctgcacgaaaccggcatgcaggtgcacgccaaccagctgcacgcacccggccttgtgctgcttggcgacgctgcgcacgctgtctctccagccaccagcaacggaatgaacgctgccctggaggatgcggcggtgctagcacaagcagtggaagcggcaggcggcgacctggcggcggtgccggagcaatacaccgctgcccgcctggaggatgctcangccctgctgtggctggacagcgccctgtc

SEQ ID NO: 8880 - DNA, 496 bp, Chlorella sorokiniana
  Clone ID: LIB3602-103-Q1-K1-A5
gcatcagcacaggcatcgagttctggaaggtgaccaaggccatgaatgtgtcggtggtgcgcaccggctcgggcctgccctggctgcgcttcaaggaccgcgcctcgtacaagacgagcaagaccgaccagacgactgcggaggcgatgcgctacctgtcgtatgcgctctacccgctggtggcgggttacgctgtgtatgcactgatgtaccagacccacaagtcctggtacatgctggctgctcaactccctgctcggagcggtgtacactttccgcttcatcctgatgtgcccccagctctacctcaactacaagctcaagtcggtggcgcacctgccctggcgccagatgacctacaagttcctcaacaccatcatcgacgacctgtttgccttcgtcatcaagatgccgctgctgcaccgcctgtcggtgttccgcgacgacctcatcttcctcatctacctgtaccagcgctacatctaccgcgtggaca

SEQ ID NO: 8881 - DNA, 280 bp, Chlorella sorokiniana
  Clone ID: LIB3602-103-Q1-K1-A6
cggacgcgtgggacaaaaaaaacgagatcctgcagggcgggcggtctctagaaggcaagctgacgtactcgagcgtgcgacgcatggggactattatcgtgcgacaccgaccgcaatctactgatgtccgacacaagcggtcgactgcgaaaagactgacgctgccgaaattaagccgctcgtggcgaaggcgcatgctgccagatgtggtatgagtgaataggcgaaacaggtgctggctaacgaagatgtgggcagcacgaatgcggtatgggacact

SEQ ID NO: 8882 - DNA, 496 bp, Chlorella sorokiniana
  Clone ID: LIB3602-103-Q1-K1-A7
gagggcccgcctgccacagcttccgctccctcacgctggacatcaaactcgctgcagccgccgctggcgcgcctggcagcgcttcaaatgacgctgctggtagacctacaaagctagaggcgacagcctgctgcacccctgccgccgccgcttgccacggggccgctcgctcatccccggcctccggctgccaacatcaaattcattcattgagtccagcccatcatgctagtggagtaagcatgtgtgtcaacaccgcgctggcagcgattgcaatgccgtgtcccaacattggcatgcacagccccgcaccgcacagccggcgatcgctgcgagcggttgggcatctgtagctgcagcaaggcggagaggctggcggcaagcaagcgcattgctcccttgctagcagctgcatatattgacagtccagcgctgtgcagcaaaacagcaagggcaggtagaatcaacgtgcattcgcaggtgccatcagtgaatg

SEQ ID NO: 8883 - DNA, 462 bp, Chlorella sorokiniana
  Clone ID: LIB3602-103-Q1-K1-A8
gcgcgctacgcctccacgcacggaaggcactggtcaggcagagcggcagcggcagcagcaactgtgtgcttggagcacagccctgctgtgcgcgcttgcagcgccccgctgcaggcctgctctgagccagccctggtgcctcgttgcagcaggctggatgcgcatgcttgttgatcgtggccgtctggcgctctccccatctacccgtacgcttgcaacgcccctgtagcatagccccctcccgaccgaactgcaaacgaactgaacccattattcgttgctccctttctttcatcccagtttcgtttcctctccctccctctgtgtctcagcttcccgtccctcagctgcccacatgtgcctcctcctaccttactctacccgtccaatccccttgctggcggcggcccatgcctgccgccgctccctgcttagttgagcagctgtaacgaaccacacgtt

SEQ ID NO: 8884 - DNA, 320 bp, Chlorella sorokiniana
  Clone ID: LIB3602-103-Q1-K1-A9
gccacgcgtacggcgccgctccgtgggtgctacaaaggcactgttgtgtgacacacccacatgcagcgcctaaccactgctccacagggaggggcagcatcttctttgcaacgcgggtgtgcggccctttcaaacagacaagctggcgttcgatgcataccaagctctgctggcctatagctctcccaccctaccaaagaaattggcaaagccatgacattcccattttaaacacactccctgtacataccccttttgccagctgtagaaaaaatcaatatgtcacccggccttgtgctgcttggcgaccctgcgcacgc

SEQ ID NO: 8885 - DNA, 477 bp, Chlorella sorokiniana
  Clone ID: LIB3602-103-Q1-K1-B1
gcgcaaaacctcggagggccccaagcagctgtacacggtactggagcagcagaaggccaacgtgggtgctggcacgctcatgggcagcgagcacacgtacgtgattcctggagcgggcggcgcggcggcaaggagaagctgtccatcgcggcgcagaagcggctcgaggcgctgcgcaaggacatgcccagcgatgtggacgtgtccatcgacccaacggagctggaggggctggacgacgccgcgctgcgcgagctgtacgagatgcgcgtggcggagcagcgcgcagcggcgggccgtgaggacttttcagacatggtggcggcgaaggcggcggcgcaaaagcgcaaggcggcggagaaggcgggcggcaaggacaagaagttcaagttctgagcgccgctcgagctggccagtgctggccggccacactgtcgtaccactcgttgtgcgctgcatgtgtaatgtgaatgcggc

SEQ ID NO: 8886 - DNA, 495 bp, Chlorella sorokiniana
  Clone ID: LIB3602-103-Q1-K1-B10
gggatggcggccgggcggcgctgcctccagaccaggaccttcgatactatgcgcctgttgtgtttgcttcgcctgtgctcacatggtactcaccagagggcaatcagggcacgctgggccacgctgcgatgcgctgggttggcctgccctgcagcacgccatggggtaggttaacacagcagcatggcatgacagccgctgctggtaagtgctggtaagccacgcgcaatctcaggcagcaagcaggagcgtgtggcatggccatttcatgtcttgcctgccctgaggacagatgaacagagccacacagcccccaagctgtgttccctctgtcgattccctgcctcaggcttggccaagtgctgggcttgcatggcggcggcggtcacgatgagcacgattgactggccgctgcaccagctgtccaggggccgggtgcagggcgtgcggctggtgccgtcttccgccctgagctacgaccgccagctgggagcg

SEQ ID NO: 8887 - DNA, 498 bp, Chlorella sorokiniana
  Clone ID: LIB3602-103-Q1-K1-B11
gcggctgccttgcacgcatggtgcggcacggcctgctctgcggcccttcatacctttgtacctttctgtatcatcttgcagcaatggcagccggctgcatctttctaacatcgtcaccggcccactcgtttggccatgcccacctgcctccaacgtcacccttcatcaaccctcacccaacccatccacctgccacccatccactcaccttccctccgccacaacctctgccacccactcaccacccatcacccgctcaacgccctccatgcaccatcctccccatccaccaaatctgccaccccaaacgcacgtccgccgctgcaccacctgccgccccctcacccgcacccatcttccacccgccacctttcctgccgctcaccgccgcacatcctacctcccacacctcactccatgtccacccttcacccgcgcttcacacagcggctgctgccatgcaaagctgctgccaaacccatccatcatgctcgcaca

SEQ ID NO: 8888 - DNA, 498 bp, Chlorella sorokiniana
  Clone ID: LIB3602-103-Q1-K1-B12
cacatacatccctcccgacgagaatgcggagctgatcgaggttgaggacgtaaagttatttgtttcccaccgatttgccaagaagctaatcgctgccaaggtcgcattcaagcttcacataattgtcggccacggactcagaaagcgtgagcaatgtgatcctcaagaaggcgcaggatgtgaacgcggagtgcatcgtgatggcgcgccacagcaagggcaagctgaaggagatgtgggtgggcagcgtcaccaaggcatgcgtgcgcaagtcgcccatgccggtcgcagtagtgccccacgttcagcagcgacccaaatcggcgtgacgccagcgagcttgctgcaaagcgctggtggaaagaagggtggaggccaaggcaacaccgccgacctccctgttctcggtgttgatgcagttttgtgtatgttctagttatgaatgaacttgtatagccctgaccctccaaccacaacagcatgcgtccgccaatcaac

SEQ ID NO: 8889 - DNA, 492 bp, Chlorella sorokiniana
  Clone ID: LIB3602-103-Q1-K1-B3
acaccttccggcgctacatctctgactgcttgccatctgctgccaagctggcagacctgctgcaccagtggtggcagcctgacatgcacccagagggggataacgaggcacaactggcactggcgcaagcagccgcacccgtcctgcgcctacatgcactgcgccaacctgagcgaggagggcgtgccagacccaggcgacgacgagtgcagcatgccccacagcgcctgacgcgcagtgtataactggtgcaccgtctgctacaacaccgactggcgggagggcaggcaccgccgcatgtgcaaagccctgagagcggcgcggagggcggacaatcacacaagcagcagcacacggcggtcatattgagatgcgcagcactgagagctgaacttcggcacatttaccaatgtggtggaacaatacatcattactctgcatgcccaacacatgcctactgtgatggcattgccacattgttctgcgctctgt

SEQ ID NO: 8890 - DNA, 457 bp, Chlorella sorokiniana
  unsure (1)..(457): unsure at all n locations; Clone ID: LIB3602-103-Q1-K1-B4
cttcgtgcagggcctggtgaccggcaagtcccccctggaaaacctggctgaccaccttgctgagccgtctgtgaacaacggcttcgcgtgcgccaccaagttcctgcccctggcctgaacgccgtcgtcaacctggagcgacctgngcatcccatattaacggcggccagccggttttggacaagcacacacaacatatgagattcccaacctacctgcgcactgcttgtaacaatactggctccctcttgtacccttgacccgcactcgggcgtggatatgtaacggtccgcgggaaacagaccttcacaacaattgcgcagcctgaaaggaaaaagggaacccccccttgtccggctctattaccccggtggttgggtggttaacccccaatttaaccttttcatttgccaacccctttaggcccgctcctttcgattttttaccttcctttttg

SEQ ID NO: 8891 - DNA, 495 bp, Chlorella sorokiniana
  Clone ID: LIB3602-103-Q1-K1-B5
gtcgaccttgaggtgcctcggcagatcagcgcgcatctgaagcacttgccagcagcgaacgagtctccacacactgccggcacccgaccaggccgccctcgtgcttcacacgcgtccagaccaccaagaatggggttgagattgacgacagcaaggtgctgctgctgtctggagtcgcagcttccacattcgccatccacgccaccgtcgcacctaagcactacaatgagctgtacatgagcaaggacctgccggtcaacgagccgatgacccgctggttcggcctggccctggccacctgcggcggcggcattccgataaccctgtccgctggagactacagcgacaagaagcccgtcaaggatgcactcaaggcatcgggcgccgggtggaccaccgcccttgtcaccacgctctacaacgcgcatgaggggcaccagaagaaggagccagcctacgcctcagccgtcggcatggctgccatggccgccctct

SEQ ID NO: 8892 - DNA, 497 bp, Chlorella sorokiniana
  Clone ID: LIB3602-103-Q1-K1-B6
gtacctaggagtgaaggacgcgccagacagccctggcggcctgcagcgcgtgcagcagctgtgtgcagcagtggtggaagcattctcagcagctggcctgcttctgccgcaagacgaccgtgctactaagctgcacgcaacagttctgaattcgcgatatcggcggcgcagcagcggcggtggcggcggcggtggcggcggcagcggcggccaggcaccagggcccggccagcagcaggggcagcagcaggggcgggggcagtgggagcagcggcagccgtttgatggccgtcagctgctggagcggcatggcgccgtcgatttcggggcggtgcagctgccagcggtgcacatcagccagcgggggcagccatacgacgccagcaccggtttctaccgatgtgccgctgcactgccgctcagttgaggctctgtacaggtgcctgctgcatcgtgtattcgcacagcttgcaagtgtgaaactgcagcttgcctgt

SEQ ID NO: 8893 - DNA, 405 bp, Chlorella sorokiniana
  Clone ID: LIB3602-103-Q1-K1-B8
ggcggacaagcccaacaactagccagcgccacccaagcttgatcccctccctggccacccggtcaaatttgagctaacaccagcttgctgtgcctccttgtgcccttccatccttgttcttcctgctttgcgcgcttttccttgttttgttacatataagcagtgctgtacatctgtgcctttcccgcatttttccctccgctttcgctctcctgctgctgctcctgatgctcctttcagtcctcaacattttgggggaggagcgcacccaccacactgcgcgcctcctgattgaggacattaaatgtcgccaccgcattgacctgcatttggcagcgccctgcattttgagaccatgccaaaccgccatgccattgtattgctgctatgtaaattcaccagttg

SEQ ID NO: 8894 - DNA, 493 bp, Chlorella sorokiniana
  Clone ID: LIB3602-103-Q1-K1-B9
cagttagcagccatgcaggccaccttcgccggctctaagctgcagcttggcgcgcgcgtcagccgcaagagcgtgaacaccaccgtggtggcctccagcggcaagaagatcgacatcagcaagcagggcctgaactccatccagaatgagaccgtgaagctcaacctgatgggcaagtccaagaccatggagagcaaggactgggtggacccccagggccgcaagggcaagggctacggcgtgtaccgcttcgccaacaagtacggcgccaacgtggacggctacagcccgatctacacccccgacacctggtccgagtctggcgactcttacaagctgggcaccaagggccttattgcttgggccggcctgattgtggtgctgctgggcgtgggcatcaacctggtgatctccacctctgccctgggccagtaaatggcgacgccccccgcgtcggcagcagcagcagcagccagcagcattcccttgcagc

SEQ ID NO: 8895 - DNA, 495 bp, Chlorella sorokiniana
  Clone ID: LIB3602-103-Q1-K1-C1
gggctgtatcgcggctttggcgcctcgctggccatgtttgtgcccaactcagccatctggtggggcagctacggcgtgtggcagcaggtgctgtggcaccaggttgaccggctgcgggggcaccactggcacacgagggcgaaatcctggcggtccagggcgcggcaggcatcctcaccggatgcaccagtgccttcctgacaaacccgctagacgtcgtcaaaacgcggctgcagacggcgggcgcggaaggcgcagccgccagcgcggcagccgttgcagcggcgcccgccgcgcagggcgcacccgcgatggcgggagcagcggcggcaggcggcagcggtgcagcggaagcagcggcggcaggggcggcggcggcaggggcggccgttcggcccacctggcggcaggtggtcagccacttgctgcacacagaaggggctgccggcttcttccgaggagtggcgcctcgcatggccagcagctccatttggg

SEQ ID NO: 8896 - DNA, 370 bp, Chlorella sorokiniana
  Clone ID: LIB3602-103-Q1-K1-C10
gggcccaagttttgcgggggcataatcaggtggggaaaaaaaagtagggctttttgataaaattttaaaccaaggggggggggtgggcatttcttaggggaaaaaaaaaacggaaggggagcttttttcgtggccaactgggcagggaaaaagggcaggccggggcaaccggtttttgaaaaattgccttaaaaaaacctggccatgcaggggctttatttggttaaagaacccccgttggtcccccccatttaatcctggcccaggccccaaaaaacggaaaaaatgaggccttgcaggccgtttgccaaaattttttttttaaggccgggggaaaaaaggcccaaaacgcctttttttttaaccaaaa

SEQ ID NO: 8897 - DNA, 497 bp, Chlorella sorokiniana
  Clone ID: LIB3602-103-Q1-K1-C12
cccacgcgtccgagggcaagaaggtcgcggcggcgcccgccgccgtgaagaaggcggcggcccccgccaagcctgtcaacccgctctatgagaagcggcccaagacgttcggcattggcggcgacctgccggcaagcgcgacatgcgccgctttgtgaagtggcccaagtacgtgcgcatccagcggcagcggcgtgtgctgaaccagcgcctgaaggtgccccctgccctcaaccgcttcacccgcacgctggacaagaacatggccgagagcctgttcaagctgctgatgaagtaccggcccgaggacaaggcggccaagaaggagcggctgctgaaggaggcggaggcgcgcgaggctggccaggaggttgagaagaagaagcctgtggtggtcaagtacggcatcaaccacatcacgcagctggtggagagcggcaaggcgcagtgcgtggtgattgcgcacgacgtggaccccattgagattgtggtgtggc

SEQ ID NO: 8898 - DNA, 497 bp, Chlorella sorokiniana
  Clone ID: LIB3602-103-Q1-K1-C2
caatgccgagaagcgcggcaagaagcaggtgctgctgcgcccctcctccaaggtgctgatcaagttcctctcgctcatgatgaagcacggctacatcggcgagtttgagtttgtggacaaccaccgctcgggcaagattgtggtggagctgaacggccgcctgaacaagtgcggcgcgatctcgccccgctacgacattgcggccaaggacattgaggcgtgggtgggccgcctgctgccctcccgccagttcggccacatcatcctgaccacctcccagggcatcatggaccacgaggaggccaggcggaagaaggtgggaggcaaggtcctcggcttcttctactgagcggccttgttggatgcgccgcagcagccacggtggaccacagccgtggcggatgcagcacggccggcgcgcccggccgcggtgtttgctgcagcaccggcggcagccctgggtgctgcccccctcttagattgctgcaccgcacggt

SEQ ID NO: 8899 - DNA, 495 bp, Chlorella sorokiniana
  Clone ID: LIB3602-103-Q1-K1-C3
gacggcggcggcagcagcagcagcaggagcaggagcagtaggagcagcagcagagcaacagagcagtccgccccgaccagcacagtaggcctcggacgcagccctgtacaggtgctgccttaggccacccgtgcagcgctctggtgcaagcttcggcggctgccccctactctgcagctcctatcagttaggcctgagatggcctcactctcttgaccatacttacacttgctccaacctttggttcctttggtttgccttgagctgcttgctgcgttgatgccgctttccgctcaaccctagagagtaagttgcatttgcttacatgcacctgaggtgttcccaggcgcaatctgtatcgccaccaactccctaagcctctgaacactcccggctctcaggcaaccctctcatgccggtagcccgggcaggcaggcggccgcctttcaagctgctggtctgcatgcattgttacgctttccagccccccgcctt

SEQ ID NO: 8900 - DNA, 451 bp, Chlorella sorokiniana
  Clone ID: LIB3602-103-Q1-K1-C4
cccctcgtcggcctcggtcaaggagtggcaaccatgaagaacgacgagggcgagattgtcgatctgtacatcccccgcaagtgctcgtggaccaacaagctgatcacggccaaggaccacggcagcgtgcagatcaacattggccacctggacgagagcggcgtgtacaccaactcgttctccaccttcgcgctctgcggccaggtccgcgtcaagggcgaggctgacagcgctctggaccatctgtgggccaagaagcgggctgagatcggccagtgaagcgctgctgagttctagccgccagccggctgggctacacagctgccagccggcggtgggccagccagccttgggtcggccagtgatgcgctgcgaagcaaagtgctgagcgggcgggcgctccggcgcgccgccgccagccacgcagtgcaagctgtaacgcgcctccttg

SEQ ID NO: 8901 - DNA, 288 bp, Chlorella sorokiniana
  Clone ID: LIB3602-103-Q1-K1-C5
gcacatcctacctcccacacctaactccatgtccacccttcacccgcgcttcacacagcggctgctgccatgcaaagctgctgccaaacccatccatcatgctcgcacacccactcacccacacgtccaacgtatccagacccattttcaaggcccgactgtacagtgcctttttgcgtccttatgccgatctggtaccaggacttaatgtgtaacaaatggtatgttaaaaaaaaaaaaaaaaaaaaaaaaaaaaaaaaaaaaagggcggacaatataaaagaacca

SEQ ID NO: 8902 - DNA, 209 bp, Chlorella sorokiniana
  Clone ID: LIB3602-103-Q1-K1-C6
ggacatgcaacgaaataactgtccgatggtgtacaccaaattgactggactgaaccgtggcgttacaacagcttagactggtaaaaccctatcctcactccaactaaatggcctagtagcaaatacgcctttacccagctgccttaataacaaataggcccccacaatgggcaatggcaaacaccctgtaacgctgaatgaagaacggc

SEQ ID NO: 8903 - DNA, 367 bp, Chlorella sorokiniana
  unsure (1)..(367): unsure at all n locations; Clone ID: LIB3602-103-Q1-K1-C8
cccacaccgaccctgcaccttggccctcgtattgctgccgtccgtcgcctggcgtgctccgcccgcccgcctcatggggcgctccatgcagctcacatccccctggcaggctggctgagcacttaggctggtcagctgctgcccgttggcctccctgctctcggtttttgctccctttgcttccacaacccgcttgcagcaacgttgctcgtgcactgctcccagcagttggtggtgctcaacgatggggtcacccggacacccgacctccactgttgtttcattccagcattgcatgcccacgttgtgttgtttccagagccagtcagcctgtggaccaggcccagcctctgtaacctaagcnngc

SEQ ID NO: 8904 - DNA, 72 bp, Chlorella sorokiniana; identical to SEQ ID NO: 860
  Clone ID: LIB3602-103-Q1-K1-C9

SEQ ID NO: 8905 - DNA, 492 bp, Chlorella sorokiniana
  Clone ID: LIB3602-103-Q1-K1-D11
cggacgcgtgggcggacgcgtgggcgcggcgggagtggacggtgcacctgcaggcgggcgcgggccttgtggcggactcggtgccagagagcgagtgggaggagactgtgaacaagtctgctgctctggccggccattgacctggctgagcaggcgtttgtgtcctctgatgccggcgcttcgcagtagcaggctgcggtagggggcaccacgcctcgcagcacggcccgttgttgagtgcactcacgtgtgactcgcacctgccctgccaccaagagctgggtgctccctttgaatgcgcactgccattgctgtgccgctgctgctgtgctgcgccccttgctgcctgcttctctgctcccccttgtgattcccgttgctcccctcttctgcccgcctgtacctttctgccacctcctcctctcttgctggggccccctcgccccctcgagcacttgcattcattcttacagttgacttggccgcagtgac

SEQ ID NO: 8906 - DNA, 494 bp, Chlorella sorokiniana
  Clone ID: LIB3602-103-Q1-K1-D2
cggacgcgtgggcacatgatgatcaagccctggaactaccacgacgagctggcctccatggacattgttgacaagttccagtaccaggccaccaaccccgacctgggcaaccccgccaccacgcgctgggtggagtgagcaggcacgcagtcgcagcagactggtgcccgggcacacacgccccatcttgttctgcaccctcagctgtcagcaacacgggacctcagccaactccgatcgatcagccgttcctgtcatttcaagcccccctctgcttctctgcgtcagcttttcctagctacgaaaatgaatgccaactactgcccccgaaacccttccgtggcaacagtgaccctgcctgcttgcacccccaagactccaagtgaccccctttctactggccgctgagcatgctggccgcggcgccgtgaggccgcccggccggctgctcatgcctctattcagcctgaatcgacttggtttcatttgccctc

SEQ ID NO: 8907 - DNA, 491 bp, Chlorella sorokiniana
  Clone ID: LIB3602-103-Q1-K1-D3
gtagagtatgtgaagcccaaccacggcacaaccacgctagggttcatcttccagggcggcgtcatcattgcggtggactcgcgagccagccaaggctcctacatttcgtcacagacagtgaagaaagtgatcgagatcaacccgtacctgctgggcacgatggcgggcggcgcagccgactgccagttctgggagcggaacctggggcggcagtgccggctgtacgagctgaacaacggcaagcgcattaccgttcggggcgcctctaagctgctggccaacacgatgttctcgtaccgcggcatggggctctccatgggcaccatggtggctggctgggacgaggcgggccctgggctgtactatgttgacagcgacggccagcgcaccaagggcaagctgttcagcgtaggctctggcagcctgtacgcctacggcgtgctggacgagggctaccgctgggacctgagtgtggaggatgccattgagct

SEQ ID NO: 8908 - DNA, 452 bp, Chlorella sorokiniana
  Clone ID: LIB3602-103-Q1-K1-D4
cgggcgaaaggactgccactcactgcacggcaagtaaggtgacttccaactctatgatctactgcaggaccagatgagcggcccgccgagggtggcaattgagctggaagactgtccatgcaagcttaaccgcttgggcatgggccacacagtcttccactttgatgagaggcttgtccagagatggcttactggtgcagcgtgagctgaccagccagcaggttgcaaagggcgcagctgcagaaatggactgccagtgctgcggagccagcacagacgaatgcgttggctgcaatgatcgttgatgaagaatacacactgatccccagctgccagacacctttattttgaggttactgacggatgatgaaaatggcaacaaaaacagctgttcaatgttccattccttgtaaagcatcgagcattataaaaaaataaatatttttctctat

SEQ ID NO: 8909 - DNA, 99 bp, Chlorella sorokiniana
  unsure (1)..(99): unsure at all n locations; Clone ID: LIB3602-103-Q1-K1-D5
gccacgcgtncgnnnaaaaaaaaaaaaaaaaaaaaaaaaaaaaaaaaaaaaaaaaaaaaaaaaaaaaaaaaaaaaaaaaaaaaaaaaaaaagagaaaaa

SEQ ID NO: 8910 - DNA, 348 bp, Chlorella sorokiniana
  Clone ID: LIB3602-103-Q1-K1-D6
caagggcgcgctgtccaacgtgctgcgtggcgcggccggcgccttcgtgctggtgctctacgacgagattaaaaagtatctgaacccggacgccaagcccagctccgagtaaagagctcgcgcaggctgcccgacccacggcggggtggaacttttttttccaacaaaccagccaacccacgctcctccgcactgcacagttgcctcctcttacagcgcttgctccctaccctccgctcgcccatgccatgagccgccagtgctgctgacgcacacgggcgctcgggacacgatatatgctgcgcacctccggcccctctgatgggcaaagctgcaacagatccgcag

SEQ ID NO: 8911 - DNA, 314 bp, Chlorella sorokiniana
  Clone ID: LIB3602-103-Q1-K1-D7
aagacgagtgaggcgtgaaatgtgcagacagttggagatcaccggcacaatgagcagggctggtcaacatggcgcctaactaccgcacaactgcaagtgcatttttggtcgtcccacctccatagcgtggagttttgtttccctttttgagttttggtttacttgagcagtgctgtgtagataactttggcaagctcgtcggccgcctcaagatgtaacaagtcgagcacgaaaaaaaataaaaaaaaaatagaattaaaaaaacaaataaagattatatgaataaactatatataaacacaaaaaaagaataa

SEQ ID NO: 8912 - DNA, 488 bp, Chlorella sorokiniana
  Clone ID: LIB3602-103-Q1-K1-D8
ggacgcaagcacggcaatgtggtgcagccggcggccgcttacggccaggagaagagcgaggccgtttccgaggctgaggagctctgctgcggcatctgcggcggctcggtagacggcaaggaagagtaccttgagtgcaatgcaacacgtgccaaggaggaggatgcaccctgcactacgaatgcgggtgagtgggcaagccaggcggcaaacaatgcgtgcgacagaccgtgcggcgttgcgattccgcctcacttgctacgttccccctacctacagcgttgaattcgtgcttgcgcgagccgctgaaaaaacaaacagccatgccgctgaaaaatatcgcatcaaaaaaaaaaaaaaaaaaaaaaaaaaaaaaaaaaaaaaaaaaaaaaaaaaaaaaaaaaaaaaaaaaaaaaataaaaaaatgtaaaaatacaaagaagctgaacaaggggctaccgtgggacctaagtggggggggggccttt

SEQ ID NO: 8913 - DNA, 71 bp, Chlorella sorokiniana
  Clone ID: LIB3602-103-Q1-K1-D9
aaccactctagtttcatcttccaggcgttgtcatcattcctcgctgacactagccggccgtcttttcaaac

SEQ ID NO: 8914 - DNA, 494 bp, Chlorella sorokiniana
  Clone ID: LIB3602-103-Q1-K1-E1
gccacgacggcagcttcatcgccacgcgctgcgactccatgccccacgcggtgtgggtgtgggagacgcgctcgctggcgctggccagcctgctggtgcaggcgcggccggtgcgcgccgccgcctggtgccccgcctccaaccgcctggtgctgtgcagcggcgagcccaagctgtacctgtggacgcccgacggcgcctcgtgcgtgcacatcccgctgcccggcttccgcgccaccggcgcggcgtggcaccccgacggaacctccctggtgctgaccggcagggacagcttctgtgtcgcattctgcgacgcgctgtgatggctcagtggcggacgccctgcgggcgaatgatagcgcggccgggcagccagctgtattgtatggtatttgactggggacttagcgtagaggctgagcttgtgccgcgtgctgctgtcatcatgcacccttgactgctctgactgactgcttccgataaccctacctcga

SEQ ID NO: 8915 - DNA, 499 bp, Chlorella sorokiniana
  unsure (1)..(499): unsure at all n locations; Clone ID: LIB3602-103-Q1-K1-E10
cggtagcactgcatagctgttgcgagtcgcgaagccccagccgagacaccccgaaaccaaaccccaccacccacagcgctccaggccctcccgccccgccagcagccatgcagctgaccgccgccaccgccctcaagcaggcgccctgcgccgccgctgccccccgccgcgccagggctgtcgcggtcgtgcgcgcccagcagcccgagagcgaggccgtgacccgcagggccgcgctctccgcgctcgtggcgctgcccgcgcttgctgccgcagcccccgcctttgcacttggcaaggacgtgcgccaggccattaaggacaaggaggcccgcaggcagaagttgaaggagtcggccgccaagatgaaggccagccagaagtctgagaatgccttcgctgactcgtcgtactcgcttcctgaggaggccaccactcccaacatgcggngcggcctgaacgacccccggcggcagaactaggcggcccaagcgcgggc

SEQ ID NO: 8916 - DNA, 486 bp, Chlorella sorokiniana
  Clone ID: LIB3602-103-Q1-K1-E11
caaggccaagaagaaggccgaggcgggcaaggccaagaagggcggcgacgccgacggcggcacacccgcgcccaagcggcaaaaggcgaccgacaccaaggccgccaaggaggccaaggcgaccaaggcagcagctgccgacgatgagccagtgcagcaggaggcgttcagcatgaaggggcagctcgtacgcgatctggcggtgatgatgtacggttttggcgatgacgtggcgccgctgcccgagacgctggacctcgtggaggacattgtgctggactatgcaagcacgctgatgcgcaaggccatggacagcgcggcccagcgcggcaagctgcgcaagccgaatgcacctggagcgggcacggccataggcgcggaggacgtcttgttcctcgtccgcaaggacccgcgcaagtacgcgcgcgccaaggagctgctgatcatggacgaggagatccgcaaggcgcggcaactggtggagga

SEQ ID NO: 8917 - DNA, 481 bp, Chlorella sorokiniana
  unsure (1)..(481): unsure at all n locations; Clone ID: LIB3602-103-Q1-K1-E12
ccggactgccggcaggcatgcaggcactggctacgggttcgctgatgcctggcatgccaggcatggttgcacctggcatggtgcagccgcgcccggccggcaagtagtgcagcttgctggttgcagtgctgttgaaatcttagaccgagcgtggttggggtggtccaccccatacccttccacgctcaactctgcttgctctgatctgctcttgctcttgctctcggttcgtccctgctcacactgacccctgcttcgcccacgtttccgttccacccctaccgttgactctccctgagcacacaaacatgtacctatctgtaacctgttgaccggataaaaaaaaaaaaaaaaaaaaaaaaaaaaaaaaaaaaaaaaaaaaaaaaaaaaaaaaaaaaaaaaaaaaaaaaaaaaaaaaaaaaaaaaaaaaaaaaaaaaaaaaaaaaaaaaaaaaaaaaaaannnggggggggggcctttta

SEQ ID NO: 8918 - DNA, 388 bp, Chlorella sorokiniana
  unsure (1)..(388): unsure at all n locations; Clone ID: LIB3602-103-Q1-K1-E2
cgtggtgccaccttcctggaccccaagggtcgtggcgctgcgactggctatgacactgctgtggccctgcccgccgctggcgacgatgaggagtacctgaaggagaacatcaagtcggccggcgcaatgaaggccaggcagtgttctccattgccaaggtggatgctgccaccggcgagattgctggcgtgtttgagtctgtgcagccttccgacactgacctgggagccaaggcccccaaggacgtcaagatcactggcctctggtatgctcagctttcgtaagcgctgccagcgcccgtcgtttggagaagagaattacagctttgtcgctcgacctgtttgtcagacgtagaactgctcatgtaacataagcgcgcaaaanaaaa

SEQ ID NO: 8919 - DNA, 494 bp, Chlorella sorokiniana
  Clone ID: LIB3602-103-Q1-K1-E3
cacctgcagcctccataactgcctgcctcccttccacccgttgcaaacatgtcttgcaggacgaccccatccagatagagcgtgcgctggagcgcggagaggcgcgcctgcgcgaccacctgcacccagaccctacatcgtgccctaccgcccaggcggcagcatgtacgcgcgcaacccgcccttcgacccgtctgtgcacatccatctggactttggccgcgagggccactgagcgcttgctggcggcggctgcagaccgacgcagggcagccactggagccgctgtcctgccgtcctgcagcagcgcacaaccggcagccctgaagagcctctggatgtagcggcggccctgcagagtctgctagtgcagccgcagtaatgagcctgtgctgtggaaccctgctgcatgttgtcgggcatgggttgtgctgcgccgacgggcctttgcagcctgaagctgctcccggttcgcatgcggcactctgaacttt

SEQ ID NO: 8920 - DNA, 68 bp, Chlorella sorokiniana
  Clone ID: LIB3602-103-Q1-K1-E4
taaaaaaaaaaaaaataaaaaaaaaagggcatggctaagatacaaaagtgggacataaattttataat

SEQ ID NO: 8921 - DNA, 503 bp, Chlorella sorokiniana
  Clone ID: LIB3602-103-Q1-K1-E5
caagtactgcaagaccaagtggctggcctaccccgtggagtgctccacttgctccggctactactaggcaactagctgagcaaggcagggcagcctgaaacaggctcccatgtgccgacgctgctggcggcatgaggcacagcaccaagaaaggcagctttcaagggcggcgttgtgctggagcaggcatggccgccagtctggagcgccagctacagcacgttgccgcgctcgatggccctgccaaccagcctcgacgcacagctgaagcgctgcaacacacccgtgacaaaccgtgcaacagcagccacacactgcgttgcttgaaccccctttccgtgacccaagacccgatccattccgtgatctctcccatctgcaacccagcacactcccccattccctggaccccatgcatgaccctcccccctccctgaccccgaaccattccgatgaatgaaaccacccccccgccgctgtgcttgccccacacatgtgtacag

SEQ ID NO: 8922 - DNA, 501 bp, Chlorella sorokiniana
  Clone ID: LIB3602-103-Q1-K1-E6
gggaaaacttgcctgggtcctgcgtgatgacgtggctggctggccgtggccaaccgccacctgaacaacctcatgctcaccaccgacggccgcctgttccacatcgactttggatacatcctgggccgcgacccaagcccttcccgccgcccatgaagctgtgcaaggagatggtggacgccatgggcggccaggacagcgagcactaccgccagttcaagacctactgttgcgaggcgtacaacatcctgcgcaagtcagccaacctgctgctcaacctgctgcacctcatggcgggcgcctccatccccgacatccagtccgaccctgaaaaggccatgctcaagctgcaggagaagctgcggccggagctgcgggatgaggaggctgcgctgtggatgacgcaggtgctgagcgacagcgccaccgcgctcatgccgcaagtgatggagaaggcgcaccagtgggcgcagtactggcggtaaagcctcggcgtggggt

SEQ ID NO: 8923 - DNA, 492 bp, Chlorella sorokiniana
  Clone ID: LIB3602-103-Q1-K1-E7
cgtgacccccgagctgctgcagcgcaacggtgccgccaacttcggcgaggctgtgtggttcaaggctggcgcccagatcttccaggagggcggcctcgactacctgggcaaccccaacctggtgcacgctcagtccatcgtggccatcctgctgacccaggttgtgctcatgggcctgattgagggctaccgcgtcaacggcggcccggccggcgaggtggtggaccccatctaccccggtgaggcctttgaccccctgggcctggctgacgaccccgacaccctggctgagctcaaggtgaaggagatcaagaacggccgcctcgccatggtgtccatgtttggcttcttcatccaggccattgtgaccggcaagggccccgtgcagaacctgtccgaccacctggcctccccctccaccgacaacttctactccctgtacgccaagaccctggcgtaagcggcctgcacttgctcctgcttgagcctcga

SEQ ID NO: 8924 - DNA, 495 bp, Chlorella sorokiniana
  Clone ID: LIB3602-103-Q1-K1-E8
agcttcgacaaggccgaccccaatgtgggcaccggcctggtgggcgcgcccgcctgcggcgacgtgatgaagctgcagatcaaggtggacgacaacggcaacattgtggacagctgcttcaagacgtttggctgcggctccgccatcgcatccagcagcgtggccaccgagtgggtcaagggcaaggccgtggacgaggtgctgactatcaagaacagcgacattgccaagcacctcagcctgccgcccgtcaagctgcactgctccatgctggcggaggacgcaatcaaggcggcggtcaaggattggaaggccaagcagcagaagcagggtggggcgcagcagcagcagagcgcggccgccaccgcctgagcggcggttcaccagcccttgtggccccttctggccagtggctttgggtactagcgcgcttatcagagcaccatccccgagcacgcccactacagtgctccccatgttgtctgccatactagc

SEQ ID NO: 8925 - DNA, 353 bp, Chlorella sorokiniana
  Clone ID: LIB3602-103-Q1-K1-E9
aaaaaagggggggtaaaaagaaaggggaaaaacggggagggggcctttttaaaaccaaaaaaaaaacttggggaaaattgaaaaaaaattgggaggggtttttttttttgcaaaaaaaacccggaaaggggtttaaattttgaaaggccctttggttaaagggttgcaccaaaaattttttttaaggggggctaaaataactgggaaaattcgggctggggaacccccaaataattgtggccaccctgtgggccaaagttcttttaatggggcccttgaaaatttaccgcgccaaaggggagggccccaatggtttttggaagggccaaaaaaactttgacccagggggggcc

SEQ ID NO: 8926 - DNA, 499 bp, Chlorella sorokiniana
  Clone ID: LIB3602-103-Q1-K1-F10
cgcctccgacacgcgcttcagccatggacaagctgcgggagctcaagaacaaggttgtgggggcctccactgcgcctgcgggcggccctccctcccagcagatgggtgcgggcgcgtctggcatggcagcgcagccggcccccccgccatctccaccgaagcgcccaagctctcccgcatctctaccgagtatggcgaggtggaggggcagcccttcatctcagggctgggcatgaagcgcggcccgctgtcgccccgcgctcaggccgtcaaggaccgcctggctcgggagctggaggagtccacccgcgtcattggctagccgctcacaagtatgtacaataagcggcaagcagctgcaatatgaaccagctatgagccagtgcgcctgcgcggcaagcccagcagcaccactgcaactgcgccgacggcatgcgacgataaacaagcgacaccaagccccccacggttgatgtatgccctgtatgaacccgtgaac

SEQ ID NO: 8927 - DNA, 509 bp, Chlorella sorokiniana
  Clone ID: LIB3602-103-Q1-K1-F11
aaaaaaaaaaaaaaaaaaaaaaaaaaaaaaaaaaaaaaaaaaaaaaaaaaaaaaaaaaaaaaaaaaaaaaaaaaaaaaaaaaaaaaaaagggggaaaaaaaaaaaaaaagaagaaaagagaaaaaaaaaaaaagggggggcctttttaggggttcaaattttttttccgggtgtttgaaagtttttatttttttttttggggcccttaattaaatttattgggccgtgttttaaaaaggtgtgaatgggaaaaccctttggttccccaattttattggttttgaacaaattccttttttgccagtttggtttattagaaaaagggcctccccttttcccttttcaaaaattttgccaaccttttttggaaattggccccctcttttttggggctttttattgggggggtttttggtgttaccgccaagtgggacctttaatttttcaaggcttttgggccccttttttttgttttttttcttttttttttgggcaatttttgggttttt

SEQ ID NO: 8928 - DNA, 505 bp, Chlorella sorokiniana
  Clone ID: LIB3602-103-Q1-K1-F12
aaaaaaaaaaaaaaaaaaaaaaaaaaaaaaaaaaaaaaaaaaaaaaaaaaaaaaaaaaaaaaaaaaaaaaaaaaaaaaaaaaaaaaaaagggggaaaaaaaaaaaaaaaaaaaaaaaaaaaaaaggggggggccgttttaggggttccagttttccttccccgtgcttgcaaggtattagtttttttttggggccccctaatttaatttcctgggccggttttttaaaccgtggggttgggaaaacccttgggtttcccaattttattcgctttgaagaaattccctttttgcccggttgggttattagaaaaggggcccgaccggttggcctttccaaaattttgcccacctttattggcaatgggacccccccttttaggggccttttaagcgggggggttttggtgtttccccccagtggaccctttacttttgcaaggcccttagggccggttcttttggtttttttccttttttttttcgccagtttcgcgggttttccc

SEQ ID NO: 8929 - DNA, 355 bp, Chlorella sorokiniana
  Clone ID: LIB3602-103-Q1-K1-F2
gggtctggcccctgttccacaaacacatgccccctgtctagtcgcgtagcgtgcgtagcgtccgcctgccctctcccaccacgctcgcctggccattgtttcagtgcccagcccgagcccgtagcgtctgcctgttgtgggtcacatttgtagcatccccatgcgcccctctgagcctcagctgtctgcctcagcacctcttagtagtcggtccgcccttcccgcccccgccgccatcccgccccgccccctggctttcatgactcactctctttgccgtcccttgcccgcattggtcgagcccgaattagcgatccgttgcacacattgcgatttggttgtgtaaagtagcgcg

SEQ ID NO: 8930 - DNA, 497 bp, Chlorella sorokiniana
  Clone ID: LIB3602-103-Q1-K1-F3
gggcgcagcggggtcccccgtgcccgtcaacccctcggagctgcgagaggcgctggccgcgctgcccaacaagctcttccagctgggcgagatgagcgatgcgggggagacgctgctcaccacgtttgagaaggttcgggaggcgcaccccgcggcggccaccgagctggaccgcatcttcggcttgcaagtgcgggaggcggtggtgtgcgccgacccgcgctgcggcaggaccacccaccagcacgcctacacccagtacttttacaacacgcgggctgcggctctgcgacgtgcggtggcgcaggcggcggaggagcggcggttggggcggctagggcccaagacgctgggcgcacggctgcgcaaggtggaggagcagatttacaagagctgcgacactgaccacggcggctgcaacaagtcatatgcggtgaccactcggctggaggaagcgccccgcgtgtttagcctgcagattgcgtgggactccaacc

SEQ ID NO: 8931 - DNA, 499 bp, Chlorella sorokiniana
  Clone ID: LIB3602-103-Q1-K1-F4
cagccagcggcctatgccggcagccctcgtggccgtgccggcggccggcactgccgcagctagtcgtcggcgccagcagcccagctgaacgactcatctgtgcggccgctgggccgctgtgattcatttgcatcgcccatgagcggctgccttgcacgcatggtgcggcacggcctgctctgcggcccttcatacctttgtacctttctgtatcatcttgcagcaatggcagccggctgcatctttctaacatcgtcaccggcccactcgtttgtgccatgcccacctgcctccaacgtcacccttcatcaaccctcacccaacccatgcacctgacacccatccactcaccttgcctccgacacaacctctgccacccactcaccacccatcacccggtcaacgccctccatgcaccatcctccccatccaccaaatctgccaccccaaacgcacgttcgccgctgcaccacctgccggccgctcacccgcacccatc

SEQ ID NO: 8932 - DNA, 503 bp, Chlorella sorokiniana
  Clone ID: LIB3602-103-Q1-K1-F5
cagagacctggccatggtgacacaggaacgcgacactgtcgcagacaagcaagaaggcgaaggtcgcaccaaagcaaggacaagaagggcctgaccttaaccatagcctgctctgatgccgcgcataacaacatgatcaagatcatctgcttttaaaatgtgctggccgacaagatcaaggtagctggctataccggggtgctattgctacaacggcaaggtggacccgcgacacgtaccatagatcacacgcgaccatcgacatccgcatgagcaagcgtgacctcaagtacctgaccaagaactacctgaataagcacaacgtgcgccactggctgcccttgatcttctacaacaaggaccgtttcacactcgagctgcgatactttaacattgccgaccatgctgatgacgacgaagacgaggatgcagctgcttgtctgcacaccagcaggcgagcgccctccccgcaacagcaacgcgcggggggcggagggggtgaa

SEQ ID NO: 8933 - DNA, 494 bp, Chlorella sorokiniana
  Clone ID: LIB3602-103-Q1-K1-F7
gcgcgtggcgcccgaggagcaccccgtgctgctcaccgaggcgcccctgaaccccaaggccaaccgcgagaagatgacccagatcatgtttgagaccttcaacgtgcccgccatgtacgtggcgatccaggccgtgctgtcgctgtacgcctccggccgcaccaccggtattgtgctggacagcggcgacggcgtgagccacaccgtgcccatctacgagggctacgcgctgccgcacgccatccagcgcctggacctcgctggccgcgacctgaccgacttcatgatgaagatcctgaccgagcgcggctactccttcaccaccaccgccgagcgcgaaattgtgcgcgacatcaaggagaagctgggctacgtggcgctggactatgagcaggagctgcagaccagcctcaactcctccaccctggagaagacctttgagctgccagacggccaggtcatcaccattggcagcgagcggttccgctgcccgg

SEQ ID NO: 8934 - DNA, 444 bp, Chlorella sorokiniana
  Clone ID: LIB3602-103-Q1-K1-F8
ggctgaacagaagttacaactgtgcaggacacctttgccattgtagagcaatctgtgccctggcacatgaacagttttgcacagagacccacacactgtgcacagctgtaagaaacacggatgcgcacagcagcagggaggcaaacaatccagcgctcaaggggctgcaaaccctgtcattacaagcgctgttgcactccgtgcgcagcatgcaagcagccacaaaccactccagctgcggccatttgcctgcccgctgtttttgctccaaaaaattggcacaagccgcgctttggcactgggcatgtgcgcgcttgtcaagccacttccggagggctgggctgcgatccaaaggccgaggctgtgctgggcgcaacaacgggcgcggctcgccctcaggctgctcctggctgcgccatgcccaactttggcacgatgagcgct

SEQ ID NO: 8935 - DNA, 493 bp, Chlorella sorokiniana
  Clone ID: LIB3602-103-Q1-K1-F9
gctggcacgagtctacgagaccgtgaagagcaagcacgacgactttgcaatcgtgtttgtgtccgccgaccgcaatccgcagcagtttgaggagtactatggcagcatgccctggctggcagtgccgttccaggagcacgcggtgcagcagcgcctgagcagccgcttctcggttgcaggcatcccgcggcttgtcattgtgggacccgacggcggggtcattgccagtgatgcacgtgcggcagtgatggcagaccggcagggagagcacttcccctggcccggcgctgcgggcccctccctgctgtcctcgctgctgtcatcacgcgggttgctgctcctgttcttcgcgttttactatcttgtgcagtggctgaccaagaagtgagcggcagggagggacatgctgtgtttacaccggcgtgggggtgcatgtttgaaaaaggcaaatgcgtcatctactgtacagtcactgctgatccttgctggcgtg

SEQ ID NO: 8936 - DNA, 493 bp, Chlorella sorokiniana
  Clone ID: LIB3602-103-Q1-K1-G1
ttccgctcggaggccagcagcatcagcagcgcgggcggcactggcagctatgtgtcggtcgctgccagcatcaacgaggacgaggctggttgagcgtgagtttggcagctactcccgtgccgctgtgcgccgccagccacctctaaattgctgtcaccaggcgtgccgcttgctgctggtgcacttgctgcactataccgcggccggatgtgactgtcaacatgcctgacatttcctgcccttaccaaccatgatgacctttatcaatgttttgctgccatggctgcaccccatgtgtgccaccgctttcatatgcctcgccggtactgctttataaacgccgggtgctgccactctcctgccattgccttgtgccctgagctgccccttgctttcttccaaagtttgcctgctttttccgcgcgtattctttgattagtattcttgacagcctgtacagcttgccttgtgtacatggattgttcaaacaccc

SEQ ID NO: 8937 - DNA, 502 bp, Chlorella sorokiniana
  Clone ID: LIB3602-103-Q1-K1-G10
gttgcttagaaggtccgcccgctccgcattcagcccacaacatggctaccgtgatcgccgcctcctccttcgcgggccaggccgtgcgggctgcgccccgccccgccgccgcgcgctccgctcgccgctccgtggcgccccgcgccatgctggagacccagcgcatggccaccagcttcgatggcttcaagtttgagcccatccgcgagtcgcagatctcgcgcgccatgacggctcgctacatgaaggacatgcacgagcatgccgaggtggacatcgtgattgtgggtgctggctctgccggtctggctgccgcctacgagctcagcaagcaccccgatgtcaaggttgccatcattgagcagggcgtggcgcctggtggcggctcctggctgggcggccagctcttcagtgccatgtgcatccgcaagcccgcggacaagttcctggacgagctgcaggtgccctacgaggacgagggctcctttgtggtggtgcgcca

SEQ ID NO: 8938 - DNA, 344 bp, Chlorella sorokiniana
  Clone ID: LIB3602-103-Q1-K1-G11
agctagaaaaaataaaaaaaaaacaacaaactaaaaaaaaaaaacaaatagaaaataaagactgctgaacaattgaaagaagcatgaaagagggggccgtcctgtttaatggttccaggcttacctgcgcgcgcatgccacgctattgctttcttatagggtaacctaaatcaaattaactggccggctttttccaacttggtctctggaaaacccctgtgcttaccaaacttattcggttacaagcacataccgttttgccccgcttgcgtattatgaaaaaggcccgtacggatggcttttctcaacttttgacctctcctaatgcggattggtactccccc

SEQ ID NO: 8939 - DNA, 505 bp, Chlorella sorokiniana
  unsure (1)..(505): unsure at all n locations; Clone ID: LIB3602-103-Q1-K1-G12
ggacaagatatttcgcagatgcaccgctctctggggctgcaacaacatgcgcaatgagatgcaagccaacaaccagactggcaagcttgccttcatccgagccttcctgcacggctacttcatgtacagcganacatatgcacgctgtcgcgaccagaaatcgcgccgctgttcgacacctgtgactggtcaatactcttcttccatcctctctgcactgggtacgatggcaaggtgaccattttcaagcaccagcagatgtggttcgtgaacgaagaccggtgcctgccacgcaacggcaccgagagccaggtcaaggcatgtgagccggtgcgatgggtgcagccagactacgagcagcacctgtatagctgttcatcgtaccccatatccctgacgcattcgcggccagtgttagcggcggcgccgccgccccctgtgcagccgccccctgcaacatagcgcttccccatgcggcagttgcgatgcttcaatttgtctatgg

SEQ ID NO: 8940 - DNA, 498 bp, Chlorella sorokiniana
  Clone ID: LIB3602-103-Q1-K1-G2
agagaggcccgcccagttgagggcgcacagaagtacacgcacccgtgtaacacgcacacacgcaaaaaaaaaaaaaaaaaaaaaaaagggaaaaaaaaaaaaaaaaaaaaaaaaagaaaaaaaaaaaaaaaaaaaaaaaaaaaaaaaaaaaaaaaaaaaaaaaaaaaaaaaaaaaaaaaaaaaaaggggggggggttttaaaggaccaaagtttacttacgggggcttgaaacgtaaaattttttttatggggcaaccaaaataaaattaatgggcgggggtttaaaaaggtgggaatgggaaaaacctgggggtaacaaaattaaatcgcttggaaaaaaatccccttttcgcaagtggggaaaaaagaaaaaaggcccccacgaatggcctttcaaaaaagttgccaatcctaaatggaaaagggaaccccctttttacgggccaattaaggggggggggtgggggggttaccccaaggggaacggttaaatttgc

SEQ ID NO: 8941 - DNA, 495 bp, Chlorella sorokiniana
  Clone ID: LIB3602-103-Q1-K1-G3
gcatccgcaagcccgcggacaagttcctggacgagctgcaggtgccctacgaggacgagggctcctttgtggtggtgcgccatgccgccctcatgacctccaccctgctgtccaaggtgctggccgcccccaacatcaagctgttcaacgccaccgccgccgaggacctggtggtgaagcaggacgagaagaacggcaagtacgtggcgggtgcagtgaccaactggacgctggtgtctctcaaccacgacacccagatgtgcatggaccccaatgtgatcgagtccaaggtcatgatctcctcctgcggccacgacggccccatgggcgccgccggcgtgaagcgcctcatgcgcctgggcatggtggagaaggtgccgggcatgggcgcccttgatatgaacaccgccgaggactctgtggtggaccgcacccgcgaggtggtgcccggcatggtcatctgcggtatggaggtggctgagctggacggctgcc

SEQ ID NO: 8942 - DNA, 466 bp, Chlorella sorokiniana
  Clone ID: LIB3602-103-Q1-K1-G4
attctttgcggcacggaacggcgcacccgcctctaccgcctcgccgcggccgccgcgccccctgcacattgcgcgcgcggccgccgccattttgagccgtgcctcatctctatcgctgactccagccgtacaagtgaccctaccccctccggtgctagattgagcctattcgtcccccggctgcgctgcacgccgcacgctgcggcggcaccgcttgcctcctctcgatccgattcttccccgttagccgtccccctgtctatccatccaccgtcatttcatcccatgccctgccccttgcgacccccaccccttcccccctcctgaccgagcgaccattatcaactacttgccaaatttcttcctcctggcccgcggtgtgcctcctcccctgtactctacccaaatctagcgctgggagcgtcagccttgctattgtttgcctgcttgtgtaatgccatgtagc

SEQ ID NO: 8943 - DNA, 277 bp, Chlorella sorokiniana
  unsure (1)..(277): unsure at all n locations; Clone ID: LIB3602-103-Q1-K1-G5
cggctaggagtgtgtgtggacgacgcgctatgcgcgacgagttcaaggggctcgngtgcgtgcgtgcacgttctcggcacaatccgagagggcgcggctgtggcgaggggaagcgtgatttgganggatgcgcagcaggtggcgcctgttccntggaggccaagctggacgcgcgctcattgcgtgctggcggcatgtncttgagncccctggaatgtgtgctctgagagncttgtaagcatcgagtgcttaaaataaaaagaaaaattaaaaaata

SEQ ID NO: 8944 - DNA, 507 bp, Chlorella sorokiniana
  unsure (1)..(507): unsure at all n locations; Clone ID: LIB3602-103-Q1-K1-G6
caagccgtcgcggttccagccccctttcgcaactccaccagctccccctgtctgcacacgccatggctcccaaggttttcagctggaacttccccggcgcttacgccgtgcagttcatgaccgtggtgtcgtgcacccctgcgtgtacacttgctaccacttcctggtcaagaacccggatgtgcactttgtcaaggagctgaagcaggacgagctggcggagagcgcgcggtggtcccagcaggccaaggccgtccagggcaacgtgttccgctggctggcgcagacgcgcgacaccgccgcgggcgagcagaaggacacccgcatcttccgcgtttgagcgcccgccaggctgctgcgctaaatcggcgcgcaataccagccgctcaccgccactcgccgccgctgcgcccccctgtgcttgctctcagggcctgaggccctctgccagtcagccacctggggccggcacccccttgccgctatgatatgcgtccncaaagctgg

SEQ ID NO: 8945 - DNA, 491 bp, Chlorella sorokiniana
  Clone ID: LIB3602-103-Q1-K1-G7
gccacccggacgccacctgcaagcggtgccaccccacaatcaacacgttcctgtcccctacaaacacggtctggttggatgccggctacccagagactcagtgcacaaccagggacgccatcgcaaagcaagctaaagccatcgctggcgtggacctgctggcagtaaacgccatgtcgcctttctgccgcgagcttgacacagacttccgctgcgctgcgtgtgcttactggacgcccagtgtggcgcgcggctacggccctgtccctacgtcagacccaaataaaatcgactgccagcccaatgatggctttgtggtcaaggacgccaaaaccggcggccgcgtaaacagcagcacagctcagcccgttggccgcaatgggtgctacatgaagcgggcctacatgcaatactgcctcaagtgctcggacgatgggctcaagtgcttggctaccaaggatggaaagaagtacgggtgcacgggcgggcgc

SEQ ID NO: 8946 - DNA, 92 bp, Chlorella sorokiniana
  Clone ID: LIB3602-103-Q1-K1-G8
ttgcccccctagtgtccttcgtcccctcgcgtgcgtcttactaccgatacctgctgtaccaacaaaacccagccatgtaactgaccgagtgc

SEQ ID NO: 8947 - DNA, 164 bp, Chlorella sorokiniana
  Clone ID: LIB3602-103-Q1-K1-G9
cctggagcgacctgggcatcccatattaacggcggccagccggttttggacaagcacacacaacatatgagattcccaacctccctgcgcactgcttgtaacaatcctggctccctcttgtacccttgacccgactcgggcgtggatatgtaacgttccgcggg

SEQ ID NO: 8948 - DNA, 495 bp, Chlorella sorokiniana
  Clone ID: LIB3602-103-Q1-K1-H1
gttcttcctgcgctgctggtcccgctgctggccatccggctaaacttggctgatgtctttggccacctgcagcggcacggcggcagcccgctgcgcctgctgggcctgctgctgctcagccacccggcacgtgggtgctcatctccgcgctctgcggcggcgcggccatcgcagcaaacgtgctggtcctgcccatgcttgcggcccctacggtgtgggccagccgcggcatgtgccaacaagtgctgcacgtgccgggggtggaggagcctctagcccggctgcatggcgcgctagataccctgcacggcaactcgctgctgtcgcagccgcatgcagcggtgctgggagagccgagcagcatgcagtgctgcctggcggtcaacatttggcttgcagcggcagttggcgtggtgctcccactgttcgtgctcgggcgctgggaggcggcggggcggtgcagcctgtatgcacggcgctggcggcaggcacagg

SEQ ID NO: 8949 - DNA, 494 bp, Chlorella sorokiniana
  Clone ID: LIB3602-103-Q1-K1-H10
gggaggagcgagaggaggacatggcccacctgccgcacttccagctgctgccgctcagccggtttgagtcctggagcgacaacatccacgccctgctggacaaggagaaggaaacaatcgtgatgtgccacccggcgtgcgcagcatgcagatgagccagtggctgctgcagcagggcttcacaaacgtgaagaacgtgaccggcgggattgacgcctactcgcgggcggtggactcctcggtgcctcagtactagcgcagcagtgacacagccagcctgatatttagcaccgcaatgccagcacggcagcgcctcagctttgcctggacataacaccgcagtgcggcgcagctctgcctaacacttgactccactgcaatctgccaatcacgccggctcaagcctgcacgatcatccagtgactctgtcagccctctgtggttacaagtgggctgtggcctggtgtgctgcctgaggcttgtaattaaaatgc

SEQ ID NO: 8950 - DNA, 507 bp, Chlorella sorokiniana
  unsure (1)..(507): unsure at all n locations; Clone ID: LIB3602-103-Q1-K1-H11
gcggcggcgcaggtgagaggttatctatgggctgccctgtgtaatgtggcatgggactcagttgcattgtttggggacctgcgctggcacacctgtagcagccagtaaaacgcgcctgctccctaccctgaaagcagcgtcgctgcatcatctcacctttccaagcctgcccttgcctcctgccccccctgctgcagccccagctacgaccgcagccggtcgccgcgcccctcgcgccgcagtccctcacccatgcgccgcagccgctcccccgcccgccgccgcagccgcacccgcagccggtctccctacaaggggcgcagcgccagcccgcgccgccgcagccccacacgctcccgctcccgctcgccccgcaactgagcctggagagggcagcagggcagtgctgaggctcagagctgtggatctcagcaacgtaggcattcaagcctgcaggcggcatggaatgcacctttgtttcgactgacattcggnggtgcgggcagc

SEQ ID NO: 8951 - DNA, 299 bp, Chlorella sorokiniana
  Clone ID: LIB3602-103-Q1-K1-H12
caagcaactcgcatgcgcaccaggcagcccatcccagcagcagcctcgcctgtttttccagagctcgctctggcagactctttttcaggactgacgcctctcattccgaggcagcgagcgactgctcttgacccacctccgcccctcctgcgcatgcgcattcccatatgcattctgctcatgcgtatcccttccacagctcacatgcccatgcaatctcatgcaatgcctgtacagcgcctgtgtaaccacagagcgagcaaaaaaaaaaaaaaaaaaaaaaaaaaaaaaaaaaaaaa

SEQ ID NO: 8952 - DNA, 318 bp, Chlorella sorokiniana
  Clone ID: LIB3602-103-Q1-K1-H2
aaaaaaaaaaaaaataaaaaaaaaaataaaaaaaaaaaaaaataaaaaaaaggtataacaatttaaaaataacatgcttacatataagggggggcgacttttatagggtgcaaggggtcaccctctcttttccattgtttcactttttttatactggcaccacatttaaaccccttggctacctttttaaaccgcctagtctcgcaaacccttttcgttaccaaactaaatagcttacacgccacttcctttttcccatttggccattttaacatcctgttctcacacatccccccctccttaaaattatccctacct

SEQ ID NO: 8953 - DNA, 477 bp, Chlorella sorokiniana
  unsure (1)..(477): unsure at all n locations; Clone ID: LIB3602-103-Q1-K1-H3
gaaccccaaaggttaaaaaaaaaaaaaaaaaaaaaaagggcggacgatntaaatggggcggtcgttactatagagacgcaattttacgtgggcgtgcttgcaaagtcatgcgtattctgtagtctctcctacgttaattcactgtcgtgtcttgtacaacgcctgtgagtggcaaaaccctggccttagcaaaataagccgctttgaagagcatgcctctttaaacagatgtcgttatacgaaagagttccgaaccgttcgccattctgaacagttactcagactgaatgtgtaatggcacgttccctgcagcggctcattaagatacgcgcatgttgtggtttctgactagcgagaccgctacagttggctgctttctatagcccgctttttttccttactaccgttgcttgctttccacgttaagcttttataccggtgatgctctaaatgggcggatttattgagggtcccgat

SEQ ID NO: 8954 - DNA, 505 bp, Chlorella sorokiniana
  Clone ID: LIB3602-103-Q1-K1-H4
ggactcgacccgcatcgagctcaccgaccagctgctgaacaagtgaggggcgcttgaaggggccgcatgttgagggcttgtctgggcagctggaagccggccgccgcgagccgacccacccgctgatgaacaagcgaggccaggattggattgcggactggacaggtctggactgctgctgcgccttgcctcgtattcccatgttaatcacactccacctaaccatttcaggctgtacgacatgggcgccatcaccaccaagaagagcctggtgcagctggagaagctgtccaccgcttccttctgccgccggcgactctcggtgatcatggtgcggctgaagatgagcgagacgctgcgggaggcgtgcacgttcattgagcaggggcacgtgcgcgtggggcccgacacagtgacggaccccgccttcctggtcactcggtccatggaggactttgtgacttgggtggacacctccaagatcaagcgcaaggtgcagcgctac

SEQ ID NO: 8955 - DNA, 405 bp, Chlorella sorokiniana
  Clone ID: LIB3602-103-Q1-K1-H5
gggcccctgcattacaaggacaagagtggccagttgtatgatgctaaacacggccttgtggatcttttggaacaagaagttcaagccttataccttggattaccaggaacgaggacaagtttttcgccgactttgcttttgtttttgccaagctgttggagttgggcgtgcccttccccgagggcgcacaggccgtgtaaggcagccttggcagccgtgaaggcagcagccagctgggccaggcagccttggcggttgtgcaaggcagcaagcggttgccccgttgaagaagcccaccactcgctccaaatgaattacaggagggtctaccgccacccgtgtagcaaacaacaccagcgcttccaggacaaatctgttttgcctgaaccgaccatccaaccagca

SEQ ID NO: 8956 - DNA, 337 bp, Chlorella sorokiniana
  Clone ID: LIB3602-103-Q1-K1-H6
gctggcggcgctgactgccagcaagcagatcacgggccgcatcgacagccaagctaaggtgctgtacgctagcaagccggaccacagcaccagcacgtacactaggccatcaagacatgggacaagtacctgctcaacagccgcaccctgctgctgaacgccgggcttattcagcacgacatgattcagaaaccgatgttccatgacggcggtcgcgactacctcgggccggaccgcctcaatcatggagaggggacacccggcctgcacgtgacgcacatgggcgaccgccgcgcgaagcacggctctcgcttcgatcgcgacacggatgaggagc

SEQ ID NO: 8957 - DNA, 357 bp, Chlorella sorokiniana
  Clone ID: LIB3602-103-Q1-K1-H7
acataccatttgttacacattaagtcctggtaccagatcggcataaggacgcaaaaaggcactgtacagtcgggccttgaaaatgggtctggatacgttggacgtgtgggtgagtgggtgtgccagcattatggatgggtttggcagcagctttgcatggcagcagccgctgtgtgaagcgcgggtgaagggtggacatggagtgaggtgtgggaggtaggatgtgcggcggtgagcggcaggaaaggtggcgggtggaagatgggtgcgggtgagggggcggcatgtggtgcaacggcagacttgcgtttggggtggcagatttggtggatgtggaggatggtgcatggagggcgt

SEQ ID NO: 8958 - DNA, 496 bp, Chlorella sorokiniana
  Clone ID: LIB3602-103-Q1-K1-H8
cggacgcgtgggcggacgcgtgggctgcgacttcctggtggtgggccccaaggtgctcaccggcctggccaccgcctccaccctggacggatacaacacgggcctgtccgccactgaggaggtgcccggcagcattgaggcgcggctgagcccccagctggcgcaggcggccgagttcacgccccaggagctggagcacatcgacgagggccgcttcaacgagtacctgggcatggctgcgcgcgacctgctgtcggacggcatccagcgcctgattgacgacgccaaccggctggagcctttcttcctcaacctggcgggcggccaggagtgagcgcggcagaccagcggcaagcccgcctgcctgaccaccccctgtggcgcacggcaaacctgcccgcctgaccaccccctgtggcttggggcacacggccggccggccattttcccgcgaggccggctgcacagctgtgctgcctcgtttgcactcatgcgc

SEQ ID NO: 8959 - DNA, 393 bp, Chlorella sorokiniana
  unsure (1)..(393): unsure at all n locations; Clone ID: LIB3602-103-Q1-K1-H9
gggcggacgcgtggacggacgcgtgggctgctacttcctggtggtgggccccaaggtgctcatcggcctggccaccgcctccacccttgacggatacaacacgggccggtgcgggctgangaagtcccgcacattgaggcccggctgatcccccagctggcgcaggcggtcgagttcacgccccaagagctggagcacatcgactagggccgctttaacgagtacctgggcatggctgctctcgacctgctgatggacggtatccatcgcctgattgacgacacctaccggctggagcctttctttctcaacctggcggacggacagtagtgaacgctgtataccatcagcaattcactcctgactgaccaccccctgtggggcacggcaaac

SEQ ID NO: 8960 - DNA, 335 bp, Chlorella sorokiniana
  Clone ID: LIB3602-111-Q1-K1-A1
gcaggtgcccatccgcacgctcgtagtcaaccaggtgctgccacacggcctgcaagacaagtatctgcagacgcggcgcgccgaccaggagcgggcgctcgagcggctgcgggccgatccggagctggggcagctgcagctgattgaggcgccgctgttcgatctggaggtgcgcggcgtgccagcgctgacctactttggccagcaggtgtggcggtagctggcggcatggcatgctgaagtccaatgcattgagggcgctgttgcaaccacacatttcatttccctgtcagtctcgtgagaccacgtagtatcttgtaacaaatgcaatcatt

SEQ ID NO: 8961 - DNA, 89 bp, Chlorella sorokiniana
  Clone ID: LIB3602-111-Q1-K1-A10
aaaaaaaaaaataaaaaaaaaaaataaaaataataataaaaaaaaaaataaaaggggcggcctttcttaaattttcaactattatattt

SEQ ID NO: 8962 - DNA, 347 bp, Chlorella sorokiniana
  Clone ID: LIB3602-111-Q1-K1-A11
ctacctgggcatgtttgccaacgcggcctttggcgtggaggcgatgaccgaggagttcaaggcggcaggcgacgactacagccacaggatggccgaggcgctggccgaccgcctggccgaggccctggctgagaactgcacgagctcgtgcagcgcgaggtgtggggctacgccgccgacgagtcgatgagcgtggacgacatgctcaaggtcaagtaccgcggcatccgccccgccccgggctacccctcccagcccgaccacaccgagaagcgcacgatgtgggacctgatgcgcgtggaggagcagacgggcatgcagctgaccgagtcgatggccatgctgcc

SEQ ID NO: 8963 - DNA, 518 bp, Chlorella sorokiniana
  unsure (1)..(518): unsure at all n locations; Clone ID: LIB3602-111-Q1-K1-A12
ggcaggacgcctgcaggcactgcaggtatgcagcgctcctggaggtgcacctgtggttgcgcgtgttttgcagcatttgattggtaaggcttgacatgcactctgcgttcttagctgccaagcaccttcaaacacactcgcagatacacagccgtcgcattccattggcgccagatgtggacctcgcagccattgccgccaggactgaaaggtttacaggcaagtaatatcagcgccatgctcgctgcacaatgcgtgctgcgactcacactgcactctgctcttggttcacaggggctgagctagcggcggtctgtcgtgaggctgccatggcagcattacgggaggacgttcaaggaggtgagtgctagcgtgatcgattgcaagctaccagcgtgctgcctttgcctttggtacaaccagcccttatgctgcttgcttgccatgctngtgcacctccgtggtgcaccaccgacattttgcactggcgctggaaagaattcacccgcagctgtctg

SEQ ID NO: 8964 - DNA, 347 bp, Chlorella sorokiniana
  unsure (1)..(347): unsure at all n locations; Clone ID: LIB3602-111-Q1-K1-A2
aacccttcggcttggcagagcctgcagggcaaggtggtgtccaccaaccagagcaagacggcggtggtggaggtggccacgctgcaggtccaccccgtgtaccagaagcgcgtgcgtgtgaccaagaagtacatggcgcacgacagcagcagcagtgcagcgtgggcgacgtggtggtgctggcgccctcccgccccctgtccaagaccaagcggttcactgtggacagcattgtgaagaaggcgcagtgaggccggcattgcggcccctccccttcatttgctgctaggtttaattctgcttctcttccgctttcagcacccatgatgtaacatgctcttacnnaa

SEQ ID NO: 8965 - DNA, 497 bp, Chlorella sorokiniana
  Clone ID: LIB3602-111-Q1-K1-A3
agcgagcacaggggcaaccatgaccaagaagcggaggaacggagggcgcaacaagcacggccgcggccacgtcaagcgcgtgcgctgcgagtcgtccgccgccatggtgcccaaggacaaggccatcaagcgcttatcgtgcgcaacatggtggacgcctcggccatccgcgatctgcaggacgcctgcgccatcgacggctatgcgctgcccaagatctaccgcaaggtctactactgcgtgtctgccgccatccactccaagattgtgcgcgtgcgctccgtcaaggaccgccgcaaccgcgagccgccccgccgccccggctttggcgcccgccccgagcgcaagtgagcgtcggcatggccgcagcagcagcagccgctgaggagcagtgagggcggcgctctgcagccgcgcctcgtcctgcgatgagtcagcaccgcggggccgcccggcgcacggcacgccacccggcaggcagcttatttatgtgcgct

SEQ ID NO: 8966 - DNA, 516 bp, Chlorella sorokiniana
  Clone ID: LIB3602-111-Q1-K1-A4
gacaagcgctggctggccattgtggcgggcgaggaggacgcgtacgatggcgaggcgatcaaccccaagcacctgtcgctgattgagcggctgatgggtgtgggccggcgctacaacgccgcctccgccgacagcgatgcgagggcgacgcgagcgaggaggctgtcaaggctccccaggcccccaaggcgtaacgtgctgtgcttctcgtgtgctgcacactgatgcgtgcctaaacgaggattcacagcctgcctctggctggctgcaccgccaccgccgctgctgcgctcagcctaagcgggcagcccacaggccggcctgcgagcacagtatgcgcgcagtgatccatattcttttgcccccaacccaacacctaacagcaccgccgttttccccccgctgacccgtacattttgcatgccctgcccagtcagagcccaagcgctcccgcctcatccatctgtcttgcttatgcaccagtcttctcacgcttgctgccctgccttcccttgc

SEQ ID NO: 8967 - DNA, 473 bp, Chlorella sorokiniana
  Clone ID: LIB3602-111-Q1-K1-A5
ccaacctgaagaccgtcaaggagctgatctacaagcgcggctttggcaaggtcaacaagcagcgcatcccgctcaccgacaactcggtgatcgagcaggtgctgggcgacaaggacatcatctgcgtggaggacctgtgcacgagatcttcaccgtgggccccaacttcaagcaggccaacaacttcctgtggcccttcaagctgtcctcccccaagggcggcatcgacaagaagcgcctgcactacatcgagggcggccaggccggcaaccgccaggagtacatcaacaacctggtgcgcgccatgaactgagcgctgagccggcgagcacagcgcagcgcgcgcagcacgcacagcgcggcgcgtgcagcagcctggacggagcggccccctgatgcctgctagccacggcactgttggccgggccagtcgtgaggccccgagcgcacccgaatgtccaagggagtgcacg

SEQ ID NO: 8968 - DNA, 518 bp, Chlorella sorokiniana
  unsure (1)..(518): unsure at all n locations; Clone ID: LIB3602-111-Q1-K1-A6
cccacacctccatccgcttcggcatcggccgcttcacaaccgaggcagaggtggaccgggcagtggagctgacggtgcagcatgtcagcgagctgcgggagatgtcgccgctgtgggagatggtgcangagggcatcacctcaagaccatcgagtgggcgcagcactagagccgcagagcagccgcctgtcctgaacgccatcgaactctgggcgcagcactggtgggccctcaggggccggcgctaagctgtttgacttgactatactagcactggtgcggcctgtggcggcaccgagtgggcccatcacgcctgctggctctgcttccctggagcgttgcatgggcgcagggcgagcggtgcacgtgttttgttgctgcggctgcacctgctgccccgctctctccttttgttgttggatgcctcctgctgttgtgtgtttgttttcgcgtgtacctccctccctgctctccactgctccttgcttgtacttgcacctttgctcctttcagcgtca

SEQ ID NO: 8969 - DNA, 334 bp, Chlorella sorokiniana
  unsure (1)..(334): unsure at all n locations; Clone ID: LIB3602-111-Q1-K1-A7
ttggaaaaaataaaaaacaaaaagtaggaactagttattgaacaataaatacgcaagacaagtatctgaagacgcggaagcgcaaaacagggggggctgcctctttagagggccgaccgatacgtacctgtggaagctacattatacctanttctatagtgtgacctaaattaaattaactggcctcggtttaacaacgtcataacggggaaaaccttggagtagaccaaattaaaacggcttgaaaaacattccattttaggcactggtggaaatacaaataagacttgcatgtaaatctcttcacaacagttacgcacttttaatggataat

SEQ ID NO: 8970 - DNA, 493 bp, Chlorella sorokiniana
  unsure (1)..(493): unsure at all n locations; Clone ID: LIB3602-111-Q1-K1-A8
gccggagctgctgcagaacacgatgattcggcgggtggcggccatgcccggcgacgagctggttgcctttgagggcgaggagcacgaggagacgtttgtggtgccccagggccactgctgggtgctggccgacaacagcagctggagccgccgcacgtgattgacagccgcagctttggaccgctgccgctctccaacgttgtgggcaggatcctgtatgcggcgcgcagcgagaccgaccacggcccggttgagaacagcgcagagggcatggaggcggacgtaccggtgctcgaagcagagctcgatttggagcgactgtgcagggaatgaagggccgcaaatgaacagcccccggctgtgtttgcgggtttgtgcgttctttgccagcgtttctggctgcgctgttcatgcttgatcatgtgcacgcccacatgttgcatgctagttgctgtgggtgcgagcaaacatnccgctgctcatgctgctctgt

SEQ ID NO: 8971 - DNA, 457 bp, Chlorella sorokiniana
  unsure (1)..(457): unsure at all n locations; Clone ID: LIB3602-111-Q1-K1-A9
cgccacagttgtggaacaggggctggagagcatgcagagcggcggcggcctgcacaccggcctcagcgccgaggccaccgcctttggggcgagcgtgcacagcagcagcagcatggacaagcacgctgctgtggccgcttgctgcgcctngactgagcccgctgcggaggaaccagccgcagcagagagtgaagcggcctaggaagggcggcggtgcggcctgagcgggggctaagcccctcggatcagagccgccgccctgcaatggcagcagcagcgcggcacgccggctgcctgctgcacccatgagagtgatacagacaaattggatccagcccggcgattgattcccgctctgtcttgagctacaacattcccagtcttgcttgtttttcccgctgtcgtttccctttgctgatcagcccggctagtgacctgctcggtcgtgctgagattc

SEQ ID NO: 8972 - DNA, 513 bp, Chlorella sorokiniana
  Clone ID: LIB3602-111-Q1-K1-B1
ggcgctcctgccgctgctcaacgctctggcggcggcggtggcggcggccggcggtgccgtcgcggcttcgcaggactaccacccgccggaccacgtttcgtttgtaagcagccactcggggcgccaggtgtttgacacagtggaagtggaggtgggctggcgcagctggcccatcaagctgttcccaccgcactgcgtggccggcagccctggcgcggagtttgcagacggttttgagcggcggcacgtgcagcacgtggtgcgcaaggggcggcaggcgggcctggagtcgttctccgccttttacgacatggcgcacaccggctgtacagacctggccgactggctgcggcagcgtgacgtgcacacaatgcttgtgtgcggagtggcgatcgaatattgtgtgcgggcaacggtgctggacggccttgcggaggggtttgagactgtgctgctcactgacgcaatggctggggtggatgaaggcgccagccgggacgcgatagcggagat

SEQ ID NO: 8973 - DNA, 378 bp, Chlorella sorokiniana
  unsure (1)..(378): unsure at all n locations; Clone ID: LIB3602-111-Q1-K1-B11
catgatcccgctgcagctgctgtcctaccacctcaccacgctgcgcggcttcaacgtggaccagccgcgcaacctggccaagagcgtgagcgtcaccgangagtgatgcgggtcgccagcaactccagctagcaatatcccccggacaggcccgtgcgccattcagcttcagcccctgtctccaatgtagccaagctagcgtagccaataggcagtgtcagtgtcagctagtcacggttaggtgtcttttgaggcccgggccaccatttgcaggcagcggccactgtagtgcttgccgcggcgcaacgccgcatgtttgcttcgttatcgtgcctcattcaattcctcggagcgcaataagctcacctgtaaaataat

SEQ ID NO: 8974 - DNA, 456 bp, Chlorella sorokiniana
  unsure (1)..(456): unsure at all n locations; Clone ID: LIB3602-111-Q1-K1-B12
aaaaaaaaaaaaaaaaaaaaaaaaaataaaaaaaaaaaaaaaaaaaaaaaaaaaaaaaaaaaaaaaaaaaaaaaaaaaaaaaaaaaaaagggggaaaaaataaaaaaaagatggaaggagacaaaaaataatataaaaaannntggggggggcttttttaaagattcaaattttatttccgtttgttttgaaattattattttttttttagttaaactaaattaaatttaactgcccgtgttttaaaaaatttggaattgaaaaaaccttttttttcccaattttaattgttttgaaaaaattccttttttcccaatttttttaaataaaaaaaaggccctaacaattctttttttcaaaaattttcccatttttaatttgtaattggacccccctttttattgtttttttaaaccgggtgtttttgttgttatccccaaaggtaatttttttttt

SEQ ID NO: 8975 - DNA, 286 bp, Chlorella sorokiniana
  Clone ID: LIB3602-111-Q1-K1-B2
gccgctgcttctcccgcctgcattccagtatctggctgacccttgccctcgtgcattgctcatgttttgcttgcggatgctgcgtgggcctgttctgcttgcaaacggcgccaaccaagcaccagtatctgtcatttcctgtggcaatctaaagccgtcattaggcaaatcaactgttacagctgctgccacctgtaaatgcccccgaaaaaaaaaaaaaaaaaaaaaaaaaaaaaaaaaaaaaaaaaaaaaaaaaaaaaaaaaaaaaagaaaaaacatgcaacac

SEQ ID NO: 8976 - DNA, 512 bp, Chlorella sorokiniana
  Clone ID: LIB3602-111-Q1-K1-B3
atcgccaacagcgacgacgtgcgcgcgctgcggcgctaccccacgctgcgccgcgagattgtgacggcggcgtaccgcgcgctggaggagttcaaggaggagacccgcaagatggtgagcatcatggtggagatggacgcaactacatcaccgccgagtacttccgcaccatccagatgggcaagatgccggacggcaaggtgatgtacacgctggacgggcggccggtgacggaggagccggagggcagccccgaggagaagcactacaagcgcatcatcaaccaggtgtcgggctacgtgcgcgaggtctgccagcagatgacgcagacggtgcccaaggccatcgtgcactgcatggtgctgcaggccaaggacaagctgctggaggagatgcaggcgagcgtggcgggcgaccaggaggtggcgctcaagcggctgctgggcgaggacgaggcggtgatgaagcggcgcgaggcgctcacgcacaagctggacatgctgagccgcgcg

SEQ ID NO: 8977 - DNA, 341 bp, Chlorella sorokiniana
  Clone ID: LIB3602-111-Q1-K1-B4
agcacgcgtgcgaaaaaaaaacgcacactataaaaactaaaaaacactaaaaacgagagattgttaaaaaaaaaataaaaaacaactaggaagttgaattatgaaacccgtaagatggtgagcatcatatttaaatggaactatctacatcaccgccgagtactttcttactatccagatgtgtaatatgcctgactgtatggtaatatacacactttacgggctatcgattacagaggaatcctactgtaaccatgaggagaagcactacaagtgcattattaatttggtattatactacatgcgctaggtctgccatcacatgacgcagactttgccta

SEQ ID NO: 8978 - DNA, 85 bp, Chlorella sorokiniana
  Clone ID: LIB3602-111-Q1-K1-B5
gcgtgctgcgtttagacgcctgagaacggattcccggcgggtgatttttgtgcccgttcgacctcccccttcatgactcccgatc

SEQ ID NO: 8979 - DNA, 481 bp, Chlorella sorokiniana
  Clone ID: LIB3602-111-Q1-K1-B6
gcgagcatcgctgtcaggttgccaccagaggagccgagtcgccgcagcagccatgcaggccctccgcacctccttcttcggccagacgtggaagacgtctgtggcgacccagcagcagcccagcagcaatgccacgcggcaggtcacatgcatggccaagaagaagggcatccgcatgattgtgaccctggagtgcactgaggcgcgcggtgagggcgccaccccctcccgctacaccacccagaagaacaagaagaacacccctgagcggctagaggtcatgaagtacaacaagtacctcaagcggcacaccctccacaaggagatcaagtaacaagcttgccagcgctgctgccgccgccgccgccattgcggctggcgcgctgtgggtccccacagcttgcggcaaccaccctgctgcttgttaccgcacgtctccgcctctttcatttttttagggttactctgtaaacatgctttg

SEQ ID NO: 8980 - DNA, 431 bp, Chlorella sorokiniana
  unsure (1)..(431): unsure at all n locations; Clone ID: LIB3602-111-Q1-K1-B7
ctggcattgaggactgctacacctgctcccgcggctccacccgcaccctgggcaactttgtgaaggccaccttctacgccctggccgggacctacggcttcctcacccccgacctctggcgcgagaccgtgttcaccaagagcccgctgcaggagtactccgacttcctggccaagccggtggttggcaaggcctactgagcggcctccccatgcccgccgccccgcgcgccgcggcggcaggagcagcagcgtaacagcagcgccctgacgcgaggatagatgagagttgggaccccagtggccgctggggcgctgcgctggcagggcaagccggcgccccggcacacacctcacaccctggtgttgcattgggagacccgtgtaacaccgaccgcggnnaanaaaaaaaaaaaaaaaataaataacaaa

SEQ ID NO: 8981 - DNA, 515 bp, Chlorella sorokiniana
  Clone ID: LIB3602-111-Q1-K1-B8
ggactatacagtgcccgaggtgtttagcgacgatttgttcaagctgctgggcgaggctcggcccgactggcgctggctgattgccgggccttacaagagcggcagcggctggcacaaggaccccaacagcaccacgcctggaacggcgtggtgagcgggcgcaagaagtggatcctgtacccgccgcacatcacgccgccgggcgtgcggcccagctgcgatggcgctgatgtggcgagcccagtgtcaatcatggaatggttcatgtccttctacgagcacaaggagtcggtgggctacacccccgcggagtgcatcctcaaggagggagagatcatgtttgtgccgcgcaattggtggcacatcgtgctgaacctggacgagtgcgtggcggtcacccagaactttgtcagcgaggtcaccctaccgcatgtgctgtcccacctgcgctcccgctcccccgccctggtgtcgggctgcgccaaggaagcgcgctccggactgtacgaccgctt

SEQ ID NO: 8982 - DNA, 329 bp, Chlorella sorokiniana
  Clone ID: LIB3602-111-Q1-K1-B9
cccacgcgtacgcccacgcgtccgcccacgcgttctaaaaaaaaaaaaaaaaaaaaaatattaaaaaaaaaaaaaataaataattaaaaggaggttaaaaaaaaaaaacgggggggggccattttaaagatccaaacttcttccccttcctttctatgtgatacttctttaattttacaacctaaatttaatccacttggcacctttttataaccttctagattggaaaaaccttatgtttaccccacttaatcccttttcaaaaaattcctctttttccatcttcacaaatattcaaaacgctccaaccaatcctccttcccaataat

SEQ ID NO: 8983 - DNA, 437 bp, Chlorella sorokiniana
  unsure (1)..(437): unsure at all n locations; Clone ID: LIB3602-111-Q1-K1-C1
ggcgagccggcaggagcgcgacggcctgccctacttcgtcttcgagcacgtgtcccagggctcccccacgctgcggacggccacactagagacgtaccggcacgccctggcggtgacagcggtgcggctgggcctgatggcagcccctacctgtacacgctcaacatgagctgcccgcaggagctgtggggcgacctggaggccgccttccagcgcggcgtggagtccttcaggctactgccgcccagcagcaaatacgtggcgcccgatcaggacccctggcgcttcttctagtcttcccgtcataactggcgaccgctcggcagacgtgcgggcgtgagcactcctggccatgtgctgttgctcgtctgcatgcagcagcgagccgtcttgagaatacaatntcattggtaccgctgctggtgtaagcgcaccat

SEQ ID NO: 8984 - DNA, 444 bp, Chlorella sorokiniana
  Clone ID: LIB3602-111-Q1-K1-C10
cggacgcgtgggcggacgcgtgggaacggcaccggctttgacaacatccagtacatggtgtgccgccccgagaacgacttcttcccggacctctccaaggcgccccgcaccgacatcatcttcttctgctcgcccaacaaccccacgggggcggctgccacgcgcgagcagctcaccgagctggtggcgtttgccaagaagaacggctccatcatcgtgtatgatgccgcgtacgcgctctacatctccgaccccaactgccccaagaccatctacgagatcccgggcgcggaggaggtggccatcgagacctgctccttctccaagtacgccggcttcaccggcgtgcgcctcggctggaccgtggtgcccgagcagctgcgctacgcggacggcttccaggtcatcaacgacttcaaccgcatcatgaccaccgtgttcaac

SEQ ID NO: 8985 - DNA, 289 bp, Chlorella sorokiniana
  unsure (1)..(289): unsure at all n locations; Clone ID: LIB3602-111-Q1-K1-C11
cngnnttgttgtggggggggggttttttttggggggtttggnttttggggtttgtgtgtgnggtntttggtggggtgtttgttttgggnnnttttttcttttttttttgggntggtttgnggntttgggttttggtgggtgggtcctccnnnnctgggtggggggccttcttttgcccctggctttggggggccgtttttctcttttttgtgaagcccactggcctttcttttgtttacacaacccttgcctgggggggcgggtttttctttgccgtttattttttttt

SEQ ID NO: 8986 - DNA, 519 bp, Chlorella sorokiniana
  Clone ID: LIB3602-111-Q1-K1-C12
gtcaagatgcgggcagccattgcggcactcaagccggtacgggacctgcggccgcaggcgctgcccatcagagcgctggccatgagcggcacggccattttggcggggctgccctgcggcatgtggcgcgagcacaccaagaaatttagcccacagtggttcctggctgtgcacgccgccatcccctttgtggccatgctgcgcaaggcggtgctcatgcctaagtgggccatcctgctcaccctcatcggctccattgcggggcagaccgtgggcgcgcgtatggaacggcagcgcatgctgcagctcagcgcacggcgcaagcccgccctcacagccagcgcagccagcactagcagtagcgcaggcacagttgtcacgcagccgcgcaacgactgcgtgatgccaggccttgaggctggctgcaggcagtgcctgagggcagcccagtcagccatcaactggacgctggcgccaatgggggtgcactgaggcacttgcctcgctgcctggggcccc

SEQ ID NO: 8987 - DNA, 337 bp, Chlorella sorokiniana
  Clone ID: LIB3602-111-Q1-K1-C2
cgcgtggagttccacaagtcctcctccaaccccaacctagcgcagccggcgctgaagcccgggctgcagccaggggcggcgcctcagggcactggccagtcgatagcagcagcagcggcacaggcagcagcacgtgcggctgccgctgcggcagcggcacaacagcagcagcagggcggggccaagccggcagcgactggagcgggagctgcacagaaccaggcggcggcgcttgcgacggctcaggccaaagcccgtgcagcgcagatcgcggcgcagctggcggcgcagcggaagtaattgatactgtttgccatggcgtgtgaaaatgacttgt

SEQ ID NO: 8988 - DNA, 370 bp, Chlorella sorokiniana
  unsure (1)..(370): unsure at all n locations; Clone ID: LIB3602-111-Q1-K1-C3
ggccagtggctttgggtactagcgcgcttatcagagcaccatccccgagcacgcccactacagtgctccccatgttgtctgccatactggctggcgaggcgttgcgtcgccccacacgccagcgccccacagttgccccgaatgaatgcatgattccgcatatgacacgcgcctgttgtgctcccgccgcacccgcccttttggagcaggcctcccctttccgtcagctcgtgcttgctcccgcttccctgctacattcaatcccctttttcccctgtacgcctccgcctttcagcgcactgacccactcctggcccccggcccacagcggccgacgccgctggcccgcctgtaatctgtacgccgtnna

SEQ ID NO: 8989 - DNA, 371 bp, Chlorella sorokiniana
  Clone ID: LIB3602-111-Q1-K1-C4
aaacgagaaaatataaatactaaacacactaatcaaaaacaccatccaccaacacacaccactacaatactccaccataattacctaccatactgagtaacaaaacaaaaaagtagacccacgcgccccctctccacacttccccttaatcaccgcttcattccacatatcacactctcctaatctgctccctacacacacctccctttcccaccattccacccctttccaacaactaaacctttctcccccctcccttttacctccaatccccttttccccctttacacctcctcctttcaacaaactaacccactcctgctccccttcccacaacttcccacacctttaactcccctgtaaaccccccc

SEQ ID NO: 8990 - DNA, 518 bp, Chlorella sorokiniana
  Clone ID: LIB3602-111-Q1-K1-C5
gctggccatcagtcgcgccatcagccgggcggccaaggcccctgctgatgccgggcgtggcggcagcctgagccctcgcggccctgagaggccggttgaggggctgcggggcctgccctcacagccggcagggtggcagcttcagggcccgcccgcagctgcgctccgcctcctctgaaatactggagggcggcctgtgagccagtgctgctgccctgccttgcagccgccagcatactggcattagtatcgccgaatcccttccgtcgtttgtacatccgttgcatgccttctccaggcctacctgtcgtgcattagcgagccccgccatttgttgtacagccctcagctactcctgaccatcctgtgtgtgttgactgcttagcgctgcatagctgatccgaattctttctagttgtctgtcatgcactttgtgctgcttgtactgcctgccctagtcgttttcgctgttggcgcttgttgtttggactcacaatgatgaaagaaacacacacaaa

SEQ ID NO: 8991 - DNA, 416 bp, Chlorella sorokiniana
  Clone ID: LIB3602-111-Q1-K1-C6
gcgtggcggagcaggggcacctggtgcaaagcttgccagtaggctgtggtcaggccctgcccgtggtttgctgttgttgtgctttaagcggaagcaaggcaggatgcgttgctgttcgattgaaccagaccattaacatcacgtacctgctattccctggccctctgccccctgcgcagagatgctcacgtcagcgacggtggccgagtcgcctatggctgcatccacgggcgccactcccacagcagcagcagcagcacgccccgcagcagcacctgtgccagacctgcttggcgacctgctggaccttgacgtgcctgcaccctccgccgcaccagcggctgcgccaacggcagcagcaactcccgacctggcggtggtgttttggagaggaaccgctggcaaggggccttggt

SEQ ID NO: 8992 - DNA, 519 bp, Chlorella sorokiniana
  Clone ID: LIB3602-111-Q1-K1-C7
aagagaaaaaaaaaaaaaaaaaaaaaaaaaaaaaaaaaaaaaaaaaataaaaaaaaaaaaatattaaaaaaaaaaaaaaaaatgtactcgatgtgtaaattataaaaagtggggggcgttttaataaatcaaaattaattttctttgattgcacctaatttaaatttttttttgtgacatttaaataaatataatttgggaaaatttttacattattttaatttataaaactttggttttatccaattttttacgtttgaaaaatttcccatttttcacaattgaatttattttaaaaaggttttcatatattttaattttcaatagtttgcaaatttttttttccaattaataccctcgtttttgctgtaattaaacaacttgtttttttttttttatagcacacttgaccctttttttttcatttcttttaattttttttttattaagttttttttattttttttttaaaaaattaattcatttttttcctttaaaattttaatttaaatgtttttt

SEQ ID NO: 8993 - DNA, 515 bp, Chlorella sorokiniana
  Clone ID: LIB3602-111-Q1-K1-C8
ggcagatttgggggagtctgcccctgcatgctgcttcacgcctttcagccttgagcttgctcggctgtcagcctgaagcccgcgtgggcggctgcgtgccccccgagtgtgcaaccgcagcgccccgcagctcccagcctccccgccagtcagtgccagcccgccagcctgccgccctaggcggctgcatcagtcttgacagcggcagctccctggtcccttttgctttggctgggctcagacccattcccttccccatacaccccagggccaccgcacccggagctgcgtcgcgcaggcgcggctgcggccgggttgcgtgccaggcaagggcggcggggcgcagcgctgcggcgcggctgttttgcgtgacgccccctgtggcttttgctcacgtgagtttcgccgtattgtgccaccccttgctttgcccctctgcctttcccacttcctccgcccgatctgctctggctgcccttcccctcccttggggttccctttcccttcccgacttg

SEQ ID NO: 8994 - DNA, 94 bp, Chlorella sorokiniana
  Clone ID: LIB3602-111-Q1-K1-C9
gagagaaaaaaaaaaaaaaaaaaaaaaaaaaaaaaaaaaaaaaaaaaaaaaaaaaaaaaaaaataaaaaaattgaattgacctaaaaaaaggaa

SEQ ID NO: 8995 - DNA, 517 bp, Chlorella sorokiniana
  unsure (1)..(517): unsure at all n locations; Clone ID: LIB3602-111-Q1-K1-D1
cccacgcgtccgttagcctacagcgagcacaggggcaaccatgaccaagaagcggaggaacggagggcgcaacaagcacggccgcggcgacgtcaagcgcgtgcgctgcgagtcgtccgccgccatggtgcccaaggcaaggccatcaagcgcttcatcgtgcgcaacatggtggacgcctcggccatccgcgatctgcaggacgcctgcgccatcgacggctatgcgctgcccaagatctaccgcaaggtctactactgcgtgtctgccgccatccactccaagattgtgcgcgtgcgctccgtcaaggaccgccgcaaccgcgagccgccccgccgccccggctttggcgcccgccccgagcgcaagtgagcgtcggcatggccgcagcagcagcagccgctgaggagcagtgagggcggcgctctgcagccgcgcctcgtcctgcgatgagtcagcaccgcggggccgcccggcgcacggnacgccacccggcaggcaagtttatttatgtgcg

SEQ ID NO: 8996 - DNA, 508 bp, Chlorella sorokiniana
  Clone ID: LIB3602-111-Q1-K1-D10
caagaagtcttcctctggcgccagccagtggtacggccccgaccgccccaagttcctgggcccctacagcacgaacttcgtgcccgggtacctgaccggcgagttgcccggtgactacggctgggatacctctggctgtcggccgaccccgccaccttcgctcgctaccgcgagatcgaggtcatccatgcccgctgggccatgctcggcgccctgggctgcgtcgtgcccgagctgctggacggcaccaaccacattgcctggttcaaggccggcgccgagatcttcggcgacgacggcatccagtacctgggcatccccggcctgatcaacgccaagtccatcgtggcgaccctgatcgtgcaggtggtgctcatgtcgtatgttgagggctaccgcgttaacggcggcccggccggcaccggcctggacgctgtttaccccggcggcaaacttcaccccctgggcctggctgactaccccgacaccttggttgacctgaaggtga

SEQ ID NO: 8997 - DNA, 519 bp, Chlorella sorokiniana
  Clone ID: LIB3602-111-Q1-K1-D11
cgtgcgtgctgaacgacgcggcggtgctggcggccacggcgtctgccgacttcaccgcccgcgtgtggaacgccaccaccggcgacgagctgcaccagttccagcacaagcacatcgtgcgcacggtgtcgttcgccgcggcgacgccacctggcagctgtgcacgggcggtgccgagaagctgctgcgcatctttgacctgcagcggcccgacgcagcgcccacagagatgggccccgcgcacgacaacatccgcagcacgcactggattggggacaacaagctgctgctggtgtcgtacatcgacaagcccaacgtggacgtgtgggacctgcggacgggggcggtggcgagctcgctagagagcaagggggcggtgacgagcatagaggtcacgccctgcggccgctacatcgtcaccgcagacggcaagcaagtggacttccgggacgcctctaacttcgacctgctgaagagccatgtggcggatgggtacctcgtggagtcgggcagctttgc

SEQ ID NO: 8998 - DNA, 513 bp, Chlorella sorokiniana
  Clone ID: LIB3602-111-Q1-K1-D12
gtggtttcccccagcctgcaaggcggtcagtgagccacgagcagcggctgaggcggtcggcagcggtcggcggcaaccatgctggagggcaacctcttcagagaagagcgcggcggcaaccccgagctggttcgcgagagccagcggcggcggtacgccgatgtgtcgctggtggacaaggtgctggagctggacgccaagtggcgcgaggcccgcggcaacctggacaccctgaacatggagttcaacaagctgaacaaggagattggcgctctgcgcaaggcgaagcaggatgcgagcgctctgcaggagcgcagcaaggagatgaagctgcgcatcaaggaggcggaggagctggagaagaggctgtctgatgagcgggacgctgcgatcgtgcccatcggcaacctggtgcccgacagcgtgcctgtggacgacaacgaggacaacaacgcggtggtgaaggagtggggccagcggcgcaacgaggaggcggtccccgagaagatgtac

SEQ ID NO: 8999 - DNA, 450 bp, Chlorella sorokiniana
  Clone ID: LIB3602-111-Q1-K1-D2
cgcagctctgctgtgcccataggtgaccaaggtgccacgcgcagctgctgcgctggtgctggcgccagtggtcgaccgcctgatggggtggatgcagcgggcggccaagctggaatcgcggcggcaggtgtttggatggtttgtggcctgctgcctgggcctggcgctgacgctcttcagcgtggttgtgctggcatgggcgtgaggccgagcagcttggcatgagtgagcaccaagagcatgcggcatgttggcgtgctctgtgtggcggaagcaacaatacctgaccagagaacaaacgcaccgctcctgattggccatcgtcgcttggtcaagcaaccctcaatgatcctgatacgcgtgacttgattgccactcccgagagcttgaacctgatattgatgcattgccttgatgtatttgcaacgagttatgttatgacaagcgcac

SEQ ID NO: 9000 - DNA, 354 bp, Chlorella sorokiniana
  Clone ID: LIB3602-111-Q1-K1-D3
gaaaaaaataaaaaaaaaaaaaaaaaaacaaaaaaaaaactcttaaacaataaaaaaaaagatttaacatacaaactggcctaatcccaggggttgttttttaataaacgcggcatgaatctcacccaaacaatctacttcctcgattcattctgcctcacttaaatcaatttcactgtccccttttttacaacatctatattttaaaaacccttcatttaccaaaattaaatccctcacaaaaaatccccttttaaccatataacttttttgcaaatagccctaaaccattcttcatcccaaacatttgttaatactaaatgtaaaatggaacccccctttaactggttcatt

SEQ ID NO: 9001 - DNA, 349 bp, Chlorella sorokiniana
  unsure (1)..(349): unsure at all n locations; Clone ID: LIB3602-111-Q1-K1-D4
cggacgcgtgggtcctgcgcgagatggccgacaagtacaacatcaagtacttttacgacatcaaggaccgcggcgacttccgggccagggccgactacaagggcgtgtgccacgtggcgctggcgcangagggccactgcaagcccggtgaggtgctgttcggcaccgactcgcacacctgcaatgccggcgcctttggccagtttgccacgggtgtgggcaacaccgacgccggcttcatcctgggcaccggcaagctgctgatcaaggtgccgcccaccatgcggtttgcgcttgacggcgagatgccgccctggctgctggccaaggacctcatcctccacatcat

SEQ ID NO: 9002 - DNA, 521 bp, Chlorella sorokiniana
  Clone ID: LIB3602-111-Q1-K1-D5
ggctcctttgtggtggtgcgccatgccgccctcatgacctccaccctgctgtccaaggtgctggccgcccccaacatcaagctgttgagcgccaccgccgccgaggacctggtggtgaagcaggacgagaagaacggaagtacgtggcgggtgcagtgaccaactggacgctggtgtctctcaaccacgacacccagatgtgcatggaccccaatgtgatcgagtccaaggtcatgatctcctcctgcggccacgacggccccatgggcgccgccggcgtgaagcgcctcatgcgcctgggcatggtggagaaggtgccgggcatgggcgcccttgatatgaacaccgccgaggactctgtggtggaccgcacccgcgaggtggtgcccggcatggtcatctgcggtatggaggtggctgagctggacggctgcccccgcatgggccccacctttggcgctatgtacatgtccggcctcaaggcttgcccagtcgcgctcaactccctgcgccggcagcag

SEQ ID NO: 9003 - DNA, 369 bp, Chlorella sorokiniana
  Clone ID: LIB3602-111-Q1-K1-D6
ggagagaaaaaaaaaaaaaaaaaaaaaaaaaaaaaaaaaaaaaaacccatcctataaaaaaatataaaaaataacaaacacaaacatgtcgagagcaaaattttaaaaaaagagggggggggggcccttttaaatgacaacctcctcacccttccttccaacaaaacactttttttttagtaactcaaaaatcaaataccctgccccccttttaccaccttgtgaactagaaaaaaccttcgatccccaatttaattcccttatcagcaaatcctcttttcccaatgtgacgtattattctaaaagcccattaccaaacccttttccaaaaattacccccacctaaatggaaaatgtaaccctcccttt

SEQ ID NO: 9004 - DNA, 476 bp, Chlorella sorokiniana
  unsure (1)..(476): unsure at all n locations; Clone ID: LIB3602-111-Q1-K1-D7
ccagcaccacctcccccacctggcagaagtcgatcgccacctcggcgcccgcccgccaggagggtgacaactccaccttcatcgaccnaagttcgccagcgctgccgccgacgagctgaagcagatccgggagaagctggaggagaagtaccaggctgtgcgcccctgagcgcgcctgacaggctgagccctgcgatgctcaaacgctccgagccggcggcgcgccgccgccggccggcggctgccccgcctcgcggcgccggtgccggccgcagccgcagcccaggcaccgctgtacgctgcccctcgccaacccaaaggaaccctactttttagccttcttctttgcaagccttcaacccgaccccaaaccaaccagccggccttgacatttggttagcatgtaccacgctccctgacctccagagtgcattctattcctggttccccctttcatcagcggcgcgggggaagcc

SEQ ID NO: 9005 - DNA, 502 bp, Chlorella sorokiniana
  Clone ID: LIB3602-111-Q1-K1-D8
gaaaagctgggagaaggtgtggcaggccacgctcaacacgtgcacccttgaaggcagctgcaccatccgcctggcctaggcccagcggttgggtgtgaaggaaccgcacatcaatctcagccaagcaagctacttgcctcgatacattctgcccccctgctgcggatgctccgctgggcgtccccctgtgcgcacatttgggccgcccctttcggcaggttttgcaccacactgacacacacttgacacttgaccctcttccgtgctttgccatgctgcgggcgctgccattcagcgcccctatcgcttttggtcgctgtattcctgcacgtgcccagcttctgcatccatgtgcacgtgttgattccgcacaccttgctgagctcgcaacgctgctgcagttgccccaaaccaacccaaccagccatcctcaaccttttgcacagcccatgcatggccgcagcttgaatagcatgctttctatgcctttattgatagcccg

SEQ ID NO: 9006 - DNA, 340 bp, Chlorella sorokiniana
  Clone ID: LIB3602-111-Q1-K1-D9
gttgcgcccctctggcccacccctccagtttactggtacactttgcctcttcggcagcgcacgatatgccgctgcctttgccccttgatgcctgcatggcccctctgcttgtgcacaggtttgatatagtgcacacagctgaagcatcacagcttgatgcatgcatgtaacctgaccaacacataaaaaaaaaaaaaaaaacaaacataaaaaaaaaaaaaaggccacactgggctggcgctctacacttacccaccttacgttcccaggcatgccacgtactctgcttttctaaagtcatataaattgaatccactggcccaatgtaacaaccgggaaa

SEQ ID NO: 9007 - DNA, 494 bp, Chlorella sorokiniana
  Clone ID: LIB3602-111-Q1-K1-E1
cgattcccgtcaccacgcgtcgggctgtggacgccttccggcgccggcggaagctggacatgagcggcgtggtgccggtgctggacgtgaaggtggcggacacgactggagcaggggacgccttcctggcaggcttcctgttctacctgctgtgagcggcgggctggagtcgctggtggccgaccccggcaagctgcggcgcggagtggagtttgcgaccgcctgcggcgccttcacctgcaccaagcccggggccattgacgcgcagccgactgcggcagatgcagaggccctgctggctgacaagggccgcgtggggcagtgaagcagtgtgccgcgacaaaatgcccacgcagtgcagagcagcactctgcacggctgaggcagcggcagcgtgctgcccagcgcagcaagcaggtcttgggagctgcctgccctgttgcaaaaccaaaggctccctgcctgccctgtacagaataaagaatggaatgaat

SEQ ID NO: 9008 - DNA, 324 bp, Chlorella sorokiniana
  Clone ID: LIB3602-111-Q1-K1-E10
gcgggggaaaataaaaaaaaaaaaacatacaacatataaaaaaacaaaaaacgaacccgcaattttatacaaaaaactggcctccccctcttggagatcctatcttaaatgcgcgtgtgtgcccatctatatctttattattcatgccctaaattaaaatcccttcccccttattttaaaaagtcgcaactataaaaaccctccttttcaacacttatattcctaccacccacctcccttacaccattttcttttatacccaaaaggcccacacatatccccctttccaacatttttccaactctaacttctaattcaaccccc

SEQ ID NO: 9009 - DNA, 453 bp, Chlorella sorokiniana
  Clone ID: LIB3602-111-Q1-K1-E11
atcttcgctgacggcggcctgaactacctgggcaactccggcctggtgcacgcccagtccatcgtggccaccctggtggtccaggtgctgctgatgggcgccgtggagatctaccgcgccaacggcgagggcccaacggcttcggcgagggccaggacaccctgtaccccggcggcgccttcgaccccctgggcctggctgacgaccccgacaccctggctgagctgaaggtcaaggagatcaagaacggccgcctggccatgctctccatgctgggcttcttcgtgcaggccatcgtgaccggcaagggccccctggacaaccttctgcagcatttggaggagcccggggagttcaacttctacgccctgtacgccaactccctggcgtaagcagcttgtttggagcacctgcggcggccgaggcggcggcgctgagctggcgcaaagcgcg

SEQ ID NO: 9010 - DNA, 369 bp, Chlorella sorokiniana
  unsure (1)..(369): unsure at all n locations; Clone ID: LIB3602-111-Q1-K1-E12
actgccgctgttgccgccgccaccgccactgtatgccaaccggctttcctgtatgaatagctctgattgcccgctctttctgccctggcggcttgggcagtcaggggctgagggagccatgcgctgctaagcttgccacccacccctgcttccccgccgccgccgttccttgcgctactttcgtgtccccgctctctctccctgctgcctcctgcctctcccctgccaacccctctagccagccgcccgtattgaggccgctggccgcacgctgtgtgtgcacccctttgccgaccgttgaccgcatcacatctctttgctctgcagcagccctccagctgctgctgtgtgaccggaaacccgcgacnt

SEQ ID NO: 9011 - DNA, 494 bp, Chlorella sorokiniana
  Clone ID: LIB3602-111-Q1-K1-E2
gtcgcagggcgacggcgtcaagtcgatcatcatccccggcattgtgggcataatcctgggcctggggctgggcatgctcatcttctgcggcggccgcaccatcaagagcctcaagtggttcttcatcatctcctgcggcctgctgctcatcattgctgccggactggtggcccagggcgttgtgttcttcacctccgccggtctatttggcaccaccttcccctacgagtaccgcccctggtacaacaccatcctgtggaacacctcgggctgctgcgacatgtacaacaaccaattctggtccatgatgcgcgcgctgtttggctacacggaccagcccacgggcctcaacctgatgtactacctgctgtactgggctattgtgctgagcatcacgatctggaagtggtacaccggcaccctcaccgaccgccgccaggcccagattgacgacctcaagtcgtttgcagtccacctgggagagcgcatggacg

SEQ ID NO: 9012 - DNA, 471 bp, Chlorella sorokiniana
  Clone ID: LIB3602-111-Q1-K1-E3
agcagcagttagcagccatgcaggccaccttcgccggctctaagctgcagcttggcgcgcgcgtcagccgcaagagcgtgaacaccagcgtggtggcctccagcggcaagaagatcgacatcagcaagcagggcctgactccatccagaatgagaccgtgaagctcaacctgatgggcaagtccaagaccatggagagcaaggactgggtggacccccagggccgcaagggcaagggctacggcgtgtaccgcttcgccaacaagtacggcgccaacgtggacggctacagcccgatctacacccccgacacctggtccgagtctggcgactcttacaagctgggcaccaagggccttattgcttgggccggcctgattgtggtgctgctgggcgtgggcatcaacctggtgatctccacctctgccctgggccagtaaatggcgacgccccccgcgtcggcagcagcagc

SEQ ID NO: 9013 - DNA, 235 bp, Chlorella sorokiniana
  Clone ID: LIB3602-111-Q1-K1-E4
ggccgctgagcggacgcccgcaaggcatgatggaacgcattttattcgccacgcaaacatgcacgccccttctgagcccccatgcacgggttgattcaatgcgcacaccgcatctgtgctgctatcccctgaccgctagcgctctgccgcttgtaacaccagactaagccaaaaaaaaaaaaacaaaaacatggagagcaaagacagaaaaaaacaaaaaaaaccaaaaaaacag

SEQ ID NO: 9014 - DNA, 496 bp, Chlorella sorokiniana
  Clone ID: LIB3602-111-Q1-K1-E5
cggacgcgtgggcgtcaacacgcagcagagcttcgaggcgctgaaccagcgagcagtggcggtggtggtggaccccattcagtcggtgagagggcaaggtggtcattgacgccttccgctgcatcagcccgcaactgatgcttgggcaggagccgcggcagacgacatcgaatgtgggccacctcaacaagccgtccatccaggcactgatccacggcctgaaccggcactactacagcctggccatcaactaccgcaagacgccgctggaggagcgcatgctgggcaacctgcagaagcacacgtggaccaagggcctgagcctgcgcaattttgaggaccacgccaaggccaacgccaagctggtggaggagatcagggagctgtccagcaagtacgaccaggctgtggttgaggaggaggcaatcccgctggaccgccgtgtggtggccaaggcaggcaagatggacgccaagaagcggctggagggtggcgt

SEQ ID NO: 9015 - DNA, 339 bp, Chlorella sorokiniana
  unsure (1)..(339): unsure at all n locations; Clone ID: LIB3602-111-Q1-K1-E6
ccgattccgtcgcccacctcgaccgtgaggcaccacctcggggcgagagcctcctctgcagtcagttcccggcgccaagactgggtgagactggcttatcctacctgccacatactgatgaacgtgagccgcttgtaacacggtaatgccaactgttgcaccacggccgtgacgccggagccgccaatttcagggtctgccgttgggcgtgtccgtcatgcctacatgtgtgggttctaagatgtacaacatctgaaaaaaaannnnnnnnnnnnngggcgcgtctaagaccagcttactcgcgtgcatgcactcatactctttataggcacctaaatc

SEQ ID NO: 9016 - DNA, 516 bp, Chlorella sorokiniana
  unsure (1)..(516): unsure at all n locations; Clone ID: LIB3602-111-Q1-K1-E7
tgctgacccccacctcagccatcatgggtgccggcctgggcaaggagtgcgcgctcatcactgacggacgcttcagcggcggttccgggggctttgtgatcggccacgtgtgccccgaggcgcangagggtggccccatcgccctggtgcagaatggcgacaccatccggatagacgcggagacgcggtcgatggacatcctgaacgtcgacgacgcggagctgcagcgcaggcgtgccgcctggacggcgccgccgctcaaggccaccagcggcaccctgtacaagtacatcaagaacgtggcccccgcctccatgggctgcgtcaccgacgcgtgaccctgcagctgccactaagcagcagctgcacacgggcggcagcccaagtcctcaacccggtcccggctggcgcgagcggcgggccggcattgcggccccgcacgcggcgacagcttgggccggtgccgcggcggcgtcactgtgctgccgtggctgagatgcaatgaatactgattat

SEQ ID NO: 9017 - DNA, 426 bp, Chlorella sorokiniana
  Clone ID: LIB3602-111-Q1-K1-E9
caggccgccttgccacccgatgcttccaacatatgtagcggtatggccgtgcctgccgtggctgctaggactgggataatgttttggacagcagcccactgccaggcgtccaggccatgcccatcggcagccttgcgggcagcagcccagcatgtcagccccctttgaacaatggttcgatagagatcccctgccctgtttcataattgccatcccctagcgctgtacttccgctgccacaaattgattgctgcttgggcgccccatacatacccacatgtcatacatgcgtgctgaacgcccctctgctccagctccgtctgtttcaatagaccgtttctgcaccaggcccctgctttaaggcccgcctgagctccctggctaaactggaaaaaagaaaatgttgtgtaaccagttgcatgtgag

SEQ ID NO: 9018 - DNA, 371 bp, Chlorella sorokiniana
  Clone ID: LIB3602-111-Q1-K1-F10
cttgttcgtgcagggcctggtgaccggcaagtcccccctggaaaacctggctgaccaccttgctgagccgtctgtgaacagtaagcggggaaaatgttggctgtgaattgccggggtgatccaataaaattggcgacgaagagacacttcgcatcaattagccgggttctctttgctcattgacaactcactgttccacctttgccctccccctgcgtattcttgccacagacggcttcgcgtccgccaccaaggtgagggttggggctttggagtgttggtaggaagtcgactgccagccagggtgcaacgacctcgcgaaaaggctcaagtactcactgctgtaattccaccccctgctttaacccctg

SEQ ID NO: 9019 - DNA, 81 bp, Chlorella sorokiniana
  Clone ID: LIB3602-111-Q1-K1-F12
aaagaaaaaaaaaaaaaaaaaaaaaaaaaaaaaaaaaaaaaaaaaaaaaaaaaaaaaaaaaaaaaaaaaaaaaaaaaaaaa

SEQ ID NO: 9020 - DNA, 466 bp, Chlorella sorokiniana
  Clone ID: LIB3602-111-Q1-K1-F2
aaagagaaaaaaaaaaaaaaaaaaaaaaaaaaaaaaaaaaaaaaaaaaaaaaaaaaaaaaaaaaaaaaaggggcggccgttttaagggggcgacgctatatacacccaagttcacggccccatcttttctatagtgtactttaatttaatgcaccgtccatcaatttacatcgccgtgactggaaaacccctggcctggccaaacttaatcgtttcccaactaattcccctttcaccacatccccttttacccaataggcccaatccgaacgacctccccaccaattgcccttcctaaatgttgaacggtccgcaccctgaatgggcccctcactctcgcgggtttttaagctcacccgcagtgtgacctactcacttgccaaccccttaactccccatccttttactgccttctctttttttttcctacctttcctttgtttcccccttcaactttttacccggg

SEQ ID NO: 9021 - DNA, 397 bp, Chlorella sorokiniana
  Clone ID: LIB3602-111-Q1-K1-F3
gaaaaaaaaaaaaaaaaaaaaaaaaaaaaaaaaaaaaaaaataaaaaaaaaaaaaaaaaaaatttataaaaaaaaaaaaataaaaaattaaggggaagaaatttataaaaagaggagaaaggtttaaaattaaataataaattaattaatttggggggtgggctttttataggatctaatgtaattattggtgttttgaaaatgatattttttttttattggtttccaaaataaaatttaatggactaaattttaaaatctttaatttttgaaaatcttttttttttacaaaatttaatagttttaaaaaaaattctttttttccattttttatattaagaaaaagggccctcttttttttttttttaaaatatttttacattttatttgtaaatgg

SEQ ID NO: 9022 - DNA, 489 bp, Chlorella sorokiniana
  Clone ID: LIB3602-111-Q1-K1-F4
cggacgcgtgggcggcgctggtggcgctgctggagttccacaccgccaccggctcggttatcagcggcatgcaaaaggcgcagtgtgcggcgctctacaagccgctgttccccgacattgtggcaatcgtcagggcgtgcctggagcagcacgggctgctgccgcctgacgccggcaccggccgggctgtggcagcagcggcagcagcaccgcatacggcggcttgacctttgggcccaacctgtgcctgtgtggcagggtggcagcaagcctgagaggtggtaaccacaccctcactgccacagctcctgccctgccccaacccggggtgctgccttgttcagcaaggggcttggtttcttttgcttccattcgcttccattttcttcaaccctgtcagccttccgtcagcctttcattggatctccattctacgctccatccagccccagcccgacacttgcgctcttcaactgcccttcaaccagg

SEQ ID NO: 9023 - DNA, 242 bp, Chlorella sorokiniana
  Clone ID: LIB3602-111-Q1-K1-F5
gacgtgcccgcagctgcccctgtgcccacctgtgcgcactttaattgagcgtgcctgcccgctcctgtcccgctctcgctcccagtccggtcgcgtgcctgtgtcggtgttgtgttgaatgtttagtggaaaacaactgccgcgcccctagccctttcttcctgtttctctgtgcatgcctgcctgaaacgaactctttatgccttttgctgtgccacaatcgggtaatcagcctctggagc

SEQ ID NO: 9024 - DNA, 487 bp, Chlorella sorokiniana
  Clone ID: LIB3602-111-Q1-K1-F6
cggcgtacgagggccctcgcgatgaggcaggcatcatcaaatacctgaagaagcaggtcctgcccgccgccaccaagctcgattcggtggatgctgtggaagccggcaagaaggattcacaggctctggtggtggcttccttgaaaaggcaaagggcgcagactttgaggcattcaccgaggtggccgacgcgctgaagaacgatatcgactttgcctacgtgcacgatgccaagctggtgaaggactgcgacggctgcaagagccctttcgtcatcatgtacaagcagggcgagagcgagagcccgcagtacgatggcacgttcagcacctctgccctaagggcttgggctgccaagaccagcattccccttgtcattcgccccagcactccctctggccagaagcagctgcgcaagctgggccagtcgccacgcctggtggtggccgcagacaacgagtcgcctgagctgattgagcagctgcag

SEQ ID NO: 9025 - DNA, 403 bp, Chlorella sorokiniana
  unsure (1)..(403): unsure at all n locations; Clone ID: LIB3602-111-Q1-K1-F7
ggcttgacgcggcggcagcggctgaattggccccgccgctgcggcaccggtgcccgcctgcgacgccagctagccaagaaggcgtcgagttcaacaaatgaagtctggcttgccgggccaccccggcgcgtgccgccacccaacacctgctgtaccctcaccccatactgtcttccctgtttcctgtgtgccgcttgacgctgctctcgtgggctacgcttgctgctgacccctgcctgcttcccttccactctttgctgcgaatgcccttgatgccttcccagtctgcctcccaagaaccccctccgtgctttacttgtaccaggatgtaaacgtagtcgggcaaaanaaaaaaaaaaaaaaaaaaaaaaaaaaaatagaaaaaaaaaaaaaattagaatat

SEQ ID NO: 9026 - DNA, 358 bp, Chlorella sorokiniana
  Clone ID: LIB3602-111-Q1-K1-F8
atgcccgtgccctgcatcgtgtccagctcttcctatcctgccggctccccgctggcccatctgattttcacccctgtggttttgcgccgggcgtcactgctgtcgcagaaccctgccgtgccatgccgatttcagaacaagcaccatgcaccctccatctcccctttgccactgatcctctgctccctctgctgctttgcacccatttcttttgcacgcacgtgggccccatcccagtgcccgatcatgatccaaggctgttctgcttgcacacaaatatacaaagctttccggatggaatgcgtttttcctctcaatgcctggtgttgatgcacccccttgtaacaaatgagccaga

SEQ ID NO: 9027 - DNA, 400 bp, Chlorella sorokiniana
  Clone ID: LIB3602-111-Q1-K1-F9
atgggctagcaataaaataacgccctgcttttccatatcctaacgcctaaattaaaaacccatatcatacatccctgatgtgcttttggtgccggcatcactaaagttgcggactggtgcttgtactttccaccctctctatacatacccttgagcatttcatctgctctttaaccctaatattttagcttatctctttataaaaacccatatatttttcacacaaaaaaaccccatcccacagcctaaataataatccaaaactaaaactgcttgtacacaaatatacaaagcttgcctgattaaaagctttaatcctatcaatgcctgtgttaattcaccccttttttataaatgaaccaaaaaaaaatacataccttttatttttaaactttgcccc

SEQ ID NO: 9028 - DNA, 522 bp, Chlorella sorokiniana
  unsure (1)..(522): unsure at all n locations; Clone ID: LIB3602-111-Q1-K1-G1
gaggcgccgaggggagagcacgatgcaaatcttcgtgaagaccctcacgggcaagaccatcaccctcgaggtggagtcttcggacacgagcgagaatgtgaaggccaagatccaggacaaggagggcatcccccctgaccagcagcgcctgatcttcgccggcaagcagctggaggacggccgcaccctggcagactacaacatccagaaggagtcgacgctgcacctggtgctgcgcctgcgcggcggcatcattgagccgtccctgcagatcctggcccgcaagtacaaccaggacaagatgatctgccgcaagtgctacgcccgcctgcacccccgcgctgtgaactgccgcaagaagaagtgcggccacacctcgcagctgcgccccaagaagaaactcaagtaaactactcgcttcggcacgagcggaagcggcatgagcggcagcaaccgctgccccccccccgccccgccagccgggatgccatgacagcaccngctgctcagctgctgatgtgc

SEQ ID NO: 9029 - DNA, 239 bp, Chlorella sorokiniana
  Clone ID: LIB3602-111-Q1-K1-G10
aaagaaaaaaaaaaaaaaaaaaaaaaaagggcaaacaatataaaaaaaaccaaaataacatacaacatacgtccgacgttatagctgttctatgcttacatccacatgcaggccactggccatctttttactacttcactataatttaaatcccttgcccttcctttctcaacctcttaactggaaaaccccttttggtccccaacttaattgccttaaaggccatcccctttctccct

SEQ ID NO: 9030 - DNA, 516 bp, Chlorella sorokiniana
  Clone ID: LIB3602-111-Q1-K1-G11
caacgaccccaccatcgagcgcatcatcacgccacgcatcgccctcaccaccgcggagtacctggcatacgagtgcggcatgcacgtgctggtcatcctcacggacatgtcctcatatgccgatgcgctgcgcgaggtgtctgctgcgcgtgaggaggtgcccggccgccgcggctaccccggctacatgtacaccgatctggccaccatctacgagcgcgcagggcgcattgaggggcgcaagggctccatcacgcagctgcccattctgactatgcccaacgacgacatcacacaccccatccccgacctgaccggctacatcacggagggccaggtgtatgtggaccgccagctgcacaaccgccaggtctacccgcccatcaacgtgctgccctcgctgtcgcgcctcatgaagtctgccattggcgagggcatgacgcgcgccgaccactcggaggtgtccaaccagctgtacgccaactacgccatcggcaaagacgtgcagggcatgaa

SEQ ID NO: 9031 - DNA, 483 bp, Chlorella sorokiniana
  Clone ID: LIB3602-111-Q1-K1-G12
cgatattcagctcctacatttcgcggcgattcatgggcggctgcgcggtcctgctgcccatagtgctgacggtgtggatcatatgggcgctgctggacttcatcgacggcttcttctccccgctgtacaactacctgtttggcttccacgtctttggcctgggcttcctcacaaccctgctgtttgtcttcggcgtgggagtgttcacgtcaacatggctgggcagcctcacaatcggcacgggtgaatacatcatcaagcgcgtgccgctggtgcagcacatttactcggcagccaagcaggtcagcgcagcagtgtccccggacaacgaggcagccaacagcttccgagagtgcgtgatcattcggcatccgcgccgcgacggcgagtatgccttcgcattcatcacggggcagactgtgctgcagagcgacgagggcgagaccgtgctgtactgctgctacgtgcccaccaaccatgtgt

SEQ ID NO: 9032 - DNA, 427 bp, Chlorella sorokiniana
  Clone ID: LIB3602-111-Q1-K1-G2
agcagacatctgagcaaccatgggtaaggtgcacggctcccttgctcgtgccggtaaggtgcgcggccagacgcccaaggtgcccaaggaggagaaggcgaagacccccaagggccgcgcccgcaagcggctgcagtacaaccgccgcttcgtgaacgtggtggtgggcttcggcaagaagcgcggccccaacagccagtaagctgactgcggcgccagcagcagcggcaggcatgtgctgaacgcacggagcgcaagcgcgtcccgcgcacagccgccaccgaagcggcctgccagcgtcgacggcagcgaggcagcaaggcgtggcctggcatgctagcagcgcgtactgcgcgccacggcgctagcagccgcaccctggaacagcatcagcagtaattcagcagcccacctgcatgccgaacgc

SEQ ID NO: 9033 - DNA, 485 bp, Chlorella sorokiniana
  Clone ID: LIB3602-111-Q1-K1-G4
cggcagaaggctcggcccatcaccttacgggacagcaaaggcggacgagcaacatggggcggcggccggcgcggtgctaccgccagaggaggggcaagccctaccccaagtcgcgcttctgccgcggcgtgcccgacccaagatccgcatttatgatgtgggcgccaagaaggcgggcgtggacttcttccctcactgcgtccacctggtcagctgggagaaggagaacatctcgtccgaggcgctggaggcggcccgcatcgcggccaacaagtacatggtgaagaacgcgggcaaggacgccttccacctgcgcgtccgtgtgcaccccttccacgtgctgcgcatcaacaagatgctttcgtgcgccggcgcagacaggctgcagacaggcatgcgcggtgcgttcggcaagccatttggtgtgtgcgcgcgcgtgggcatcggtcagatcctgctgtccatccgctgcaaggacacgcacg

SEQ ID NO: 9034 - DNA, 84 bp, Chlorella sorokiniana
  Clone ID: LIB3602-111-Q1-K1-G5
ggcagggagcagtaagcggctcgaagcctttggcggcagcggttgtcagcccatgtcgccctgacgcgccgcgcagcagcggcg

SEQ ID NO: 9035 - DNA, 502 bp, Chlorella sorokiniana
  Clone ID: LIB3602-111-Q1-K1-G6
gtaggtggcgcgttggaatggccaattcgtacacgatggtgaacgtcccgaagaccaagaaggccttctgcaagggcaaggagtgccgcgggcacaccatgcacaaggtcactcagtacaagaccggcaaggcgtcctctacgcgcagggcaagcggcgttacgaccgcaagcagtccggctatggtggccagaccaagcccgtgttccacaagaaggccaagaccaccaagaagattgtgctgcgtctggcctgcaccgtgtgcaaggcccagcacatgcacgccatcaagcgctgcaagcacttcgagatcggcggcgacaagaaggtcaaggggctatactagtaaaaaaaaggagagcggcaagcggagagcatgaccgagaaatggaggcagcggcgcccgctcaccctgggcggcctgctccccgcccggcgcctcgctttggccggctcttgccactcgtacgccttcctgtccatgcccttgtgcttcctgaac

SEQ ID NO: 9036 - DNA, 502 bp, Chlorella sorokiniana
  unsure (1)..(502): unsure at all n locations; Clone ID: LIB3602-111-Q1-K1-G7
gtcatcaactcaccctcctcaccgggagagtttggcaagtggctggcatgcaaggccaacggcgtgacgcccaccaagcccaacccggagcttgcggcggcagtcgcggcggcagcggcgggtggcaagtcggccatccttgtgtgcgaggcgggcggcacgactgagccctccatcaacttccccaccggcaaggccagctgcagcctgaaggcggcttggaaggtgctcaccagcagcggccttggtgccagccaggtcaagcacctggcgggcggcgtgtatggttatgcgaacagcggcctgcccatggtcggcgagtacgatggctcgggagcgggacggacgccggctgtggcagagaagccaagcggccagtactataacaagtaaacccagtttatacgatccagttgcgccacaaagccacttgcgacgatgatcagggcccactgccttntgccctgcttcgctcggtctggccgctcgtccgcggcgagcg

SEQ ID NO: 9037 - DNA, 76 bp, Chlorella sorokiniana
  Clone ID: LIB3602-111-Q1-K1-G8
aaaaaaaaaaaaaaaaaaaaaaaaaaaaaaaaaaaaaaaaaaaaaaaaaaaaaaaaaaaaaaaaaaaaaaaaaaaa

SEQ ID NO: 9038 - DNA, 494 bp, Chlorella sorokiniana
  Clone ID: LIB3602-111-Q1-K1-G9
gcggtgctcatcatgttccgcgaggcccttgaggccgcggtggtggtgtcggtgctgctgcagctggtggagaagatgcggatgcgggagctgaaaaagcacgtgtggatcggcgcgctgacgggcgtggccatctcgattgtgattggcgtggtgttcatcgtgctcttctacgtggccggcagcaaaattttcacgggcaattcacagtccattttcaagggcgtggtgtcctggctggcatcgctgctcatcacagtggtggccttccacatgctcaagttctacaatgtggagcgcaagtggcggcgaaagctggagggcgccatggatgccgaccgtgcgaatgcggccaagtcctacaagtggtccatcctgctgctggcgctgtcggccacgctgcgcgagggcatcgagtccgtgctcttcctcaccggcgtgtcgcagggcgacggcgtcaagtcgatcatcatccccggcattgggggcataat

SEQ ID NO: 9039 - DNA, 386 bp, Chlorella sorokiniana
  unsure (1)..(386): unsure at all n locations; Clone ID: LIB3602-111-Q1-K1-H1
ggcagcacctccagcagcagcaccaccaccaccaccaacagcaggaggagcaggagcaacagcagggccggcgtcggcgcctgctggcggagccgcgggtgcaagcaggcggccgcgccgcgtgtgcgccgcagaggctgcgggagcactgagcacctgcgccgctgcgggcgctgccaggctgtaaggtactgcagcgttgactgtcaacgactaagttggcccagccacaaagacgactgcgagcggtgggctgccgagcgcgagaggcagtgatatagtttgcaccgcagttgttcttactggtgccccatgagcaaccgccgaccatgtctcatcttcataacacatgcatcattggtcatgtcacaagcaagcncnnnnna

SEQ ID NO: 9040 - DNA, 340 bp, Chlorella sorokiniana
  Clone ID: LIB3602-111-Q1-K1-H10
gaagataaaaaaaaaataaaaaaccaatccacaacataaaaaaaaaaaaaaaataataaaaaaaataacaaaaaaaaaaaaaaaaaataaggagaaaaaaataaaaaaagggggggggttgtaatgtattcaattttccgtcacattttttctcacactgtcctttttttttaggtgaacataattacaatccactgacacgactactaaaactatataattaaaaaaaacaagctttaaaacaatttaatacacttgcttaatatctcttttaacttctttgatttaaaaacaataatgacacacctatatgtctttccaaacaattgtccaatttaat

SEQ ID NO: 9041 - DNA, 493 bp, Chlorella sorokiniana
  unsure (1)..(493): unsure at all n locations; Clone ID: LIB3602-111-Q1-K1-H11
gcgggactggcggctggctggttgaggtggtgggagggggagcccgctccttcgcccgacacgatgcagacttcttagtcacgcacgggaccgccagtgttgagggcgtggtgctgctgctgccggaccatttggggatgccggccgactcttcccacccgggcgggccatgtgcagggtgcaggcggggctgctgcccacccacattgagtggctgcgggaggagcacatgagggaggtatcagctgcgccatccatgcagaagctggataggtgaaggtgcatactgcgcatgctatgcaatactgcaccgcanatgggatggccgcgtgggtgctcaccacggccgtgatcagcgatcgaagccatcagtttcctagtctatcacacatgcctgcaggtttgaccacatctacggcatcgctcgcttggatggcagcaaggcacgccgcatggacatcatcatctgccctcatgatgaatgggcctttgc

SEQ ID NO: 9042 - DNA, 332 bp, Chlorella sorokiniana
  unsure (1)..(332): unsure at all n locations; Clone ID: LIB3602-111-Q1-K1-H12
gcacctccttgtttcttgccctgcaccagatctccaagcaacgatgcatgctgcccagctccaggctcgcgccacccggcccgccgtgggtcgccgcaccaccgtgcgcgtgcaggctcatcangccgcgccccgcgctctaggcccccaagtccccaagcagtttgcttgctggccctggctagccgccttgcttgccgtgaaccctggtgactggcgcccgcccgccaacagctgctgaaggcccgcacggaaaatgaagagccgtggtgtgccgccagcataccccaacctccaagatctgctctcacaggacagcgccaaagaactga

SEQ ID NO: 9043 - DNA, 491 bp, Chlorella sorokiniana
  Clone ID: LIB3602-111-Q1-K1-H2
cgggcgcgtgggattccagcggagcagggagcaagcgccatggctcccgcagacaagagcaaggccgccaaggccgccaaggcggtcgagaagagctccttcaagaagacgaagaagccccgctacagcgtggtgttcaccgccccaagaccctcgttcgcagccgggaccccaagttcccccgcgtcagcgcgccccgccaggcccgcctggatgagcactccgtgatcaagtaccccctgaccactgagtccgccatgaagaagattgaggacaacaacaccctggtcttcatcgtggacgtgcgcgccgacaagaaggcgatcaagaaggctgtggcccgcctgtacgacatccagaccaagaagatcaacaccctcatccggcccgacggccagaagaaggcgtacgtgcggctgaccgccgactacgatgcgctggatgtggccaacaagattggcgtgatctaaagcgtgcggctggagcggggc

SEQ ID NO: 9044 - DNA, 499 bp, Chlorella sorokiniana
  Clone ID: LIB3602-111-Q1-K1-H3
ggttggcagtgtgaagccttgcagcaggccagcgcagcgcactcgcacaggcagctccgcgacggcctgggcgcaggggtgcccctgggaccatggcggcctcggatcaggacgatgcattcaaggacgccaaggtcatgacgctgggggaggcggggctggtgctggaggatgtgtcgcagcggctccagcggcgagaccccgactggcagcccaacgccatgatgctcaaggcggtcgagtacgcccagaggttctcgggcaacaagaaccgcgacacgctgcaaaagatccgggagctgctggccaaccggcggctgtcggagatggagctgggcctggtggccagcctgtccatcgagacggcggacgaggccaagaagctggtgccctcgctggcggcacccaccgaggcacgggagcagctgaacgacgaggagctggaggcgatgctcaaggagcttgccacgtaccgcgagtttgagtgaacatgcccctg

SEQ ID NO: 9045 - DNA, 468 bp, Chlorella sorokiniana
  Clone ID: LIB3602-111-Q1-K1-H4
ggcgcgtgccgatgatgccacagccaaggacactgtgtattacaatcgagggtttgagttcgtcaaccttggtgtgctggcgtacctgggggacgacaaggcgctcacccaaatcgagctgcctggcacaagtattccctcacgggcgcagctgggcaactctgatctacaaatcagtgtacattactaagcaggtgtgcttccgcaaccgcgtcctcatcctatttgactggctcaaggcccaggtcttcggccgtgacctgtccaactactgatggcaagccacagtggaagccctgcataacaacatgcagggcagaacgactgtcaagccgagcgcggatagactcccgatcctcatcccaacctccaacaacagaatgtgcgctcccgtcctgcttttcaaccaaccctgcttgcaatcaaccttccctctatcaacccctgcccacatgccagccgttctgc

SEQ ID NO: 9046 - DNA, 400 bp, Chlorella sorokiniana
  Clone ID: LIB3602-111-Q1-K1-H5
gcaactggcttgcatgcatatacacgagcttgaacgttatgcatccacagcactgcccaccctcaccgccgatccgacactcgtgcggggagagccccctctacatggggcggggtacctccaaacactaacataacacaaccaactgacactactaaacaccacgcactggaacacactcatctgagccaagctcccttggacgccagcctacatacaacctcctgaattgcacatcggtagctagtgctacactcgccgttaccgcaccagccctagcaccaacctctggtctatcgaataacttagactaatgccacctctattacttgatgatcgcttgagatgatacaccaaccactcatgatgctatccttaccatatatctgtttttccacta

SEQ ID NO: 9047 - DNA, 287 bp, Chlorella sorokiniana
  unsure (1)..(287): unsure at all n locations; Clone ID: LIB3602-111-Q1-K1-H6
gcgggcatatggcttggcagctggccgcggccggcatccgcgccacgctcattgccgactcggctgtgtttgccatgatggcgcgtgtgaacaatgtggtggcacacggcgcaggccctnctttcaaatggcggttcatggcccccgtgggcattcccatcgcggccatggcagccaagccccactcggggccgtttgtggtgcttggccgcatttacaagcttgtgacgctttttccggacaacccaaccgtcaactttaacgactttaaggaccccaaggacctt

SEQ ID NO: 9048 - DNA, 520 bp, Chlorella sorokiniana
  unsure (1)..(520): unsure at all n locations; Clone ID: LIB3602-111-Q1-K1-H7
gccacgcgttcgaccacgcgtcctaaaaaaaaaaaaaaaaaaaaaaaaaaaatataaaaattttaaaataaaaaaaaaaaaaataatggagaaaaaaaattataaaaggaggagggggaaaaatattaaaaaataaaaaatttttnaaaaaataaaaaatttaaatgggtgggggtttttttaaaaatataaatttttgtagcttttttttgtaaaatatttttttttttttttcacaaataaaattttaaacggtgggctttttataaaaaaaatgtaatgaaaaaaattgcactggaaaaaatattaattgtgtttaataaaataccttttttcatgttttatgaaataaaaaaaaaattttacttattttcttttttaaaaattttactccctttatttgaataattgccccccttttttatcgtttatttaatggttgggttttgtttttttttttaccataatttgttattttttttttttttgcgatcttttttagctttttgttttttttttt

SEQ ID NO: 9049 - DNA, 224 bp, Chlorella sorokiniana
  Clone ID: LIB3602-111-Q1-K1-H8
gcggcgagtgggtgcaggcttgcaagctgttgctggcgggtgcagctggcggcgacggcgcagctgggcgtttccttggcggcttcggtgggcttttcctgttcttgactgctggcgtcagccgctgagttggcacttgcacaggtggcggctggcgcctcttgaccttgcatatgatttgttgtttctcgggatgccatgcgttggtgtaaagcgctcagaac

SEQ ID NO: 9050 - DNA, 504 bp, Chlorella sorokiniana
  Clone ID: LIB3602-111-Q1-K1-H9
gaagattgtgggcaagggcggccagcggtggtacaagaacatcggcctgggcttccgcacccccaaggaggccattgagggcaactggattgaccacaagtgccccttcaccggcaatgtcagcatccgcggccgcatcctgtcgggcaaggtgaagagcaccaagatgaaccgcacgattgtggtgcgccgcgactacctgcactacatcaagaagtaccagcggtacgagaagcgccacaccaacatctcggcgcacatctcgccctgcttccgctgccacgagggcgacaccgtggtcatcggccagtgccggcccctgtccaagacggtgcgcttcaacgtgctgcgcgtcatccccgcgggctctggcgccaagaagggcttcggctccttctaagcaggctggactaagggcctcttgccttgctggctgaagccctcgacagcagcagcagcagccccagcacggcatgcaagcgctgcagacgccctgctgccctg

SEQ ID NO: 9051 - DNA, 287 bp, Chlorella sorokiniana
  Clone ID: LIB3602-117-Q1-K1-A10
gcgctgaccgccacttacaacatcccggacgtgctgttccgcgacgtcgtggtcaggggcttctggctcattccctacatggccgggctgcccgctgccgagcgggagcgggtgatgggcaccgtgctgagctgctggctgacggcgtaattacgccctactcgggcgagcgcttctcgcttgaggacgtggtggcggctgccaaggcctccaaagccgatgcgcgcggcggcaaggtgctgctggagggctgaacaccctctaaaataacacggtgcggcatgctg

SEQ ID NO: 9052 - DNA, 239 bp, Chlorella sorokiniana
  unsure (1)..(239): unsure at all n locations; Clone ID: LIB3602-117-Q1-K1-A11
gcggattgtcccacgcacctctgcactgttgccgccccatcccccccgggtgccgttctgaccattcatttccttgtgctgcacgctattcccttcccctgccgtgtcttgcctgccttacctatcccgcgcanggccgccgcagcagcccccgatctggcttctgtacccccgctttgccggctggnncctcccccaacgcctttctgttagcnngccggcaccacgctttgcgccgc

SEQ ID NO: 9053 - DNA, 229 bp, Chlorella sorokiniana
  Clone ID: LIB3602-117-Q1-K1-A12
ccgagccggcgcagtgtacaccagcccaggcaccgtcccgtgctgcgagcgcaagccccgcccctgctgcccgttgcaaccttatttcatccgattcaacacggccgccactgccattcgctggatgcgccgccctggtgcgatttgggcgctgcgcctgatgtgccgctattttttcctccatttggtttctcacactcactgccatgccactcgagtcctgcgcgtg

SEQ ID NO: 9054 - DNA, 111 bp, Chlorella sorokiniana
  Clone ID: LIB3602-117-Q1-K1-A3
agcaccccgctggcatggctgggtctggctacaccggcaggcctggacaccggaagggcccctgtgctccctcaacaagttcgccaacggcttctaagcagcccggcatga

SEQ ID NO: 9055 - DNA, 97 bp, Chlorella sorokiniana
  Clone ID: LIB3602-117-Q1-K1-A4
gcggactcgcactacaacaaaccacagcaggcccactcactctatacattagatctttcactaactctacaaaacctcaatacagaggagcttaaca

SEQ ID NO: 9056 - DNA, 220 bp, Chlorella sorokiniana
  unsure (1)..(220): unsure at all n locations; Clone ID: LIB3602-117-Q1-K1-A5
gcgctaagctgccgcgcgagcaggtccaggagatctttgatgggtttgaagtgatggactatgcgcgggcggnggccaaggcgacagaggactttagcttgcaagcggggccgctcacgctgtacggcagccgctggcgcacacgctagagcccacgctgcggcagcacggcctgcccaccaagctgaacaagggtgtggtggagctggtgggcgacttt

SEQ ID NO: 9057 - DNA, 399 bp, Chlorella sorokiniana
  unsure (1)..(399): unsure at all n locations; Clone ID: LIB3602-117-Q1-K1-A6
gcgcggacgcgtgggcgccgagcccccgctgctgcacgacagcctgagcgaggcagactacagccactacaagcggcagcgcaccagcggcgcgcatgagcagcatcagcgagccagattactacctgaacactcgctgtctgaggggacgtacggcatgccggctgtgctgcagcacaagcgcacgcagggctcctcgctgcggggcgggcccaagccaatgatgatgcagcgcatcgtggtggtcaaccgctcggcggcccaggacgacaagccggagcgcctgcacgactccttctccgccgtcgactacagcgccagccgctgagcggcagtggggcgcanttgtgcgcccgcagacgactgttgatggcccgagccagctggccggcggtgggc

SEQ ID NO: 9058 - DNA, 98 bp, Chlorella sorokiniana
  Clone ID: LIB3602-117-Q1-K1-A8
gcgcagcagtgtcccccgtccaccaggaggtgcgccacgccagcccaggcgcccgttgtggtgcgagcaagtcccagcgcggtcgagccaagctctcc

SEQ ID NO: 9059 - DNA, 150 bp, Chlorella sorokiniana
  Clone ID: LIB3602-117-Q1-K1-A9
gcgggagtgagcacaccacaccatgcctgcgcctgtggcacgcgtgagaccgggcccaggcgccagcaggagcgggcagcagcggaggcaccatgggctgggagggcgtcgatgccccctctgacactgcggctacgacctcaagaacaa

SEQ ID NO: 9060 - DNA, 145 bp, Chlorella sorokiniana
  Clone ID: LIB3602-117-Q1-K1-B1
aacagcgcagcgcctgcctgcctctaaacagaggccatcgagacggacgccgccagctgccccgagatctgtgcagacctgctgtcgacactgccggcggactgcccaagcggccgtgtcggtgctgcttgcccccgcgtcatgc

SEQ ID NO: 9061 - DNA, 255 bp, Chlorella sorokiniana
  Clone ID: LIB3602-117-Q1-K1-B11
gcgtgtagcgcaagtctcgctgccaattttccctttcgttagcggccgccactgtattgtcacttatgtgccatacccctgtaacacttagcgagcaaaaaaaaaaaaaaaaaaaaaaaaaaaaaaaaaaaaaaaaaaaaaaaaaaaaaaaaaaaaaaaaaaaaaagaaaaaaaaaaaaaaaaaaaaaggaaaaaaaaaaaaaaaaaaaaaaaaataaaaaaaaagggggggggcgttttaggggacccaagtta

SEQ ID NO: 9062 - DNA, 156 bp, Chlorella sorokiniana
  unsure (1)..(156): unsure at all n locations; Clone ID: LIB3602-117-Q1-K1-B12
gcgagaatgtgaaggccaagatccaggacaaggagggcatcccccctgaccagcagcgcctgatcttcgccggcaagcagctggaggacggccgcaccctggcagactacaacatccagaaggagtcgacgctgcancctggtgctttgcgcctgc

SEQ ID NO: 9063 - DNA, 281 bp, Chlorella sorokiniana
  unsure (1)..(281): unsure at all n locations; Clone ID: LIB3602-117-Q1-K1-B2
gcggcgaaagcagcaggcgtaccccggctggtttgcgcccaagccaacaacttgaccctgttttcttggggtcaaccaaggcggcagcgcgggctgcaacgccaggctgggctgccctcggcaccgcactcggtggtgcagcctgactagcactgcactcgcgctctcgttcgccgcattgctcattgtactgtgcatgtgaagcattcgtggtgttgcctgcatatgttgctgttgcgttttggcagttccccgatatgaaacggccacgactgnnnaaa

SEQ ID NO: 9064 - DNA, 192 bp, Chlorella sorokiniana
  Clone ID: LIB3602-117-Q1-K1-B4
gcgcggcggcgatcgaggcggcagcggcaggggcaacgacggcaatccagagcaccgttagcctctaatgctgttatagatctggaggattggaatcctgagtgatttgtatgcctcaaactttcacaaacccaaccacataaaaaaaaaaaaaaaacgtacgccgatgaacaaactgacaaccaataaagg

SEQ ID NO: 9065 - DNA, 121 bp, Chlorella sorokiniana
  unsure (1)..(121): unsure at all n locations; Clone ID: LIB3602-117-Q1-K1-B5
gcgatgaacagaacaaatcntttgtgccatgcccacctgcctccaacgtcacccttcataaaaccctaacccaacccaatccacctgcgcgcccatacactcaaaaaaaggggcggcccat

SEQ ID NO: 9066 - DNA, 287 bp, Chlorella sorokiniana
  Clone ID: LIB3602-117-Q1-K1-B6
ccatctcaaatacctactcccagctcagcacgacccacatctttacctacataagagtgccacacctggggagcaacaccaacgcggtgctgcccacctcggtacactacctgcattcaacctctagctcacttcactgctacgtgctggatgctcaacaccatcacataccccacctgttaatgctggcaccaatcttctgcacaatgatgaccactccacctagcctcctgctctatctttctctcatccacacatcattcaccgctagcgctcggcaccgcggc

SEQ ID NO: 9067 - DNA, 280 bp, Chlorella sorokiniana
  Clone ID: LIB3602-117-Q1-K1-B7
gcgggtgatgtggtgcccaaggatgtcaacgcctccgttgccaccatcaagaccaagcggaccattcagttcgtggactggtgccggaccggcttcaagtgcgggatcaactaccagccgcccaccgggtgcccggcggcgacctggccaaggtgcagcgcgcggtgtgcatgatctccaactccaccgccatcgccgaggtcttctcccgcctggaccacaagttcgacctgatgtacgccaagcgcgcctttgtgcactggtacgtcggcgagggcat

SEQ ID NO: 9068 - DNA, 334 bp, Chlorella sorokiniana
  Clone ID: LIB3602-117-Q1-K1-B8
gcgggatgccacccgcattggcagcgccggtgtggtgcgccgccaggctgtggatgtgtcgccgctgcgccgcgtgaaccaggcgagctggctgatcaccaccggcgcgcgcgagagcgcgttccgcacatcaagaccattgcggagtgcctggcggacgagctgatcaacgcggccaagggcagctccaacagctacgccatcaagaagaaggacgagatcgagcgcgtggccaaggccaaccggtaaacggctgttgcgcacccaccaaaacagcagcccgccacagccggcacccctgggcaggatgccagaccgccagtgcagcagcacg

SEQ ID NO: 9069 - DNA, 212 bp, Chlorella sorokiniana
  Clone ID: LIB3602-117-Q1-K1-B9
ggataaaaaaaaaaaaaaaaaaaaacaatattataaaaccaaccaacacatataaaaatatccaatcttacaaacaaatccaagcggggataattttataaaaagggggagaaacctaaatttattcccttagggcgcccctttttaaaaatccctatttacccccccgttcatcccaatctttatcttttttttttgcctcccttttttta

SEQ ID NO: 9070 - DNA, 178 bp, Chlorella sorokiniana
  unsure (1)..(178): unsure at all n locations; Clone ID: LIB3602-117-Q1-K1-C1
gcgactagttctagatcgcgagcgggcccccttttttttttttttttttttctggggggttccatttcactaaactgtagcctcaatgaacggaacgtcgtcggcgatcacgctcagagcacgccctccttgatgatatcgcangggatggccgtgatggtctccatcttcacgttct

SEQ ID NO: 9071 - DNA, 284 bp, Chlorella sorokiniana
  unsure (1)..(284): unsure at all n locations; Clone ID: LIB3602-117-Q1-K1-C10
gcgctgatgggaacaatgagcaggacgcccaggcatgtggagacgggggctaaagggcagttgggggatgccgagctgcagcaggaggcagctggcggacagcaaacagcctgactctgaatgattttggcacagcagggacgaggcgcttgtgcatcgccctgccctggcacacgctcctgacgcccttttggctttgatccgttgcatagcgcaaattcgactagcgttgctgtactgtaatcgtatggacacaaaanaaaaaaaaaaaaaaaaannaaaaa

SEQ ID NO: 9072 - DNA, 350 bp, Chlorella sorokiniana
  Clone ID: LIB3602-117-Q1-K1-C11
agcatccctcacttcacctcgctgcgtgctgcatctcacgagcactattattgccgctacgttgctgcataccttggattgcgcagcctgccgcaccggcttgttcggccgccaggctgtgcaatgcaaagccgtcttaccgccctcagcctttctttgggcgctcctttcatccctgcccaatcgccatccccttcctcccctccctgcccctcagccactcagcaggtttcatgcctaccaccctgccgctccccctgcgatttggtgtacccattttctgtgtcggagcaccctgccctctgcctgtaatccgccattgcactgcaacctttatactaccaccactc

SEQ ID NO: 9073 - DNA, 247 bp, Chlorella sorokiniana
  unsure (1)..(247): unsure at all n locations; Clone ID: LIB3602-117-Q1-K1-C12
gcgatgctttgattctcgtgtcgtgagcgagcgaacagtccctcctaacttccaagcgcgggcgttgtgcccgccctgccctcgaggccttctacatcaggccgcttttccacgcctttcacccaccccacgcttncacccatgccccggctgaccgcacataccccctcacacacacagnattggttggtcagcgaattggctgcacgccagcagcagcgcccatgtgcgcgtcaccttgcacgcg

SEQ ID NO: 9074 - DNA, 349 bp, Chlorella sorokiniana
  unsure (1)..(349): unsure at all n locations; Clone ID: LIB3602-117-Q1-K1-C3
gcgggcgagaagggtggcgaagctgccaagcagaatggagcaggcatcatggccgacccctcgggctatggcaagaagggtggcgaggcgtcgctccagcgactgagagcgactcagccagcccgacctagccgccaccgcttggccagctcacagagcgctacctgcaactcaagacaacgcccccgcactgctgtgtttggcttgcctagcgtggcagttgacgcaccctgttgtcccattgaaccctgcatgtgactgttgtgacccagcatgcccggtttagtgatgccgnctctgcacgtgtgtgcctgacagcccaacggaccgactgtaaagctagcgacgg

SEQ ID NO: 9075 - DNA, 408 bp, Chlorella sorokiniana
  unsure (1)..(408): unsure at all n locations; Clone ID: LIB3602-117-Q1-K1-C4
ggcgcgccatgcagatgcctagcgctcatgcccaacaacgtccaagcaagacaagccatcccctcgcagcagcaacaacagccgcacttgcaccccgcatgactgagcagcagacgccccaaactaacgaccatgcagcgccgggggtggttgcccccgcggcgggcccgcggcgcgactgtctgtcgcccacgcttgaccttgcttgctccctctctgctccctccctacttactgcttcaaacctgacactcgctctttgattccccggactgcctcctnctttgctccctcctgcttgctcgctccgtttgcaccggcgcccgcgcgactgccagtgccccaaccgcatcacacagtgcaacagatggatccgttcnaaaaaaaaaaanaaaannaannaannng

SEQ ID NO: 9076 - DNA, 264 bp, Chlorella sorokiniana
  unsure (1)..(264): unsure at all n locations; Clone ID: LIB3602-117-Q1-K1-C5
gcgcggacgcgtggagtgcatanttgggtgatcaccgccgccccaaccccctatttcccgaaactcggttcaccttccgcctccctgctgggcgtgcacgccgccacgcagctccaacactcttgatacccctctaaccttgatctgtagcgccaggcggcctgcaagcagcatggcggcagcagagcaaaagccgctctccaatttgccgcagctgatcccggaggcggtgtttatggaagatgtggagtcctttctgcaagg

SEQ ID NO: 9077 - DNA, 397 bp, Chlorella sorokiniana
  unsure (1)..(397): unsure at all n locations; Clone ID: LIB3602-117-Q1-K1-C6
cattccggtcgacccaccggcggagggctgctgattggcgcggccgtccttgtgcgggctgcgcgccctgcgggaggcggcttcatacccaccctgtcagcggtggcttgctaggctagtaccaacaccttgacctgaccagcgttggctggcancctcggcggcccgtgttgttggctgccccaattcccctgcctttttgcctccctgccgatagccctgaatagcccttactaccctntgtttctctccctctgctggtgtgcagcagctntttcattntgtggccgccgcagcgccaagcttgtgcagccaccacagtgcatgctgaagccgaacgacgcactgtgcaacgcaactctcacacctgtcgattgttcacatggggtctactttt

SEQ ID NO: 9078 - DNA, 180 bp, Chlorella sorokiniana
  unsure (1)..(180): unsure at all n locations; Clone ID: LIB3602-117-Q1-K1-C7
gcgagaaataaaaaaaaaaaaaaaaaaaaaacaaaaaaaaaaaaatatttactataaaaaaaaaaaaaaaaaaaaaaaaaaaaaatggaggggggnctcctcatgggggtgtggcgtacccacttcacttcctgttattccatggttatattttttttataattaaatctaatttaattt

SEQ ID NO: 9079 - DNA, 256 bp, Chlorella sorokiniana
  Clone ID: LIB3602-117-Q1-K1-C8
gcgggcgtcgtcgaggtagccagcacgatggccaaaatcaaagcccatgagctgcgcggcaagggcaaggaggagctgctgcagcgagctcaaggagctgaagcaggagctgagcggcctgctcgtggcaacgtcaccctgctgcgcccccaacaagctgtccaagatcaacgtggtgcgcaagggcatcgaccgcgtgctgaccgtggtcaaccagaagacccgggacgctctgaaggaggcgtacaagggcaag

SEQ ID NO: 9080 - DNA, 280 bp, Chlorella sorokiniana
  Clone ID: LIB3602-117-Q1-K1-C9
gcggcggctgtagcgtccaatgctgcagctcgctgccccaggctggcgagcgtctgcgccggccgctagcttgcccagccctgcggccagcaaggctgctggagcctgcaggccctgcccttgactgtatcgccccttaggaacccgcctgccctgcctgcctcggaaacgcacgcttctcctttcctgcttgttcagcgccggtagcgaccattgagttttgactctcaggacacagccttttttggccatttttgtagcgctctccccagcccccatg

SEQ ID NO: 9081 - DNA, 61 bp, Chlorella sorokiniana
  Clone ID: LIB3602-117-Q1-K1-D1
aaagaatgaaaaagcaccacgagggtttaaactgtctcttacctttaaaccaataaaattg

SEQ ID NO: 9082 - DNA, 381 bp, Chlorella sorokiniana
  Clone ID: LIB3602-117-Q1-K1-D10
gcggtccctcaaggtgaccgccactttcggcggcaagaccaaggctggcaccaaggccggcaccaagaagggcacccagaagcagggcaccaccaagaagggtggccccaagaagtcttcctctggcgccagccagtggtacggctcccgaccgccccaagttccctgggcccctacagcacgaacttcgtgcccagctacctgaccggcgagttccccggtgactacggctgggatacctctggcctgtcggccgaccccgccaccttcgctcgctaccgcgagatcgaggtcatccatgccccgttgggccatgctcggcgccctgggctgcgtcgtgcccgagcttgctgacggcaccaaccacattgtctggttcaa

SEQ ID NO: 9083 - DNA, 323 bp, Chlorella sorokiniana
  Clone ID: LIB3602-117-Q1-K1-D11
gcgggagggcgtgcgatacggcattgcccgcagcaatcttggattccagctgctgaagaaagcgggctggacggaaggcagcggcgggggagccaaggagcagggcatggcagaccgctggccgtttagcagaagggcaacctgggcctcggctatgcgcccaagccctccaagccagccagaaaagagggagcagcagtggcagcagcagggggagctgcaggcggcggccagccggcggcacccaagcggcccctgccagaggaccccttggagaagcaggacaccgagactaaagtgaagcgagtgaaagcaggtcatgc

SEQ ID NO: 9084 - DNA, 346 bp, Chlorella sorokiniana
  Clone ID: LIB3602-117-Q1-K1-D12
gcggttaagaaagccagcagctgccatggcgacgtttgcggaggcaccggcgggcgatgccgccaagggcgccaagatcttcaagaccaagtgcgcgcagtgccacaccgcggcgtctggcgagggccacaagcagggccccaacctgggcggtctgttcggccggcagtcggtccaggcggagggcttcagctacagcaaggccaacaaggagaaggcggtgatgtggagcgaggagacgctgtatgagtacctgctcaaccccaagaagtacattcccggcaccaagatggtgttcgctggcctgaagaagcctgaggagcgcgccgacctgattgcttacatg

SEQ ID NO: 9085 - DNA, 185 bp, Chlorella sorokiniana
  unsure (1)..(185): unsure at all n locations; Clone ID: LIB3602-117-Q1-K1-D3
agggaaaaaaaaaaaaaaaaaaaaaannnnntgnaaaaaaaatataaaaaaaaaaaaaataaaaaaaaatggaaaacaatataaaggagtgaaattttaaaaaaaggtgcgtgcgacctaaaaatattcttcgccccttttaaaattcaaacctttgcccccctttttacaacactattactttt

SEQ ID NO: 9086 - DNA, 144 bp, Chlorella sorokiniana
  Clone ID: LIB3602-117-Q1-K1-D4
ctgccaggaggcttcgcctgacacacagcgaatgagcgtcagccccgcggagctggaggagcttgaagaggtggagggctgggtgaacctgatggcggagctggagggcatggagcaggaccacctcatcgagctgagcctgcg

SEQ ID NO: 9087 - DNA, 212 bp, Chlorella sorokiniana
  unsure (1)..(212): unsure at all n locations; Clone ID: LIB3602-117-Q1-K1-D5
gcggttctagatcgcgagcgggccgcccttnntttttttttttttttttttttttttttttttttggttcaaaagtgtgttacatggttgcaaaccgaaagggggacaaatgaaacgcaccagtggagcctgccgccgcatgagcctgccagcgccgtataccaaatggggccacgcgtcatgcgctggatgattaatgggtgctcctgggc

SEQ ID NO: 9088 - DNA, 179 bp, Chlorella sorokiniana
  unsure (1)..(179): unsure at all n locations; Clone ID: LIB3602-117-Q1-K1-D6
gcgaaaaaaaaaaaaaaaaaaaaaaaactntannnnnnnnaaaaaaaaannntttaaaaaataaaaaaaaaaaaaaaaaaattaaatgaggaggnnttcggaaagggggtttttggcttccatccttatactcttnctttctaaatctcttttttttttaaaaacaaaaattaattaaa

SEQ ID NO: 9089 - DNA, 213 bp, Chlorella sorokiniana
  Clone ID: LIB3602-117-Q1-K1-D7
gcgggggttagcgccgtctgcgtcattagcgacagcatcgccaacgtggacaaggacatgcggcacgaggtcggcaatgtgcgggaggaggttggcaatgtgcggcaggacgttgctcagtcgacaagacctcttgcgctttgaggccgccaccacagccacgctgcagcaccacatgcacgcagctggtgcatcttatcacgcagatggcac

SEQ ID NO: 9090 - DNA, 82 bp, Chlorella sorokiniana
  Clone ID: LIB3602-117-Q1-K1-D8
gcgggagtgaaaactatcttcatcattacctacagccttgccaaccttgacaagaacattcggtacaagagctgcaatcttc

SEQ ID NO: 9091 - DNA, 344 bp, Chlorella sorokiniana
  unsure (1)..(344): unsure at all n locations; Clone ID: LIB3602-117-Q1-K1-D9
gcatggggggcctcccgtggcgcaccactcagttgattggagcaagatgtgggggaacctggtcctgcaaccgccccgcagcgcatttgcgcgggatggtcccgccttcactgcacctgcactgcccacaggaggccctcaccaagccgccctgttgtcctccctcccttctttgacacactgcctctccccttgattgcccggttgcctctgtgactcgcgcaccgatctttgaccgcctgctcttcctcggattccctccttgcttgccacaaggcaaacattctggcttttggtaatatcccagggttaaaaaaaannnaaaaaaaaaaaaaaaaaaaaaa

SEQ ID NO: 9092 - DNA, 126 bp, Chlorella sorokiniana
  Clone ID: LIB3602-117-Q1-K1-E1
gcgcggcggcggcgagcggcaagcgaagattgtgcctcggtgcttgaggagcaggtcacctacaactactcgcagttctacctcgtctttgcgctggcctccatgtacattgcgatgctgatgacc

SEQ ID NO: 9093 - DNA, 82 bp, Chlorella sorokiniana
  Clone ID: LIB3602-117-Q1-K1-E10
gcggtcagcgagcagtaagcggctcgaagcctttggcggcagcggttgtcagcccatgtcgccctgacgcgccgcgcagcag

SEQ ID NO: 9094 - DNA, 218 bp, Chlorella sorokiniana
  Clone ID: LIB3602-117-Q1-K1-E11
gcgcagaagggcgccaagtcggccaaggtggaggcggcccgcaaggccaaggccgccgcgcgccccgcggtgaagaagtgtccgggccttctacagcaccatgatcaccgactcggactacgtggcgaggactacgaggtgttcagcagctggctgggcaccacccagtgagcgccccggccggagtagctccccagaggaggcgagcgcggcgcggc

SEQ ID NO: 9095 - DNA, 146 bp, Chlorella sorokiniana
  unsure (1)..(146): unsure at all n locations; Clone ID: LIB3602-117-Q1-K1-E12
gcggcagcagcaggcgtacaaggaccagatcaactttgtggcgctgaatgttgagaacacaaagtgggcgcccgaggtgctcgagtatggcgtgaagggcattccagagtttgtgttcctgngatgccagcggcaagccccggtgg

SEQ ID NO: 9096 - DNA, 111 bp, Chlorella sorokiniana
  Clone ID: LIB3602-117-Q1-K1-E2
gcgcggacgcgtgggcgaggatctgtaccaccttatcaagaaaggggggggcattccccaacaccttggaggccaacccaaaggccagggacggaaatttccacctgattt

SEQ ID NO: 9097 - DNA, 52 bp, Chlorella sorokiniana
  unsure (1)..(52): unsure at all n locations; Clone ID: LIB3602-117-Q1-K1-E3
aaaggaaaaaaaaaaaaaatactnnaccaacaaataaaaaaagcaacaaaaa

SEQ ID NO: 9098 - DNA, 326 bp, Chlorella sorokiniana
  Clone ID: LIB3602-117-Q1-K1-E4
attccggtcgacccacacgtgcgcaggagcaaagaggccatggatgaccctaaatggcgccaaaatcccaaccggcccccttcccttgggggccttcctggccttgggtgcccaccacgccggcgcgcggaagggccccattacaacctattgaccacgtgtcggacccgtgggcggcgaatttctgctccaacggcgtgagcctgccctccgccttcgccaacgtgttctgagctggctagcccgaccggcggcaaacaaccctgagaagagcttcgcccacaccccaagggcaccccgattgtgttttggttctctattctcct

SEQ ID NO: 9099 - DNA, 165 bp, Chlorella sorokiniana
  Clone ID: LIB3602-117-Q1-K1-E5
gcgcgtggctgtctcggctgtctgcccctccgagaaggggcattggcggggcccctggcataaccgtcatcctcagctgctgggcggttcttggtgacgtacgactccatcctctggatcgtggtctgtgatcaccattctctatcgcatggactattaacactt

SEQ ID NO: 9100 - DNA, 205 bp, Chlorella sorokiniana
  unsure (1)..(205): unsure at all n locations; Clone ID: LIB3602-117-Q1-K1-E6
gcgcgccgcttctacaacatctgctgcaagaaggcttgagtggaccttaaccaacccccccgcgagctgtctcccgaggagctggagagcatcatgaccatcgtggccaacccccncccctacaaatcccgactggttcctgaacaggcagaaggacgtcaaggacggccgctactcgcaggtgacctcctccgcgctggacacc

SEQ ID NO: 9101 - DNA, 223 bp, Chlorella sorokiniana
  Clone ID: LIB3602-117-Q1-K1-E7
gtgtgtgctgacttagcctcttgctacctaggcaccaccaagcattaactgtcatttacctttacccaccaaccccgaccgggcgaccatttagctatcgtagaccatttgtactagattacctatgcatccttaatctaatatttcatatgtaactccacactcactgcaccactctcaactactatcacataccttaacacatttggccatcttgttttcc

SEQ ID NO: 9102 - DNA, 356 bp, Chlorella sorokiniana
  unsure (1)..(356): unsure at all n locations; Clone ID: LIB3602-117-Q1-K1-E8
gcggcgcgagttcctgaacctgccctccgagatcgtgcccgccaccctcaagaagagcacgcgccccctggagcgcgagggcgcgcgcccgccccgccgcgacggccccccccgccgcttcggcgaccggagggctaccgctccgagaaggcgggcgcccccggcgagtaccgccccgagttccgcggcggcttcggccgtggcgccgccccccagtaagcgtccgcttcctggagcagcgccccctgtgctcggcangcggcggcgggtgcggcggccgcaaggagtggcaaagtgtgcgtgccactgcatgcaggctactgtaacctccgccgncnaaaaaaaaaaaaataaaa

SEQ ID NO: 9103 - DNA, 251 bp, Chlorella sorokiniana
  Clone ID: LIB3602-117-Q1-K1-E9
ggcggagaaggctcggcccatcaccttacgggacagcaaaggcggacgagcaacatggggcggcggccggcgcggtgctaccggcagatcaagggcaagccctaccccaagtcgcgcttctgccgcgggtgcccgaccccaagatccgcatttatgatgtgggcgccaagaaggcgggcgtggacttcttccctcactgcgtccacctggtcagctgggagaaggagaacatctcgtccgaggcgctggag

SEQ ID NO: 9104 - DNA, 292 bp, Chlorella sorokiniana
  unsure (1)..(292): unsure at all n locations; Clone ID: LIB3602-117-Q1-K1-F1
cagaccggccgaattcggtcaccacgcgtgcgacgagggcttaagcggccaagtttggttcaagcgccccaagttcggattcaagcggcccaagtttggagggaaattcggcaaatggaagtgacctgcccttccccttccttcctggccaatctgccgcctgctctgccgcctagtcgccggccttctgtttcttggcgccctgcgnttagcgggatggaacactctggttggcctctgtattactgtaatgcttagctctgaaaaaaaaaaaaaaaaaaaaannnnnnaa

SEQ ID NO: 9105 - DNA, 148 bp, Chlorella sorokiniana
  unsure (1)..(148): unsure at all n locations; Clone ID: LIB3602-117-Q1-K1-F10
gcngggttttaaattttttttttttttttttttttttttttttttttttgtttgcagcttgcaaggtcacacaaaaaaatgagggtcgaggtacggaaggggaaacatgtaaagatgggtttatttagtcagtaaaaaatgaaatgtc

SEQ ID NO: 9106 - DNA, 126 bp, Chlorella sorokiniana
  Clone ID: LIB3602-117-Q1-K1-F11
gcgcaagctgcacctgttttccctgtttcctgcccatctgtgtaccccttcagcccccctgccgacccgttttttcctgcccccagcctcacccaacccacaagccacgcggcccacaaacgcatt

SEQ ID NO: 9107 - DNA, 204 bp, Chlorella sorokiniana
  Clone ID: LIB3602-117-Q1-K1-F12
ggcggtctccatcgggcgcgtggcgctcgtccagtacccggaggcggaggccggcaagctggtggtgattagcgatgtggtcaggcggaacgcggccctggtggacttccccggcagaccgggcggatcagcttaagcggtggactaccgattacggggacatcccgctcgcaaaagggtctaaaaagcctgagagcgagttag

SEQ ID NO: 9108 - DNA, 313 bp, Chlorella sorokiniana
  Clone ID: LIB3602-117-Q1-K1-F2
gcgagctttagttgcagccgccaaacccgaaccgccctgcccccggaccaaacaggggggggtcccgtgtgacttaccctgagcgtccgtgtgttgcatgtgccccctctcggactgccccgtctcttttcggatcctttcgttgaaccgcccgcactcatccaccctcccttcccttggttgcaccgccgcgcaccgaggcttttcacccgccgtcactttgcccccctctcggcgtccatgtgtattaactgaaaataccgtcctttttcgccacaacccctctggcttccctaacctgagcgcacccccg

SEQ ID NO: 9109 - DNA, 199 bp, Chlorella sorokiniana
  unsure (1)..(199): unsure at all n locations; Clone ID: LIB3602-117-Q1-K1-F5
tagtgcatcactgtttgccctccagctggcctaaggacagctctgggctgcatcggagcttcacctgccgactngtgtgcctgcacctgttgcttgcgcccgcatcctcacgttccctcatggcctcgcccaccccctttgcctacgattgcaggtgctccacttgctccggctactactaggcaactagctgagcaag

SEQ ID NO: 9110 - DNA, 218 bp, Chlorella sorokiniana
  Clone ID: LIB3602-117-Q1-K1-F6
gcggcgcgtgatgggaactgcatcaaagggattgtgcccccgtaaaaactgcatttgggatggccctttccttggtctaattgccgggcctgcaggcgcccaacgaggccgccctgtgctacaaggagcatgggagcaatgggcggagcaacacggcgtgcaggtcatcaccttcacgcgcgacacctttagactgttgacgatgaccagacctatgt

SEQ ID NO: 9111 - DNA, 456 bp, Chlorella sorokiniana
  unsure (1)..(456): unsure at all n locations; Clone ID: LIB3602-117-Q1-K1-F7
gcgggggctgcacacaaactagatcctcaacggccgcctgcccatgattgcgtgcctgggctgcgctgctcacgacttcatggggcgagaaggcccattgggggacctgctgtaacacctgtcctacccctttccaacaacctgctgggcaacctggccaccatcctgaaacattaaacgtgctgccccaagccccgacctgattgtgaggcctcccaaggcggcngccaaccacatctagagcctttacattccttgtctcgangcgcgaactggtggcggaccctccggccgtgcctgcctgccaccccataacgcactctcactcacccaacttcacccctgagaagaaatcacctgcccaactcttgttttttttcacctcctacacttccgggtacctctagtatgggataattgcttcttcacttctaacaaattaacttttcccttccc

SEQ ID NO: 9112 - DNA, 176 bp, Chlorella sorokiniana
  unsure (1)..(176): unsure at all n locations; Clone ID: LIB3602-117-Q1-K1-F8
ggcggggctttggtgccgcctttgcgttcctggcgcagcgcgagtggggccgcaacctgctcctcaagtacccgcgcatgttcaggtacggcatgttcacgcacgagggccccagcgagcagcaaatgcggagaccaacctttgcattcaccaacattggacgggngatacgctac

SEQ ID NO: 9113 - DNA, 527 bp, Chlorella sorokiniana
  unsure (1)..(527): unsure at all n locations; Clone ID: LIB3602-117-Q1-K1-G1
gcggcctgtcgccttgctaccgtctatccatttttctttcaaggttcaaccggcccttgtccaaccgatgcgggcttactacccacacgatcacatgcgccccgccccatgtctggtgcccctgctcactcgtgtacactagccaaccgctcccccgctacacctgtcctccgttatgctttcgaattgcttgcatctacaattgcttcggccgcccgcgcgcgtagcgtggccggcgacgcatgcctccctccccctgccccccttgagaagatcaaacccgcttttcccagccattccacactcccgatggaacgaaccagagctccgccctctgccaacaccccctgtatctctctgtgctttcccccaacccaattttcgcggccacgccgcgctccgtgttgtttgtctagatagccgcacgcactgngaactgtcccccgtccctccttccaacgaaatggnttccttcccccaactgatgtgccctgcacacgcatacctactgtgtaaaattagcgcgc

SEQ ID NO: 9114 - DNA, 159 bp, Chlorella sorokiniana
  Clone ID: LIB3602-117-Q1-K1-G10
gcgggagcgggtggaggctgagaagagcgccgagcagaaggaggacgaggagctgcgcaaggcgcgcgagtgggacgagttcagggacgacaacccgcgcggctggggcaactcaaagctgcggcctgcgcttgaaccgcgcgccaaccaggcgtgccc

SEQ ID NO: 9115 - DNA, 457 bp, Chlorella sorokiniana
  Clone ID: LIB3602-117-Q1-K1-G11
gcgcccaggcggccctcactcgcgacaccacttacctcgtcaacggcgcgcaggttggcgcgcgcgacatcttcacggtggagcaggggctgggcatcggcacgcgggcgcccctgttcaaccgcatgaagcgcagtccactcgcttcttcaagctcacgcccggcaagggcaagcggcagcccgtcaccctggtggcgcacggcaagtttggcaacaccatcggcgacctgcctgcttatgatgccttcctgctgggcggcccctactctgtgcgcggctacaacattggcgagctggcggcggcgcggcggtacgtggaggcggcggccgagctgcgcgtccccgtgctgggccagcagctgtttgcgttcgccgagtttggctccgacctgggcagctcagccgaggtgcggggcaacccaacggagtactaccgccgggcgggggccggcagc

SEQ ID NO: 9116 - DNA, 164 bp, Chlorella sorokiniana
  Clone ID: LIB3602-117-Q1-K1-G12
cgagccccggcaagagcgggctggggcgccacgtggatgtggggggtgtgggcgactttgggcccgtgtctgacaaggttgacttccacctgcggggcggatcagagaaaattgagcaccgggtgccctagcttacaacatacccgagtgagggtggcaagatg

SEQ ID NO: 9117 - DNA, 126 bp, Chlorella sorokiniana
  Clone ID: LIB3602-117-Q1-K1-G2
ctatccatcttccttcctcccttcacccacccctattcatccgatcccgtcttactacccacagcgtttttttcaaacggccccatgtctcccccccctgctcactcatatacactatccaacctc

SEQ ID NO: 9118 - DNA, 79 bp, Chlorella sorokiniana
  Clone ID: LIB3602-117-Q1-K1-G6
ctcccattccgtcacacctgcgccacctcaaatccacccattcactccgttttcccccccgctttgattttcccccttc

SEQ ID NO: 9119 - DNA, 186 bp, Chlorella sorokiniana
  Clone ID: LIB3602-117-Q1-K1-G7
gcggacacgcgtccgcacacccttgcccccatgcgtccgttctagtctagaacttagaacacttctgcaatattgctctacacaggggcttcctttagagtggaatacgcacatacactttatcctgatacaatccatatgataacctgtattagatcgtgtctggaagtgacctgccatcctgag

SEQ ID NO: 9120 - DNA, 347 bp, Chlorella sorokiniana
  Clone ID: LIB3602-117-Q1-K1-G8
gcggcgcagcggccgggctatgcacgcccgcagccgtatgtgatgcgcccgcccgcccatgcacccacccctttttgaatgcctgtgcacacacctggtatggcttgcgttcccaccctcaccaccacccacccgttacctgatcccacacatttttgccccagaagacgctcgtttcattcacagaacagaaacccgccgatgtgggccccagtccgaaggggcccctgccaactccttacctgccttggtaccaatgcgcacccatgcgccccatgctgtgcgtccccggttttccttcgagcgttggtggcccgctgccctaaccgcgaatcgtcctttgcacc

SEQ ID NO: 9121 - DNA, 339 bp, Chlorella sorokiniana
  unsure (1)..(339): unsure at all n locations; Clone ID: LIB3602-117-Q1-K1-G9
ggcggcgaccatgccgtcccagaagcgcttcgccatcaagaagaagctggccaagaaggccaagcagaaccggccatccctctgtnatccggttgcgagcgacagcagcatccgctacacgccagcgccgcactggcgccgcaccaagctggcatctaacgctccacgaggacagtgacggagcagccccggaccggcaggcatggcgcttggccgcccttgaaaggaaccccgtcatgggcttgatgaccgcttaaagcctggaacgaaggccttcaaaaaaaaaaaaaaaaaaaaatgtgggtatgttaaaaaaaaaaggggcgggcccgtctttgg

SEQ ID NO: 9122 - DNA, 445 bp, Chlorella sorokiniana
  unsure (1)..(445): unsure at all n locations; Clone ID: LIB3602-117-Q1-K1-H10
gcggcagggcaagccctcggaggcggccgtggaccgaatggtggcggagctcaacgaccggcgcagtaagtcgttcagccggcggcgggcgcatcgtgaggacaaggacattgactacataacaccgaacgcgcactttaaccgcaagattgagcgcatctttggcgagcacacggcggagatcaaggccaacctggagcgcggcacggcgctgcccgaccaccgttgagcacggccgcatgccggcacgtgcggctgatgccctgcccaagatcgctgctggatttttcatggccgtagcggcgttgaagcacgaggcagcttgcttgccttgcatgtgttgctgaagacatcatcctgcttcaatgttgtaacgatgcaacacttttnaaaaaaaaaaaaaannnnnnnnnnnnnnnnnnnnaaaaaaaaaaaaaaaaaaaaa

SEQ ID NO: 9123 - DNA, 137 bp, Chlorella sorokiniana
  Clone ID: LIB3602-117-Q1-K1-H11
gcggggaaatactaactatatgccagcgcgcaatatgtgactgcgcttgtctgcgagcaggcttaacccagccagctctgcccaggtggggcctctatctaagggctgcactttgcagtttttccgggggggggggc

SEQ ID NO: 9124 - DNA, 76 bp, Chlorella sorokiniana
  Clone ID: LIB3602-117-Q1-K1-H2
gcgctacaagcacaaagtgtatgtggcgggccaaatttacttggggcccttcattgtgcctgaaaacccgggggcc

SEQ ID NO: 9125 - DNA, 420 bp, Chlorella sorokiniana
  unsure (1)..(420): unsure at all n locations; Clone ID: LIB3602-117-Q1-K1-H3
gcgggcctttggcaccttgctggcggaggggcaccacgtgcgggtgagcgggcangaacgtggagcgaggcaccttttctcaccgcggcgccgtgctgcacgacgagaagagcggctccaccttacgccgtggagcacgtcttccacggccagcggcccaagcagttcacggtctccaactcctcgctctccgagtacggcgtgctgggctttgaagctgggctactccatcgagaaccccaacgccctggtcatttgggaggcgcagtttggcgactttgcaaacggagcgcagatcatcttcgaccagttcgtcagtagcggcgaggccaagtggttgcgccagagcggcctggtggtgctgctgccccacggttacgacggccagggtccggagcactcgtccggccgcatggagcg

SEQ ID NO: 9126 - DNA, 81 bp, Chlorella sorokiniana
  Clone ID: LIB3602-117-Q1-K1-H4
gcgggctgccagaagaagctggagattgaggattacccccaacttcgcgcctttttccaccagccccttttccaaggaggt

SEQ ID NO: 9127 - DNA, 54 bp, Chlorella sorokiniana
  Clone ID: LIB3602-117-Q1-K1-H5
gcgcgggagaaaaaagccatataaggaagaacgtaagaccgaaaaataaaaagg

SEQ ID NO: 9128 - DNA, 82 bp, Chlorella sorokiniana
  Clone ID: LIB3602-117-Q1-K1-H6
gcggggagatacatgaccggctgagcgtctctctacgcgcagggcaagcggtgttacgaccgcaagcagtccggctatggtg

SEQ ID NO: 9129 - DNA, 167 bp, Chlorella sorokiniana
  Clone ID: LIB3602-117-Q1-K1-H7
gcggaggaattgctgactggccgggggcaccgggcacacacccattgccctgggctttgggcgacgcaaggtgagatatagaggactttgcctctgccacacgggtctttggacacctgttctgtcacatatacgttcaggtactgtagggcaaggtaaatagcggc

SEQ ID NO: 9130 - DNA, 359 bp, Chlorella sorokiniana
  Clone ID: LIB3602-117-Q1-K1-H8
gcgcacaagatcaagcatgcgccattgtcgctgcttccgccacagtacatctggattccggacggcgagcagtataatggggtgacggatcgccacattattgtgccacagcaatacctgtcgggcacattgacttcatgacagacatgctgcttgatcctgagggtctggtggcacgaatgaaggcctacacacacgcgttcaatcttgaagcgttcatcaagtttaccctgctagatcgcggcctctggcctatggtgcgcttctttccatacacgatgttcacggtgcgtggcgagacagacaagacgaggtggcaagttggcgactacaatgccgaggagggcatggttataaag

SEQ ID NO: 9131 - DNA, 69 bp, Chlorella sorokiniana
  Clone ID: LIB3602-119-Q1-K1-A1
gtggacatgttcctgactgaggaggagggcaagaaggtgctcaaggtggactgccactttggcaagcgc

SEQ ID NO: 9132 - DNA, 291 bp, Chlorella sorokiniana
  Clone ID: LIB3602-119-Q1-K1-A10
gcgcggtaccactgattcggtggatgtatacggccgcaccgccacctgctgaagcatcgcacagcgcagcaatgattccagctgtgcagcggcggcttgcgcttatgcagagccagtagccgcccagttagcaatctgccctaggttgtttcccgtgtacccccactcacatgctactccgtactgtgccctatcagtgttgcctcgatctccagactatgcgcattagttgattgtgcagggtctctctactattacagagtactatcgggcagcctgaacaactttttt

SEQ ID NO: 9133 - DNA, 331 bp, Chlorella sorokiniana
  Clone ID: LIB3602-119-Q1-K1-A12
tgctcgctgctgtgcatgggggcagctggacagcggcggacaggacacgggtgtctttgctgtggcatgtagtgtggggctggcggttcaccgtgctgggcaggcaacgccgaccttcacttgtacagctttttgcagttttgctcatagcgatctagtgcttgtagcgatttagttagcatgggtttgcttggtgttgctctctcactggctcatccttgggttgcacgccatttgcttgatctttcagcttgcgccaggagtcatggccttggcagttccgctgcataaacattgtgctgtctgcagctttgtgcagctttgtaaaatg

SEQ ID NO: 9134 - DNA, 155 bp, Chlorella sorokiniana
  unsure (1)..(155): unsure at all n locations; Clone ID: LIB3602-119-Q1-K1-A3
cagtaccgtccgaatcccggtacaccacgcgcgcgtgaacctgacgtctgacgacagcgagcgcacgcanaagctgcgcgaggcggagatcaagcacgcccgcctggccatggtctgctttctgggctacaccgtgcatgcctggtacaccggcg

SEQ ID NO: 9135 - DNA, 185 bp, Chlorella sorokiniana
  Clone ID: LIB3602-119-Q1-K1-A4
cgcgtggcccaagtcaccggcggcgcccccaacaagctgtccaagatcaaggtggtgcgcaagggcattgcccgcgtgctgaccgtggtcaaccagaagacccggacgcttgaagagctacaaggcaaaaagtctgcccctgacctgccgtaagaaacccggcatcgcgcgctacaaggcagcac

SEQ ID NO: 9136 - DNA, 187 bp, Chlorella sorokiniana
  Clone ID: LIB3602-119-Q1-K1-A6
accacacgcgcgcggacgcgtgggtgtgaggcgcgggccatctacggagggagcgcggacatcatcctgcagaccaaggtggaggcagtgaaggacaaccccgacggctcctacggcctggcagcagccaatgcagctacgccatcctgggtgcaggctcggtcacaggctgggccaacctggcatg

SEQ ID NO: 9137 - DNA, 258 bp, Chlorella sorokiniana
  unsure (1)..(258): unsure at all n locations; Clone ID: LIB3602-119-Q1-K1-A7
ggcggcttaacacaatttctgacaccttttgtgtttgatgcgttgcacaactgatgggaacaatgagcaggacgcccaggcatgtggagacggnggctaaagggcagttggnggatgccagctgcancaggaggcagctggcggaccagcaacagnctgactctgaatgatttttgtgcacagcagggacgaggcgcttgtgcatcgncctgccctggcacacgctcctgacgcccttttggctttgatccgttgcat

SEQ ID NO: 9138 - DNA, 223 bp, Chlorella sorokiniana
  Clone ID: LIB3602-119-Q1-K1-A8
cagcagtgtccagctgccacacagaggtgactaactcaagaccaggtgtttgaaggagctggagcaactgcaaccgcagtggagctacgttctcgccgtccgcaattgcgcgccgcgtgtacataaaccaatgcatgggtgtgggcgcgttccgccgcgccttctggggcgatcaacgccaaggctcgtgaccctgacaccaccaaggcggggcggatatcgc

SEQ ID NO: 9139 - DNA, 95 bp, Chlorella sorokiniana
  Clone ID: LIB3602-119-Q1-K1-A9
gcgggggggggaggccgggatcaagggagatggccggtctgggctgcagaggcatgcgaggctgcatgtgctgtgtgccgcactgctttgagcgc

SEQ ID NO: 9140 - DNA, 193 bp, Chlorella sorokiniana
  unsure (1)..(193): unsure at all n locations; Clone ID: LIB3602-119-Q1-K1-B1
cagcaccgccccaatttcccggtcgacccacacgcgcgcgacgacattacaggcgcctgctgatcgctgttgagcagggcaggagtctatctgcgcagccaccgttcaccacccgccgccggggtcgctgccgctgctgccatctattancancaagccctacaactggntgcatctcacatcgggcgccatg

SEQ ID NO: 9141 - DNA, 55 bp, Chlorella sorokiniana
  Clone ID: LIB3602-119-Q1-K1-B10
cctcgcatgggtttgttccagcgagcgaccgcaacaaaaaaaaatcttttttaaa

SEQ ID NO: 9142 - DNA, 140 bp, Chlorella sorokiniana
  Clone ID: LIB3602-119-Q1-K1-B11
gcggggacaagtaccaccccggctacttcggcaaggtgggcatgcgctacttccacctgaacaagaacaagtaccactgccccgtgatcaacctcgacaaggtgtgggctctggtgggcgaggacgcgcgcgtaggcggc

SEQ ID NO: 9143 - DNA, 312 bp, Chlorella sorokiniana
  Clone ID: LIB3602-119-Q1-K1-B12
gcgtcttccctcactgcgtccacctggtcagctgggagaaggagaacatctcgtccgaggcgctggaggcggcccgcatcgcggccaacaagtacatggtgaagaacgcgggcaaggacgccttcacctgcgcgtccgtgtgcaccccttccacgtgctgcgcatcaacaagatgctttcgtgcgccggcgcagacaggctgcagacaggcatgcgcggtgcgttcggcaagccatttggtgtgtgcgcgcgcgtgggcatcggtcagatcctgctgtccatccgctgcaaggacacgcacgctgcggtggc

SEQ ID NO: 9144 - DNA, 203 bp, Chlorella sorokiniana
  Clone ID: LIB3602-119-Q1-K1-B2
gcgattgttcagccatgcgcttctcattaggcggccaggcagtgcaggttgtgtgcccaccggcgcacggccgcgagtttgtgacgcgaagcgttccagcagcagtttgcggcgtggctgcgctacttggagaatgagcttgggccctggtttgcagacaccaagctgctgcggtcggagcttggtataggcagctgaagcct

SEQ ID NO: 9145 - DNA, 140 bp, Chlorella sorokiniana
  Clone ID: LIB3602-119-Q1-K1-B3
gcggcagcgtggagccaagcagtatgtgttctcctactcgctggccaaggagggcgaggcggagcgcaccgtgttccagagcgtggcgctgggcaacacggggcggtacaacaagctgttcacctaacgccacctgtacc

SEQ ID NO: 9146 - DNA, 233 bp, Chlorella sorokiniana
  unsure (1)..(233): unsure at all n locations; Clone ID: LIB3602-119-Q1-K1-B4
gcgcagggcctcggccctgtctgctacccacctgctccctgccaggctcgttgctttgcacccccgcctgcctcggtacgcaccctcgcttcctgggccctggcccagtcgcacaaccccccacctggngcccttggccctgtttggctttgaaccccgctcgcttgccgcnnactgcggcgcaaccaaatgctccttccccacaaccgaccctttgcacctttggccctcat

SEQ ID NO: 9147 - DNA, 138 bp, Chlorella sorokiniana
  Clone ID: LIB3602-119-Q1-K1-B6
gcggatgcccgtgccccaggcctggcggtcaaggtggagaagaacacgaccatcgaggtgtccgggtttgacaaggagctggtgggccagtttgcaaccaacatccgcagcaagcgcgagccggagccgtacaagggc

SEQ ID NO: 9148 - DNA, 57 bp, Chlorella sorokiniana
  unsure (1)..(57): unsure at all n locations; Clone ID: LIB3602-119-Q1-K1-B7
ggcgaaaaaaaaaaaaannaaaaaaaaaaaaaaaaaaaaancaactanctnttntnc

SEQ ID NO: 9149 - DNA, 83 bp, Chlorella sorokiniana
  Clone ID: LIB3602-119-Q1-K1-B8
ggacataataataaatcaaaaactacaccctataaccaactaaatttcatgaacgtaaaacaaacaacacacaaaaaaaccac

SEQ ID NO: 9150 - DNA, 172 bp, Chlorella sorokiniana
  unsure (1)..(172): unsure at all n locations; Clone ID: LIB3602-119-Q1-K1-B9
gcgctagctgccgcggatgattatgcacttcgttcctcatggtgaacgttcttaagaccaagaaggccttctgcacagtcaaagagggacgtaagctcaccatgcacaaggtcactcaatacaagacctgcaaggctatgcctctactgctcacagcaagcanctgttacta

SEQ ID NO: 9151 - DNA, 344 bp, Chlorella sorokiniana
  unsure (1)..(344): unsure at all n locations; Clone ID: LIB3602-119-Q1-K1-C10
ggcgggcggagcggttgagcaccagatgcgctccgccactttcattctccacgacttcatgtgtaccagcgggcgggtgcttacggcgctccaaaaggcgcgtgcggtgcgctgctgcatgagcgacgcanngcaagcagcggccagcgcacccaccgtctattccagacctggttgccatcactagggagattctgtaccaccacagcctgctggagccagaggagtgacctgcacctgctgagtacggtacctgcacagnctgctggagactacgtagcgaaatgtttcaagtttagtaccaccgcaaatgctttccctgtaacaggagcagtgacgtgttt

SEQ ID NO: 9152 - DNA, 274 bp, Chlorella sorokiniana
  unsure (1)..(274): unsure at all n locations; Clone ID: LIB3602-119-Q1-K1-C11
gcgacgccctccatgcaccatcctccccatccaccaaatctgccaccccaaacgcacgtccgccgctgcaccacctgccgccccgtgacccgcacccatctgccacccgccacctttcctgccgtcaccgncgcacatcctacctcccacacctcactccatgtccacccttcacccgcgcttcacacagcggctgctgccatgcaaagctgctgccaacccatcatcatgctcgacacncactcancacacgtcaacgtatcaacccatttca

SEQ ID NO: 9153 - DNA, 239 bp, Chlorella sorokiniana
  Clone ID: LIB3602-119-Q1-K1-C12
cacagcgcaaacatggctaccatccgcactcgcaagttcatgaccaaccggctgctgggccgcaagcagtttgtgctggatgtgctgcaccccggcaaggcaaacgtgtccaagccgactggcgagaagctggccaagatgtacgacgtgaaggacctgaactgcgtgttcgtgttcggcatgcgcacccagtttggcggcggcaagagctccggctttggcctgatctacgacaacgt

SEQ ID NO: 9154 - DNA, 144 bp, Chlorella sorokiniana
  unsure (1)..(144): unsure at all n locations; Clone ID: LIB3602-119-Q1-K1-C2
gcgaaaaaaaaaaaaaaaaaaaaagcggncaatctaaaaaaaaacaaacttacaaacagatagcatgcaaaaaaaaaaacaattttccggcggcttttaagggggggggcttgtctacactttcataccttcgttacctttaat

SEQ ID NO: 9155 - DNA, 307 bp, Chlorella sorokiniana
  Clone ID: LIB3602-119-Q1-K1-C3
cgcctctcgcacccccagcactccataccatgggcaacctgtgcagctcggccaaggccgcccagacggtggaccaagtggttgacaaagcagcagagaacaaagagaagattgtgaccggataagacggctggctccaaggctggcctggaccaagcgaagaggacagcgctgccaaagcgtgatcagctctgctgacaagaggcctgaacagagctgactcgcctggcgagtcgccccgtgcacgagctgcctgtgcgcgccgcagtgcccccgcgccagcgcctgcgcgtctaagatcagctac

SEQ ID NO: 9156 - DNA, 81 bp, Chlorella sorokiniana
  Clone ID: LIB3602-119-Q1-K1-C4
agagcaagaagtgaaggtggaccagtgcaagatcgtggtggtggaccaacgggtggagggcggtggctataaagaatccaa

SEQ ID NO: 9157 - DNA, 258 bp, Chlorella sorokiniana
  Clone ID: LIB3602-119-Q1-K1-C6
gcgcgcacccacaggcggtggctgcgctgcgcgccaacgagcagcgcctggtcacagcctacgacttgcacaccacgctgcaccacctgctgcacctgggggagtcggcccagcccacggcgcacagtatggcggctggacggcggccggcaacgtgagccagtcggtgcgctggggcgtcagcctgctggacgaggtgcccacggcgcgcacctgcgacgatgcgggagtgcccccagagttctgccagtgctttct

SEQ ID NO: 9158 - DNA, 216 bp, Chlorella sorokiniana
  Clone ID: LIB3602-119-Q1-K1-C7
gcgggcacatttgacccaccacgcccaatggcagtctttgttttctctttgcacccgaccaaccaaccagaaaatagcacccaaccccaaaacgtactaacacagcaagtgcacgtttgcctttcagcttgttgttatgtaccatgcttggcgccgcccattggcagctttgtacagaacgccgagctttcccttgacctgtacatgcttctgtag

SEQ ID NO: 9159 - DNA, 95 bp, Chlorella sorokiniana
  unsure (1)..(95): unsure at all n locations; Clone ID: LIB3602-119-Q1-K1-C8
gcgaaaaaaaaaaaaaaaaaaaaaaaaaaaaaaaaaaaaaaaaaaaaaaaaaaaaaaaaanaaaaaaaaaaaaaaaaaaaaaaaaaaaagaaang

SEQ ID NO: 9160 - DNA, 321 bp, Chlorella sorokiniana
  unsure (1)..(321): unsure at all n locations; Clone ID: LIB3602-119-Q1-K1-C9
gcgctcgtgctggcgaggggggcggcagcggcgggccggccgcaggcgctgcagcaaaagatggcagcagcctggcggagctgtgccgcaagtttgagcgggagctgctgcttgaaaaggcccgcagcgcgcccagctcgacctgcaagtcagggcgctgtgcatgagagctgacccgcgccggcgcaagagcagcagcccagatgcaggcggncgctgcttgcccatgnctgggcggcggttgaagtcgcgccctggtgccagnnntgctgggcctgaaaagcacggtcccgcggcttgtgggctggcgggcggcaagtg

SEQ ID NO: 9161 - DNA, 54 bp, Chlorella sorokiniana
  unsure (1)..(54): unsure at all n locations; Clone ID: LIB3602-119-Q1-K1-D11
gcgaaaaaaaaaaaaaaaaaaaaaaaaaaaaaaaaaaaaaaaaatnaaggaaaa

SEQ ID NO: 9162 - DNA, 391 bp, Chlorella sorokiniana
  unsure (1)..(391): unsure at all n locations; Clone ID: LIB3602-119-Q1-K1-D12
agaagctgcaggacagcaccggcctggaccagaacacgctgctgtacttcaacaacgtgctggcgctgccgctcatggccggcttcatgctgctggccaccaacgaggcagccgaggtgggcgctacccgcagctgtgggacccccactttctgctgttcctgctgctatcgtgcagccaggccttcctgctcaacttgtgcatcttccgctgcacgatggtcaactctccgctggccaccaacgtgacggngcagatgaaggacatcctgaccaccgcgctgggcatggtcatcttccaggatgtcaagtattcagcgatgaacatcggcggcatcctgctggggctggcagggtcggtcacctactncgcggtctcctacttggagagc

SEQ ID NO: 9163 - DNA, 98 bp, Chlorella sorokiniana
  unsure (1)..(98): unsure at all n locations; Clone ID: LIB3602-119-Q1-K1-D2
gcgaaaaaaaaaaaaaaaganaacaaaaannaaaaaaaaaaaaaaaaaaaaaaaaaaaaaaaaaaaaaaaaaaaaaaaaaaaaaaaaaagagggaaaa

SEQ ID NO: 9164 - DNA, 81 bp, Chlorella sorokiniana
  unsure (1)..(81): unsure at all n locations; Clone ID: LIB3602-119-Q1-K1-D3
gcgaaccgaccgcatgcccttgtgccatttcactcgcaaccgactcatacacatagctgactgtaacaatagactgncnna

SEQ ID NO: 9165 - DNA, 338 bp, Chlorella sorokiniana
  Clone ID: LIB3602-119-Q1-K1-D5
aacgtcccgaaaccaagaagccttctgcaagggcaaggagtgccgcaagcacaccatgcacaaggtcactcagtacaagaccggcaaggcgtcgctctacgcgcagggcaagcggcgttacaccgcaagcagtccggctatggtggccagaccaagcccgtgttccacaagaaggccaagaccaccaagaagattgtgctgcgtctggcctgcaccgtgtgcaaggcccagcacatgcacgccatcaagcgctgcaagcacttcgagatcggcggcgacaagaaagtcaaggggctatactagtaaaaaaaaaggaaagcgggcaggcggagagcatg

SEQ ID NO: 9166 - DNA, 357 bp, Chlorella sorokiniana
  Clone ID: LIB3602-119-Q1-K1-D6
ggcggagttcgtgaacaggggcgtgcagattgcggctgagctgaagaagtccacgggccccaagctcaaggacttccgggaggcgctggacaaggaggagcccgccgcgctgggcgcgctggcgccgaggtggaggactttgccaagcagttcccgactgttggctttgagaaggccgagatgcgctacaagaactgagcgaccccgagtgcagagcgtgccatgcagctgctgtgtgaatgcagggcgtctggggcccagtcgctttgcctaatcctcccgccagtgggggcgctgatgcgccctcagctgccatggcacgcctcctagatttcattgctgctgcccacccaattt

SEQ ID NO: 9167 - DNA, 165 bp, Chlorella sorokiniana
  Clone ID: LIB3602-119-Q1-K1-D7
tggcgttcagtctgcaaagcctcgacaggttcttcccgcatccagtggcgtccccgcggcacgcagttacgggttggggctgcgagcgcggcagtctcccgttttccgcagcctggcaggccaggagcagaggcatagcagcgcagcagcctcaggatggctagt

SEQ ID NO: 9168 - DNA, 533 bp, Chlorella sorokiniana
  unsure (1)..(533): unsure at all n locations; Clone ID: LIB3602-119-Q1-K1-D8
gcggatcattgccgaggagaacgcacccgcccgccccctcaccgagctctttgcctcagtgtgaagcaaaaccaatgtggcgccacctgccaccaaggcgccttgtgcagctggagtattgtacagctgagtgggcaacatgacccctcacagagctgtttgactcggtgtgaggcggctttcaactgaccaaggcagcagcagcttgcctctgtccatgcttagcagcggagatggacagcttgttgcttcatgcgaggggactcaacatccgttacagcaacgttgggcgttgtccggagcaaggcgccatttgctgcgatgcagccgcagcagcagagcctatctcgcctcccattctttcattcgcnctcgatgaaagtttcctttcccccccaatgccttcccccacccaacgtgttttgggaaatttaaaaaaaaaagaaggcgccccccccccccccccgggggggggcccccccaaaaaatattttttttttttttttttgttttgggggggggggggggggggg

SEQ ID NO: 9169 - DNA, 122 bp, Chlorella sorokiniana
  Clone ID: LIB3602-119-Q1-K1-D9
ggggcgagttatcacaaggggcacccacaagttggcaacagaaacaagcacggggcctgtaatgaggcaggaatacacaaaaccacactcatcatcacatggctgttcgttctatatcgcga

SEQ ID NO: 9170 - DNA, 331 bp, Chlorella sorokiniana
  unsure (1)..(331): unsure at all n locations; Clone ID: LIB3602-119-Q1-K1-E1
ggctgagaagcgcatcgacgccgacctggacgcctacatcgccaaggcgtactggactgagggccgcaacgagctgcgccgccaggtgggcaccctgcgcttcgacctgaacgcggtggccgacaccctgcccaaggccgccaagaaggaggcgcaggccgccaagaacgagttcctggccgccgtggaggcgctggacctccagctgcgcaagaagaacggngacaaggccgccgctgccctggctgacaccaaggccaagctggacgccgtgatcgccaagctggcgtaagcacccgccagccaggcggctggccggtaccacccggac

SEQ ID NO: 9171 - DNA, 165 bp, Chlorella sorokiniana
  Clone ID: LIB3602-119-Q1-K1-E10
gcgccccgctgtcctccactccttcagtttgccaatcacctccccgctccacctcccccgctgtcctccactccttcagtttgccgatcacctccccgctgcagctcccctggcggccttcactcttcagtttgccaatgaccttcccgcttcaccttccccggt

SEQ ID NO: 9172 - DNA, 290 bp, Chlorella sorokiniana
  unsure (1)..(290): unsure at all n locations; Clone ID: LIB3602-119-Q1-K1-E11
gcggcggcctggacgaccgcatccagcagagcgagctggaggcagagttcggacgctacggccgcgtctcggcgacctggattgcccgcaacccgcctggctttggcttatcacctttgagcgagcgtgatgccgatgacgccgtggccggcctggacggcaagaacgggtggaaggtggagcgcgcccgccccgggcgccgcgacggcggaggcgggggccgcggcggcggcggctacggtggcggcggctacggcggtggcggctaccgtggcngcggcggcggcggt

SEQ ID NO: 9173 - DNA, 123 bp, Chlorella sorokiniana
  Clone ID: LIB3602-119-Q1-K1-E12
gtacaatctcaagcggcaggagatggagggcgcggaggcggtgctgtcctccaaggccgagcgcttcttcgtgctggtgcagacggacaacctgtggaaggagcacctgatggccatcaagtt

SEQ ID NO: 9174 - DNA, 354 bp, Chlorella sorokiniana
  Clone ID: LIB3602-119-Q1-K1-E3
gaggtgcgggagacgcaccgcgtgctggcggagcgaggcatccccctggccgtcaaccaggtggagttctctctgtgccacgccctgcccacgcgcaacggcctgctggacgcctgtaatgactgggggtcagtgtgatggcctacagcccgctggccatgggccgcctgaccggcaagtactcaagcaccaaaaagccacagggggcgcgacggttcggggaccacagctttgaccgcattcagccaattgtggatcggctgacagccctggggcaggcgcacggtggcaagacgcccgcacaagtggccctcaactggctgatttgcaagggtgcaatgcccatcccgggag

SEQ ID NO: 9175 - DNA, 54 bp, Chlorella sorokiniana; identical to SEQ ID NO: 4532
  Clone ID: LIB3602-119-Q1-K1-E4

SEQ ID NO: 9176 - DNA, 141 bp, Chlorella sorokiniana
  unsure (1)..(141): unsure at all n locations; Clone ID: LIB3602-119-Q1-K1-E5
gcgctcgtgcacaccgcctttgaggctgagctgctgccgttccccctttttaccactaccacaacttgcaagcactgtcatcccacgcgcaccgncgntgctgcccccctgtggcatttcactgtcctgctctaatggggc

SEQ ID NO: 9177 - DNA, 192 bp, Chlorella sorokiniana
  unsure (1)..(192): unsure at all n locations; Clone ID: LIB3602-119-Q1-K1-E6
gcgcgcccggcttgccgttgccctgcaccacgttcttgcccctttgactggaactgccccgattcgctgttgttgtctccatccctgtgacaaggagccgncgggngaaaaaaaannaaaaaaaaaaaaannnnnnaaaaaaaaaaagggcgggaggacaaaaaaaaaagaaaaaaaaaagagnnnaggggg

SEQ ID NO: 9178 - DNA, 317 bp, Chlorella sorokiniana
  unsure (1)..(317): unsure at all n locations; Clone ID: LIB3602-119-Q1-K1-E7
ggttccccgcctcatgggcctatcgtcagactgcctggatcttttgagccggatctttgtgggggatcccgcgcagcgcatcgacctgaaaggtatccagcggcacccctggtacctaaaaacctgccggcggagtgccagaatggcggcgtgcttgcttgcggcgggagcccgccgcccaaacggaggagcagcttgtggcagtcgtgcaggcggcacgagccagcgcagatgatgagcggcggccgtgcancacgtggcagttgagcttctggctgcggctgaggtgtcngcagatctagaggacgacgtgtctg

SEQ ID NO: 9179 - DNA, 313 bp, Chlorella sorokiniana
  Clone ID: LIB3602-119-Q1-K1-E8
ggcggaagcggcacaactacgtgcgcaaggtggcggagctggcggtgcagttcttcatcaccgccgaccggccaaacgtggcgggcctggtgctggcgggttcggccgacttcaagacggagctgaccagtcggacatgtttgacccgcgcctgcaggcggtggtgcttgcagtggtggatgtctcctacggcggcgagaacggcttcaaccaggccattgagctgtcggcggagacgctagccaacgtcaagtttgtgcaggagaagcggctgatcagcagcttcttcgaccagatcagccaggacacgggc

SEQ ID NO: 9180 - DNA, 292 bp, Chlorella sorokiniana
  unsure (1)..(292): unsure at all n locations; Clone ID: LIB3602-119-Q1-K1-E9
gcgagcggagcagggagcaagcgccatggctcccgcagacaagagcaaggccgccaaggccgccaaggcggtcaagaagagctccttcaagaagacgaagaagccccgctacagcgtggtgttccacgccccaagaccctcgttcgcagccgggaccccaagttcccccgcgtcagcgcgccccgccaggcccgcctggatgagcactccgtgatcaagtaccccctgaccactgagtccgccatgaagaagatngaggacaancacaccctgntcttcatcgtggacgtgc

SEQ ID NO: 9181 - DNA, 303 bp, Chlorella sorokiniana
  Clone ID: LIB3602-119-Q1-K1-F1
cgtggccgcctctggcgccacccgccgcgtgacctccatgcgccgcaccgtgaaggccaagcccgtcaagtccgacagcgtgtggtacggcccggaccgccccaagttcctgggccccttctcgatggcctggtgcccgcctacctgaccggtgaagttccccggcgactacggtgggacaccttggctgtcgcgacccagactcagagaccgacatgagcatcacccgtggctctgccctggtgattccaggtgaagcacgtcatcgagcgggtagtgccaattgtgcggcgatcggatcgc

SEQ ID NO: 9182 - DNA, 401 bp, Chlorella sorokiniana
  unsure (1)..(401): unsure at all n locations; Clone ID: LIB3602-119-Q1-K1-F10
gcaacggcgacggccgcatcacactggatgagctgcgagagggcctgacccgccacaacaagctggctgactcagagattgagcagatcctgaaggacatagacgtggacggaaatggcgtgatcgattacgaggagttcctggcatccacggtcaacctgtcgctgctggagcgggaggaggtgtgcatgaaggcctttgccaagctggacaaggatggcagcggcacgctgaccgctgatgaggtggctgaagccatgggctgcacggngcgcatgtctgagcaggaggtgcgggatgtgatagcgcggtacgatgtcaacggtgatggcatcatcgattattcagagttcctcaagatgnctgcggagaacgactcgcagctaccgcgtgcgagcgac

SEQ ID NO: 9183 - DNA, 136 bp, Chlorella sorokiniana
  unsure (1)..(136): unsure at all n locations; Clone ID: LIB3602-119-Q1-K1-F11
cggagacggnggcgcacatgatcacgcccctgcccggcgccacccccatgaagcccggctctgccacgcttcccttctttggcgtggagcccgccatcctggacgacaagggcaacgagttgganggggccctgcc

SEQ ID NO: 9184 - DNA, 89 bp, Chlorella sorokiniana
  Clone ID: LIB3602-119-Q1-K1-F12
accccaacctggtgcacgctcagtccatcgtggccatcctgctgacccaggttgtgctcatgggcctgattgagggctaccgcgtcaac

SEQ ID NO: 9185 - DNA, 222 bp, Chlorella sorokiniana
  Clone ID: LIB3602-119-Q1-K1-F2
agaaaaaaaaaaaaaaaaaaaaacaaaaaaaaaaactaaaaaaaaaaaaaaaaaaaaaaaaaaaaaaaaaaaaaaaaaaaaaaaaagaggaacaataataaaacaaaagaaattacctaaatacctattctcaatggggggggggcccgttttaaaagaaccaaattttactccccgttctatggaaggtatattttttttttttgggcccctaaaataaat

SEQ ID NO: 9186 - DNA, 252 bp, Chlorella sorokiniana
  unsure (1)..(252): unsure at all n locations; Clone ID: LIB3602-119-Q1-K1-F4
cgcgcgatgctggatgctgctcctgaattagcgctggcaaagatggagacggnggccaccccgctgcacatggctgcccagaagggtcacgatgaaacggtgcgagtgctgctgagtgcagagccagcagcagcttggtggagcgnncctgcttgaagggcgcnnccctggcgcgtnntagccaccccttctgtaccttgggcgagcnnctcgaggggcattgcctgnnncacagtgcggcaagcttgcttg

SEQ ID NO: 9187 - DNA, 207 bp, Chlorella sorokiniana
  Clone ID: LIB3602-119-Q1-K1-F7
ggggggccaagtcgcttcccgcgcctcagatgcctattcgtttggcgttgtcatgtgggagctgctgatgctgcgcgtgccgtgggccagcatcactgctgcgcagcagtggcaggtgcgtgctgcgcctctctttgtcacaatccctgctattggggccctgtcagactgggccaggcggcgattggaatcaaccctgtgcaatgt

SEQ ID NO: 9188 - DNA, 147 bp, Chlorella sorokiniana
  Clone ID: LIB3602-119-Q1-K1-F8
gcgggaaggacagagtgactcactgctcttatacatctcttctggaggcgcacttgtggacgcgcgtgtcttgcagcacttgagggggaaggattatgatgcgctctagctcctaaactagcctgctccttgcgaacatcactcgca

SEQ ID NO: 9189 - DNA, 273 bp, Chlorella sorokiniana
  Clone ID: LIB3602-119-Q1-K1-F9
caataacatgccaatgcccacgccctcgcggttgaccaacttcaccttgctcctaactcaatgcatcttttgcccaacacctccttgaccgccctgccgctgtcctgcgccctgcaacctgaccccagtccctcacttcttttcctaaaccttccaaaatcagtttacaacagtgctttcactgtctaacacattagatgctgccagtctgcattcgagtttcttctgggcagccgcatacttgccgtatctgccttgcaagcagagctgatg

SEQ ID NO: 9190 - DNA, 261 bp, Chlorella sorokiniana
  unsure (1)..(261): unsure at all n locations; Clone ID: LIB3602-119-Q1-K1-G1
gcgagctacgccaccaagtccaacaagcagcggatcctgcggacccctggcggcaagctggtgtaccagctggccaagaagaagacctgccaccccacctgccccatctccggccagcggctcaatgggctgnccgcggtgcgccccaacagcctgcaccgcgtgaacaagagcaagaagacggtgcaccgcgcgtacggcggccacctggcggcgggcgtggtcaaagagcgcatcgggcgcgccttcctgggggaggag

SEQ ID NO: 9191 - DNA, 73 bp, Chlorella sorokiniana
  Clone ID: LIB3602-119-Q1-K1-G10
aaaaaaaaaaaaaaataataaaacaaataaaagaacatacaaataaaaaaaaaacaaaataaataacaccaat

SEQ ID NO: 9192 - DNA, 186 bp, Chlorella sorokiniana
  unsure (1)..(186): unsure at all n locations; Clone ID: LIB3602-119-Q1-K1-G11
ggcggcatgccctccagccccagcgcaacgcacagcgggcgcagcagcggcggcagcagcaccaccagcagcggcggcggcggcggcggcggcggcgggccactgcggngtgtgacggtggggggcccgggcgcctgcacnncagcagaaagctttggcggcggcgctttggtggcggcgggcggc

SEQ ID NO: 9193 - DNA, 100 bp, Chlorella sorokiniana
  Clone ID: LIB3602-119-Q1-K1-G12
ctcacccactgctgcgctccagaccggcgccaccgaggttcaggttccttttgccggcggcgaggtcacgctgatggccatccggctgagcgacctgatc

SEQ ID NO: 9194 - DNA, 360 bp, Chlorella sorokiniana
  Clone ID: LIB3602-119-Q1-K1-G3
gcggcgggccgccatcaagaaggagcgcatctcgcgcaagaagaccgaggccgccgagtaccacaagctgctggtgcagcgcctgaaggagcagcgcgagcgccgctccgagtccctggccaaaagcggccatccgcatggcctctgttgcctccaaagaggcgtaagccgccctatgccgctgcatagggccctgcgctgcttgtgagcagggccgccggccagccggcagctcctgctgtgcacgcgcgacgggcccacaccttgacgtactatcagacccacgagcctgctaccaaaacgttgtgaagcgaataaaaaaaaaaaaagggggggcccccgtttttttttggggggggg

SEQ ID NO: 9195 - DNA, 75 bp, Chlorella sorokiniana
  Clone ID: LIB3602-119-Q1-K1-G5
gggcgccacctcacgtgccagcccggtgcctgcgcctgcgccgggggggagtgcagcagtgcctctcgagctgca

SEQ ID NO: 9196 - DNA, 104 bp, Chlorella sorokiniana
  Clone ID: LIB3602-119-Q1-K1-G6
gctacgggccgtgactgtcatccagacgtggctgagggtggaccgtgctgtgtggcaagcagcgcttctccaacgtggacatccggatgcgcgtcaagggcggc

SEQ ID NO: 9197 - DNA, 53 bp, Chlorella sorokiniana
  Clone ID: LIB3602-119-Q1-K1-G7
gcgaaagataaaaaaaaaaaaaaaaaacaaacaatataaaaaaaaccaagctt

SEQ ID NO: 9198 - DNA, 236 bp, Chlorella sorokiniana
  Clone ID: LIB3602-119-Q1-K1-G8
cgcagggctcgggagtgcctgacgaggtggcagaggcggcggccgctcgcaccggcgcggcacgcatggaggactgacgcggcggtggcaggggtgcaagcggcgatacagtgaaagcgccagcctgcactccagttgctgcgtctaaacctaactgctgctgagctagctaagacatactcttctagctggtttcgcaatgtttgcatggagtttagcaccatgtagcgagttgc

SEQ ID NO: 9199 - DNA, 169 bp, Chlorella sorokiniana
  Clone ID: LIB3602-119-Q1-K1-H10
gcagcgacaacttcacgcacattctgcgtgtgctgaacaccaacgtcgatggcaagcagaagatcatgtatgcgctgaccgccatcaagggtatcggccgccgcttctcaacatctgtgcaagaaggctgaggtggacctgagcagcgcgccgcgagctgttgcgagag

SEQ ID NO: 9200 - DNA, 73 bp, Chlorella sorokiniana
  Clone ID: LIB3602-119-Q1-K1-H11
aaaaaaaaaaaataaacagaaaaaaaaatgtgcatggatataaaaaacaaaaaaaaaaaaaaaaaaatatgta

SEQ ID NO: 9201 - DNA, 258 bp, Chlorella sorokiniana
  unsure (1)..(258): unsure at all n locations; Clone ID: LIB3602-119-Q1-K1-H12
gccgtcagttcatgcaaccccaaccatcagccgtcgcaccgtgatacccccgttgcaccaatcctccccgccagagagcgcgcttgctctcacgcccacatttcaagctaacacttgacccttgaacttttttgcccgcccataatccccntncgtcaatgaaaacgaatgntatactgccccttctgcacccttcattntgcgcactggcacagttttgccctgatgctctcaattcgcgagcgcttcgatccgtct

SEQ ID NO: 9202 - DNA, 360 bp, Chlorella sorokiniana
  unsure (1)..(360): unsure at all n locations; Clone ID: LIB3602-119-Q1-K1-H3
gtgggcgttggtgggccttgtgacagccaccgctgtggccgcaggtgccaattggcactggcctgctgcacttgctcccgcctgacgcactgttgctgcactcctgaccctctgtgccataccctgtgccctctgttccgcctgttttccaagcttttcagctcctgctagccgctgccgctctcgctcgctcccattttcagctgctcccgcccctgcccctgtcccccaattttgcaacggttcagccgggtgcaccggcttgcttgcactgtgttcgcaccgcattcattcaggtgagccgcgctcttcggnccagcagccacctgtaactcccctgctgtgaaaacacacacacat

SEQ ID NO: 9203 - DNA, 299 bp, Chlorella sorokiniana
  unsure (1)..(299): unsure at all n locations; Clone ID: LIB3602-119-Q1-K1-H4
gcgattcaagggagccatcatttgaatgaacagtaactagcaacagtccccgctcagtgcttttcgcgccacgaaaaacagcatcctgcttagaacgtcctgctctgaatgtctngtgctgacatgtcctgctcacaacatcccgccatagcgccccgctctttgcccattgtttgcatgcaacccgcccagcaatcctgtttgccttcattcatttaacgccctgtccgtctctgccctgtgtcccgccccattctttgcccctgtgtggtctggtcgcccagcggtcgtcatgccat

SEQ ID NO: 9204 - DNA, 170 bp, Chlorella sorokiniana
  unsure (1)..(170): unsure at all n locations; Clone ID: LIB3602-119-Q1-K1-H6
gagtgaccagaacttgacatagctgcaactttcgacgcccaaactggttacttgcacgtgcaccagcccagccggcttggtgccgcttgcatgacgcanagctagcttacccctttctgataaccatgctgtgttttgcgctcatctctgttcgccacagagtactgact

SEQ ID NO: 9205 - DNA, 185 bp, Chlorella sorokiniana
  Clone ID: LIB3602-119-Q1-K1-H7
cgctcggcaagcccggagagcgcggccagaagcagggcgaggctcagactgactacaccaagatgctgctgctgaccgtgccgcccgcgctcattgttggcggcacgctgattggcgccgacctgctggcgggcgctccccctcatgcacctgccccggcacccgtgggcgtgggtgggtgtggt

SEQ ID NO: 9206 - DNA, 362 bp, Chlorella sorokiniana
  unsure (1)..(362): unsure at all n locations; Clone ID: LIB3602-119-Q1-K1-H9
cggacgcgtgggtgccaaccaagcacgcctgtgcagcacccgcccgtgacgcgagcaggggcctctgagaggcccctttctgtctcgccgctccgctctccagctgtgttcaatctgtcgcagttctgccgtcccgcctcacccctgccgaccgtcctgttgtggcctaacgctgtaccaagtctctgctgaccgncgtccccttcggccgtgccccagcgcccctgctcacctcccctcttgagactgctcctccgtgcttgcggcgaatgggctcctgtagattagacagcccccatgcgtacccaccactgtgccctcttttcctgtactctcgccggccggggggcgcacacacatgc

SEQ ID NO: 9207 - DNA, 291 bp, Chlorella sorokiniana
  Clone ID: LIB3602-102-Q1-K1-A1
cattgtgaaggcgggaagcaccaagattgaggagggcgagttctttgccattgagaactttgggttcaccgacataagctacctgcgggaacacctggatgtcacccgctacattaataactttgatgtggggcacgtgccgctgtgcctgtcgcgcgccaaggggctgttgtgcaccatataccgccactttgggacgctcgtcttctgtcgccgctacctgtaccggctgggcgaggagaaatatcttatggcttttaaaaatatgtgcgacgcctgcattgttgaccc

SEQ ID NO: 9208 - DNA, 488 bp, Chlorella sorokiniana
  Clone ID: LIB3602-102-Q1-K1-A10
cggacgcgtgggcggacgcgtgggcaagcccttcgtgctggaggaggacctagcagccagtgcgggcggtgacgatgcattcgaggcgtactgcgctgagctggagggcacggcagcctggggcggccaggtggagctgcaggcgctggcgcaggcgctgcagtgccacatccaggtcttctctgtggggctgccggtgctggagctgggggaggagttcaagggcaccgggcgcacgctgcggctgtgctacctgcggcatgcctacggcctgggagagcactatgagagcgtggtgcccaacctggcagcggcagcagcagccgaggaggaggaggaggagggtggcgatgaggcggcggcgacggaggcggcggcggaggcggcagcagagtgaatgctggagtgtgcttgcaatgctgcaacgatgctcatgttggcttgaagattctcgaaacaccgtccaatacagcttgaaacaatgctac

SEQ ID NO: 9209 - DNA, 501 bp, Chlorella sorokiniana
  unsure (1)..(501): unsure at all n locations; Clone ID: LIB3602-102-Q1-K1-A11
ctgacgcgccacacctggcatcccggccgccggccaacgggccggccgttgggctggccgcgttagcacctgtgcatgttggcgcaggttggctaaaccgagcagattaggaggagttggtaccttcacatcacaagacagcatgcgctcttgcgagactgcccgtagagcctgacatttttcggtttttgccactctgcacgttttcgctatgagcgctcatctacagcagtacttggctcacactctcacaccttatcttaccctgttgcattgctctcttgctacctgcctgaagctggccttggcgtacttacaggctgcaatactagttgggccacaggctctacgtggacaagaaaccattgtacgggtctcttctctgctctattttccaaaccctcatctgcaccgcattgatatataagaacactgcatgccgcatgttacacatgccgttgtcnaacaggtggaactatttgatttaatgcaaagtaggcc

SEQ ID NO: 9210 - DNA, 452 bp, Chlorella sorokiniana
  unsure (1)..(452): unsure at all n locations; Clone ID: LIB3602-102-Q1-K1-A2
ccgccgagatcttcggcgacgacggcatccagtacctgggcatccccggcctgatcaacgccaagtccatcgtggcgaccctgatcgtgcaggtggtgctcatgtcgtatgttgagggctaccgcgtcaacggcggccggccggcaccggcctggacgctgtctaccccggcggcaacttcgaccccctgggcctggctgacgaccccgacaccctggctgagctgaaggtgaaggagatcaagaacggccgccttgccatgctgtccatgttcggcttcttcatccaggccatcgtgaccggcgagggccccatcaagaacctgaacgaccacctggctgacgcctcggctaacaacttctacgccctgtacgccaagaacctggcgtaagcacttgtcgtacgaacgtacgaagcccgcgcgcgattgtgcgcnccttgagaagatcaca

SEQ ID NO: 9211 - DNA, 309 bp, Chlorella sorokiniana
  unsure (1)..(309): unsure at all n locations; Clone ID: LIB3602-102-Q1-K1-A3
gcgtgtgctgccggggcctgctgctacctagccagtggcgagcagtagcttccattgggcagggctgcccagccccgtctggttgagcatttagctattcaagacagtatgtgtttgttttgcggtggcgtgntcgttttatctctggtatgtcactccacactcactgcaccaggccccgctgcatgaaatacccgtaccgcttttgccagcctgcttgcccgcttgcgtcaaccaaaattttacaagtcccacaccagcagccttttgccgggctccgcccgactgccacttgtaactgtcagtttg

SEQ ID NO: 9212 - DNA, 504 bp, Chlorella sorokiniana
  Clone ID: LIB3602-102-Q1-K1-A4
cgactactacaacgcacagaagggcgacgcgctctatgcctttgagctggcgctggctctgcagaagctgaacatggacaagctcaaggcctgccactcgctggccgacaagtcggatgacttccaggcccaggatttcctggaggacgagatgagcgcccaggccaaggtggtgaaggagctgggagactatgtgtgcgagctcaagcgcgtgggcaagggccacagcgtcttccactttgatgagaggattgaccagggaggcctgactgctgcggcgtgagctgaccaggcagcaagttgcaaagggcgcagctgcagaaatggcctgcaagcccagcggcgccagcagggcggcaggcgtcggcggcggcaggcgtcggcgtggcatacgcactgatgcccacctgccacacaccactagcttgcgttgaatgatggttgatgaagatggcaacaaatacagctgttcaatgttccattccttgtaaagcagcgagcatt

SEQ ID NO: 9213 - DNA, 422 bp, Chlorella sorokiniana
  unsure (1)..(422): unsure at all n locations; Clone ID: LIB3602-102-Q1-K1-A5
gccgtggcagcagggctggctcaagcgcttgccaacccagcagggcgtgctgcaattgcagctcgcctggcagagctcgcacctgcaatggcagcccggccggcggcggcgccgccgccggcggcacctgcccccaccccggcagtggcaaccgcagcgctgtcgcagctggcgcctgcgctgctgagcagcctcctgcagcagcgcgggcagccttcggcgcagggccagcagcagcagcagcagcagcagccgggggcatgatggtcattggcaaatgggcccccatgcgcatctcacagcagcaaccccgagcacccatgtacagattttggagcccactccacgccctgcctgcaacagtgcttgcggaaggctgatgccatgcccaacagtgcatgtaaagcatgcaaagtgcnnaa

SEQ ID NO: 9214 - DNA, 472 bp, Chlorella sorokiniana
  Clone ID: LIB3602-102-Q1-K1-A8
gcgacttcaagcacctggctgtggacatgttcctgactgaggaggagggcaagaaggtgctcaaggtggactgccactttggcaagcgcaagagcctggcgtccatccgcacctgcacctcgcacgtgcagaacatgatcaccggcgtgaccaagggctacgagtacaagatgcgcctggtgtacgcccatttccccatcaacatcaacatcgagaacaagggcggcaaggtggagatccgcaacttcctgggcgagaagattgtgcgcgtggtggacatgctgccgggcgtgacctgcgagcgcagcgccgccgtcaaggacgagctgatcctgaccggcaacgacatcgagctggtgtcccgcagcagcgcgctgatccaccagaagtgcctggtgaagaagaaggacatccgcaagttcctggacggcatctacctcagcgagcgcggcacccttgtgaggcccgagta

SEQ ID NO: 9215 - DNA, 456 bp, Chlorella sorokiniana
  unsure (1)..(456): unsure at all n locations; Clone ID: LIB3602-102-Q1-K1-A9
tgcaaacgcaaaaatgtggcgtgagcgaggctggcggccgctccactgcccacaaccctggccagtgcaaggccagccgccagccggccgctggaactggaccagcagggtgtggaacaggttgtggctgtgagatggcagctccgcaacaacccctagctgaggttggacaaggtgctcaccagccagttaatcaggaggacttcgaggagctcttggcattcgccaccgctcccccgtggaaccggtgcgctgccaatgcaggccgtaacgcgcaagtggatcatggtaggtgctgctaaatacttgtctatctaaatatggccatgcgctgcacaacgcacaagccgggaacggccgcgcactaggcaggtgactggcatcagcagggcggcagctntacatcccgcctgggctttgtgatgcggcgccgtggactcagaccaaatggaatgc

SEQ ID NO: 9216 - DNA, 469 bp, Chlorella sorokiniana
  Clone ID: LIB3602-102-Q1-K1-B1
cccttccgccgggggatatctagagattgcaacggcatcaactgtgggaccatgttcatccgcaactccacctggtcccttatgctgatggcggagatgtacatgcataatggcgacggcctgcgggatgggccagggcaatggccaaaatggtggatatatcgtgagcaagcggtgctgtggaaacttctagaggacgaccgcgtccgcaaccacgtaaaagttgtccctcagcggctgttcaactcgtacccaggccatgattgcatctccgagggcacattccaggatggcgactttatgctgcaccttgcaggtttggggaagtcccatttcgatcagtactgggctaagcgcccccgccccccgccgccatcgtctgacgtattgcaaacgaatggccctagcccgccggcactcagcagcgaaaattagccgcatgcggacctggctataatgacagctgact

SEQ ID NO: 9217 - DNA, 334 bp, Chlorella sorokiniana
  unsure (1)..(334): unsure at all n locations; Clone ID: LIB3602-102-Q1-K1-B11
tgaacgtcttcaaggctgcccagccggcgctgctgtacattgtgccgggcgtgctcggcgcgacttttgctcatgccttggtgcgtggtgaggcgagcgccctgttccactggcatgagaaggagcaccanagcagaaggagggggccaaagcgcaggcacaggacgcagccgcaagcggagcggaaagcaagaaggacacgtgaggaaaggccgcagcacagcagtcacgtgcctgcccgtgggtacagcctgcccccttgcactgccccaatgttcctttttgtgtccactgtgtggtctgcaatttttacatgtgagccgcgagcgcnnaa

SEQ ID NO: 9218 - DNA, 190 bp, Chlorella sorokiniana
  Clone ID: LIB3602-102-Q1-K1-B2
gggcggaccccgcctgctgcgcgctcaatgcaacagctgaacatgcgtatctgtggtgtcaaacaaggcgggcaacgcgggcggcaacgccagtgtggggtgtcatcagcacgcatctgtgggcacctgacagactggctccgcattgtcggcgatgtatgactggctgaagatcaggggatgaatgtgt

SEQ ID NO: 9219 - DNA, 258 bp, Chlorella sorokiniana
  Clone ID: LIB3602-102-Q1-K1-B3
cggacgcgtgggcgggccgccaccctgctggacctacatttcattttgcttgttcgacaagggatgcagcctggggcatggctgcttgccactcgtttgattgaaccgaccctcccatccctcttggtcccgtccaatcctgttccgtcatcaccatccgtctgtccttcccgtctccgcacactgctccattgtttttgtctgctagcgttccacatccccatttcattgtacctgcctgcttgtaagcttacgcgt

SEQ ID NO: 9220 - DNA, 475 bp, Chlorella sorokiniana
  Clone ID: LIB3602-102-Q1-K1-B4
gtccgaaaaaaaaaaaaaaaaaaaaaaaaaataaaaaaaaaaaaaaaaaaaaaaaaaaaaaaaaaaaataaaaaaaaaaaaaaaaaaaaaaaaaaaagaaaaaaaaaaaaaaaaaaaaaaaaaaaaaaaaaaaaaaaaaaaaaaaaaaaattataaaaagggggggggcctttttaagggataaaagttttccccccgggggtggagaggttttatttttttttttggggcaccaaaattaaattgcggggggggtttttaaaaacggtggagggggaaaaaaccggggttctccaaatttaatttgtttgggaaaaaacccttttttaaaatgggggataaaaaaaaaagggcccccacctattcttttttaaaaaaatgtccaatctttaaggggaaaggggaccccccctttttgggcttttaaaacgggggggggggggggttttacccctaggaaaacctttttttttta

SEQ ID NO: 9221 - DNA, 459 bp, Chlorella sorokiniana
  Clone ID: LIB3602-102-Q1-K1-B5
cggacgcgtggggcagattcatgatgtggacaatgcggtgcccatgcgccccggcatgccgctcatctgccagccgggcgcccttggcgtgaccgagggcgacgagctgaccgcgctcgtgtttgcaaaggatggcctgctgtacgagcggccacatcagcggcgcggtacgcaagtgggagctgccagtggcgtccagtgaggatgaggatgaggagcaggcgccagcttgggtgccgctcgagggccagcagcagcagcaggggcagcagcagcaggagcagcagccgcaggagcagccgcaaggcgcggcacgatagggcgcatgcagttgaatgacacaatcggcacgtgttttgactccacacaccattctactctagtcaaggacttgtcacaaaactgcggtgcaaaacagtggttaataaaaaaaaatattatatttataagggaacacaa

SEQ ID NO: 9222 - DNA, 325 bp, Chlorella sorokiniana
  Clone ID: LIB3602-102-Q1-K1-B6
gggcatgcaacgccattaatgtgtgagtataatatacacttaatgtgcagttgggtgcacttcgttttactatcacctgtgctgggaaaactctgacgtgctcaatcctaatcatcttgcagttcatcaccttttgatgatctgaccttttatctaaaaggtgatggccgatccagcttcccaacagttgtatatgctgattatccaacgatactctatctgtagcggtacattccgcgggggggccgtgaagcttacttgcacagtggctgttgcgcttagtggaccattacctcccgctgcttatagtgcattaccttttttt

SEQ ID NO: 9223 - DNA, 464 bp, Chlorella sorokiniana
  Clone ID: LIB3602-102-Q1-K1-B7
ggcgccgcaggagggtaaagagcaaagatgccggcgggccagggctaccgcgcgcgtacgcgccacatgttcagccgcggcttcaggcagaagggcttcatcccgctgtccacctacctgaccaactacaagctgggtgactatgtggacatcaaggtcaacgccgcggtgcacaagggcatgccccacaagttctaccacggcaagactggctgcgtgtggaatgtgaccaagcgcgccgtgggcgtggagctgctcaagcaggtcaacgggcggtacatcaagaagcgcatccacgtgcgcatcgagcacgtgacccccagccgctgccacgaggagttcctgcgccgctgcaaggagaacgacgcggcgcggcacgcggccaaggtggagggcaagccgctgccggtgctcaagcgccagcccaagggcccccgcaccgaggccatcatgctggaaaacgt

SEQ ID NO: 9224 - DNA, 411 bp, Chlorella sorokiniana
  Clone ID: LIB3602-102-Q1-K1-B8
agcaggaccagtgaggcagccccggcgtgcgctctcactgctgccgctggccaccggaaccgcgtctcagccagcagctgcgcccagccgcgtgcagcatggcgccctgcctcaccagccagcgctcctgctgtccctgcccgcaccatagcatgcagcacacatttcgtcttgccccccccccctccctccagcctctctttgattattatcctgcattcattcttcctctggcaccagttttgcccacgagcttgcactacacatcatcgtattcgcattctgcccagcccagccggcgcatcccgcactgtgttttgccacctgagaggcgcgtcagccaactccttcacagctgctaacatatatacgttggaacgacaatccaatccgtgcaacacacatcaattg

SEQ ID NO: 9225 - DNA, 260 bp, Chlorella sorokiniana
  Clone ID: LIB3602-102-Q1-K1-B9
gcggcagaccattgaggcaaccccctcataccctctcactgttgcctctatccaccataaccgcgtcatatccaacaactactcgcgtgcgctttcattatggggggttgcctgaccacccaacaatcctgctatacttgcccatacctataacattcaccacacatttcatcttgccatctcctccaatttccaacctctctaaaattattatattccaatattttttattcttgaactttctttactcacaaattttc

SEQ ID NO: 9226 - DNA, 409 bp, Chlorella sorokiniana
  Clone ID: LIB3602-102-Q1-K1-C1
ctgcggggttacatctcactaagctgcagccgcaatcaacggaacgtcgccgccgatcacgctcagagcacgccctccttgaggatatcgtaggggatggccgtgatggtctccatcttcacgttctccagcatgatggcctcggtgcgggggcccttgggctggcgcttgagcaccggcagcggcttgccctccaccttggccgcgtgccgcgccgcgtcgttctccttgcagcggcgcaggaactcctcgtggcagcggctgggggtcacgtgctcgatgcgcacgtggatgcgcttcttgatgtaccgcccgttgacctgcttgagcagctccacgcccacggcgcgcttggtcacattccacacgcagccagtctttgccgggtagaacttgtggggcatgccct

SEQ ID NO: 9227 - DNA, 478 bp, Chlorella sorokiniana
  Clone ID: LIB3602-102-Q1-K1-C10
caccaagatgaaccgcacgattgtggtgcgccgcgactacctgcactacatcaagaagtaccagcggtacgagaagcgccacaccaacatctcggcgcacatctcgccctgcttccgctgccacgagggcgacaccgtggtcatcggccagtgccggcccctgtccaagacggtgcgcttcaacgtgctgcgcgtcatccccgcgggctctggcgccaagaagggcttcggctccttctaagcaggctggactaagggcctcttgccttgctggctgaagccctcgacagcagcagcagcagccccagcacggcatgcaagcgctgcagacgccctgctgccctgagtaagcgccgccatgtgccggcggtggcagcagcaccgcccgccttgcatacacctggcccctaggatgccggccacggggcgcccagtagtcgccagacggcggggcgcagcgcatgtaaccgtgtgcatg

SEQ ID NO: 9228 - DNA, 236 bp, Chlorella sorokiniana
  Clone ID: LIB3602-102-Q1-K1-C11
caccaccattctttaccgctcctgcccgccctatacccccaaatgtatgaagcgagggccttttggtctgcccgccgccggagaatgcatctgatatccgccgccgcacggcgcccagccgacgcacatgctgcgcgccaccacaccacaccgcacctgacgcaccgatttgaccactgctgtttgctccacaccttcacctcgagcctgccatacaatgtgtaagagccacatag

SEQ ID NO: 9229 - DNA, 78 bp, Chlorella sorokiniana
  Clone ID: LIB3602-102-Q1-K1-C12
aaaaaaaaaaaaaaaaaaaaaaaaaaaaaaaaaaaaaaaaaaaaaaaaaaaaaaccccacgcgtccgtttagatccga

SEQ ID NO: 9230 - DNA, 558 bp, Chlorella sorokiniana
  unsure (1)..(558): unsure at all n locations; Clone ID: LIB3602-102-Q1-K1-C2
gtccggggcgaacgcatagaagccactttggtggtttttggtgggccatcaaccaacacgcccgaatcagcgggtctgtcatctcacatatccaatggtnnctcgcggcgagcgacantnncgaaacccagtgcgagggtaatatgtcacagcctgtggggagggaagtcnaagtgcncnnttgtaatggggcnccctggatcccagtgttaccacccccaacatantnncgcttatccattagcagnnaagctggagccctagaagaaatggcngnaatgtgctnnngcataacaaggcnnaacgcgnntttgggaccatatgcnnagagaggccagngnncagcaaccgtntcaagaaagctatatatannagcgaaagctgctngcgacncangnnggcttntnngatttnntgaagnncagagtttgctgagcccgtttagaaaacccaaccagaaatttgtaagcttgagccaccaggcncgtgcatgggtggtcagaccaatgtccacncnncttcacaaagaaagctgtnnatgtaagtccccatgagctt

SEQ ID NO: 9231 - DNA, 402 bp, Chlorella sorokiniana
  Clone ID: LIB3602-102-Q1-K1-C3
ctctgccaatgttgccgcagggcgggagatcagcaactatgctgaggactgtggctgcgagacagtggtgatgggatcgcgcgggctgggcatcaccaagcgcgcgctgttcaacctgctggccgtgggatcagtctctgactatgtggtgcaccactccaagtgcaacgtggtgattcacaaggaccccagcgcggtgaaggcggccgcgggcagcagctcggagtgagagctcttctgtgaatggaaagcggtgaccattcgaagcggcgtggcatggacgcactctttcaccgcgcggcgtggttcggcaccgtctagtcgctgcactctggtctcggtctgtccatgtgggccactctggatgggccatgttcacacattccctgtaaccaccaccag

SEQ ID NO: 9232 - DNA, 481 bp, Chlorella sorokiniana
  Clone ID: LIB3602-102-Q1-K1-C4
gccgacgcgctctatgcctttgagctggcgctggctctgcagaagctgaacatggacaagctcaaggcctgccactcgctggccgacaagtcggatgacttccaggcccaggatttcctggaggacgagatgacgcccaggccaaggtggtgaaggagctgggagactatgtgtgcgagctcaagcgcgtgggcaagggccacagcgtcttccactttgatgagaggattgaccagggaggcctgactgctgcggcgtgagctgaccaggcagcaagttgcaaagggcgcagctgcagaaatggcctgcaagcccagcggcgccagcagggcggcaggcgtcggcggcggcaggcgtcggcgtggcatacgcactgatgcccacctgccacacaccactagcttgcgttgaatgatggttgatgaagatggcaacaaaaacagctgttcaatgttccattccttgtaaagcagcgagcatt

SEQ ID NO: 9233 - DNA, 506 bp, Chlorella sorokiniana
  unsure (1)..(506): unsure at all n locations; Clone ID: LIB3602-102-Q1-K1-C5
caagcacaagaagtcgggcttccacattgacccctaccacggcgacgagaatgcggagctgatggccgacttcttcgagcgctgccagcgggaccccaaccactggaccaagatcagcgaggcggcatggagcgatcttctcgcggtacacgtggagcatctacgcctcgcgcctggtcaccctcagccacatctacacgttctggaagcacgtgaccagcctggagtcgcgcgagaccaagcgctacctggaaatgttctacatccttgagatgcgccgcctggtgtccaagatggcagaggaccaggagcgcaagcggcaagcgcagcaccagaaggaggagcagcaacaaccagggcagcaggcggcggggcacccagccacgccagagctgtagccaccgctgcaccaaatttagccaaatcgtgatatctatccctgctaatctgctgcgctgtccccgctcccgccttgcccgctntgtctgctgcccatcagatgcccg

SEQ ID NO: 9234 - DNA, 340 bp, Chlorella sorokiniana
  Clone ID: LIB3602-102-Q1-K1-C6
aaacacaacccgctcactttgcatggcattctgcaagtgccacccccacggcccctccctttgacctccctccggctttgctttgccgcctcatgtttccctccgtctcccccttcccacttcatttctcctgcaagcgggcagtggctcatgccccctgcgctgccaccccatcgctgctggtctgtgaacctcgctataattagcctgcgtccagtgcccgtttctgcggatgtgtgaccctggtcttcctcccatgatcccagccctcgaatcgagagtgtgactaccgacagccatactatgccatcgtttgctcatatgtaatgatcagtttgcc

SEQ ID NO: 9235 - DNA, 489 bp, Chlorella sorokiniana
  Clone ID: LIB3602-102-Q1-K1-C7
atgccctggatgaggacggcgcggtcagcctgtccaacgaccagccgccggtgcccaccgcagacgagggccgcgtgcagtggtgcgagctgccgcccggccacttcatctccggccgctcgcccaaggtccagcagtttgcgctgacgccgcagcagctgtcgatacgagaaacctacgagcgggagatggacgaagacatctcgccgcgagcctttgctgtgctcgtggaggcgcaggaggaggagatgcggcgctcgctatcggacgagatgcgccgctcccgctccctgtcacccgaccgcgggcacgcagctgtatattaggccagcggggcagccaccaccatatgcccccggctgtgcactactggcgtatgcgcccaggcgcctggagcgcttgtgcgccgaggcgggctgctgccgctctgaacactgctcgccaaatgaagcatgtgctacaacgacccctccgcattaacaacactta

SEQ ID NO: 9236 - DNA, 305 bp, Chlorella sorokiniana
  Clone ID: LIB3602-102-Q1-K1-C8
gacgaaaaaaaagtaaacacagaacgatggccaaaaataaaagacccatgaactagaacagaaagggcaaggaggaagctgatgcaacagctgaaggaagctgaagggggagctgttcggactgcccagtggtcaatgcaccggcttgcgcccccaacaagtcttttcaagatcaacgtggtgcacatgggcattgcccgcgtgttgaccgtggtcaaccgagaaacccttgacgctctgaaggatgcgtacaagggcaagaagtacgtgttcctggacctgcgcgtcaagaagaggcgcgccat

SEQ ID NO: 9237 - DNA, 438 bp, Chlorella sorokiniana
  Clone ID: LIB3602-102-Q1-K1-C9
gccggcagctgtgcctcctgcggccccagcggcgggccccagcggcggtggtgcggcgcaagcggctggcgcaccagcaggcaaaggcgcaggtgctggcggtgccagtggcagcgtggatgtggcatctctggcgcgcgctctggcgggagcaatgggcggcagcggcggcgccgccgccagcgcggccggggctcggccggagggggcggctgcaggcgccggcaggcggcgtagagtgctggtgaccccgcagaagctggccagggtgctggagcgctgcctggcagaggcgggcattggacaggtggcacagcaggcgcagcaggcacatcagccacagccgggcggcgaagggggcggccaaggcggcggccagtcatagtggaccgctgctttttggttgctagtacactggcacacctcttgtgaagcaca

SEQ ID NO: 9238 - DNA, 442 bp, Chlorella sorokiniana
  Clone ID: LIB3602-102-Q1-K1-D1
tggaccaacccttccgcggacgcgtgggaaaaaaaaaaaaaaaaaaaaaaaaaaaaaaaaaaaaaaaaaaaaaaaaaataaaaaaaaaaaaaaaaaaaaaaaaaaagggaaaaaaaaaaaaaaataaagaacgaggaaaaaaaaaaaaaaaaggggggcctttttaaaggttcaagttttccttccgcttgcttgcaaggaaatattttttttttagtggcccttaatttaatttacttggccgcctttttaaaacttcggatttggaaaacccttgggtttcccaaatttattgcctttggggcctttcccatttttcccacttggtgtattacaaaaggggccccccctgttcccctttctaaacatttgcccaccttgagtggaaattgggcccccccttttaactgcccattaagctgggggggggtggtgttttccc

SEQ ID NO: 9239 - DNA, 441 bp, Chlorella sorokiniana
  Clone ID: LIB3602-102-Q1-K1-D10
cgctgatacactgacggagagctacagcgccaccatggccgccaagctgggcctggccgagtacgaccaaggcattgctgccggcctgatgcgcctgatgtacgaggactccgccgactacaccaacaccttcgctgcctgagctccattggcgccgagcctggaagcgaagaggcagatggcagcctgccgtctgccctggcagaggtgctgggcccgctggatgaggaccgtaccgccgcgtggcgccagtggctggagcggtaccgcgcacggctggctgcagagggactgcctcctgcggagcgtgccgccatgcaagactcggccaaccccgccatcattccgcgcaaccacgtgatggtggacatcattggcgaagcggagaccggcaactacgaaccggtgcacaggtacatgcgcgcactgctgaccccatac

SEQ ID NO: 9240 - DNA, 491 bp, Chlorella sorokiniana
  Clone ID: LIB3602-102-Q1-K1-D11
gcttgaccaaccctggtggtgtgacgcggcccgcggctggcatcccgcgcccgcagccgcccgctcgctgctgcttcttgcaagcagcccctagatagcgagcaggcggcacggaagccgggcagccagccgcgcagcttacctgtccatgtgtgcgcctcggcgtgctgttgcagttaccacccgtattttttccctcggttggcgcgcctcccgtgcgtgtactctcccctcccacccttgacggcgacgcgcgcccggctgcccacgcgccccgcgcaattttatgtgccctccgcctttcatcgcagccgcgcattgataagcgacctgagcagaacctgccccctgccgcccccggcaggcgggtgcccctcatttcattcctttccgccgcacaggccgcaacccagtgaccgccgccaatctgctcccctccctcctgcctttgtcccccgatgccttgcaaatctgaccgcacaaaataaaaa

SEQ ID NO: 9241 - DNA, 307 bp, Chlorella sorokiniana
  Clone ID: LIB3602-102-Q1-K1-D12
cggacgcgtgggcgagcaacaggcaaccatgccgtcccagaagcgcttcgccatcaagaagaagctggccaagaaggccaagcagaaccggcccatccctccttggatccggttccgcaccaacaacaccatccgctacaacgccaagcgccgccactggcgccgcaccaagctgggcatctaagcgcctcccacgaggagcagctgacggcagcagccccggcacggcaggcagtgcgctggccgcgcttgcaaggcagcccgtcagtggcatgatgacagcttaagcttgtaacgatggcctagc

SEQ ID NO: 9242 - DNA, 379 bp, Chlorella sorokiniana
  unsure (1)..(379): unsure at all n locations; Clone ID: LIB3602-102-Q1-K1-D2
acccttccgggggaatgtgaccaagcgcgccgtgggcgtggagctgctcaagcaggtcaacgggcggtacatcaagaagcgcatccacgtgcgcatcgagcacgtgacccccagccgctgccacgaggagttcctgcgccgctgcaaggagaacgacgcggcgcggcacgcggccaaggtggagggcaagccgctgccggtgctcaagcgccagcccaagggcccccgcaccgaggccatcatgctggagaacgtgaagatggagaccatcacggccatcccctacgatatcctcaaggagggcgtgctctgagcgtgatcggcggcgacgttccgttgattgcggctgcagcttagtgagatgtaaccccgcagaana

SEQ ID NO: 9243 - DNA, 490 bp, Chlorella sorokiniana
  Clone ID: LIB3602-102-Q1-K1-D3
ggggcggcagtgccggctgtacgagctgaacaacggcaagcgcattaccgttcggggcgcctctaagctgctggccaacacgatgttctcgtaccgcggcatggggctctccatgggcaccatggtggctggctgggacgaggcgggccctgggctgtactatgttgacagcgacggccagcgcaccaagggcaagctgttcagcgtaggctctggcagcctgtacgcctacggcgtgctggacgagggctaccgctgggacctgagtgtggaggatgccattgagctgggcctgcgctctatctaccacgccaccttccgcgacgcggcctcgggcggcacggtgtcggtgtaccacgtgacccaggacggctggaccaaggtgcggggcgaggacgtgggagagctgcacttccgctactacccccagccagaccagcacccatgcaacctggccgaccccctggccgtctgagcgctgtggcacaca

SEQ ID NO: 9244 - DNA, 514 bp, Chlorella sorokiniana
  Clone ID: LIB3602-102-Q1-K1-D4
acccttccgttttttttttttttttggagtccgtatttacagtctgtgcatggctgcactagctcaactgtccatctagctctgccgtatgtcattcgggatgcaatcagtgctgtacaagcggtgcaggggaacagcttgcggtctggtgaacggcggcggcggccttcagcctgcaggcgtggcctcaggcgcctcccagccttcaccgggcggggcaggggtgccgcagccgttgcggccgcaggtggtctcgcaaaagttgccctccaccatccaggactggtcgcacttgccgaagtccttctgctgctggcaggtgtagcgatcatcgggagggacgtcggtgcagggaggcacctgtccctccgcaggagcaggcgcaggagtgggcgaggcctccggagcgacaggcgcagcatggcccgcttccgggccgggcacagcgggggcaggggccgggctctctggcacagcagcagtgagcgtaggcgcggcctcttccactggagct

SEQ ID NO: 9245 - DNA, 492 bp, Chlorella sorokiniana
  Clone ID: LIB3602-102-Q1-K1-D5
caacagctaccgtaacggcgtgagcaccggtagttgaaacgtggagggtagattgtacccaggggaatgtgtagccggggggccacctgcaagcagctgggtgggcatgagggtggagggcagccgggactgcgccacgctccctgtcagctgtgctgcacgacaggcaaggcagctactgacgcctggtggaagtgcgctcagagaaagtatgctcctgttttccctctgcagccgaggactctgtggtggaccgcacccgcgaggtggtgcccggcatggtgagcccagcctgcgcaatgcacttgccagtgtatttccgcccacgtgctcagggttgtggcgcttggtgggcagctcgctggcttgctgaactgtaacctaaccatatcagcaggcagaaaggctgctagcctctgcaccctgctgagacctcgctgtacatacgcaatgcccagcgttctcattctcccgccgctgcaggtcatctgc

SEQ ID NO: 9246 - DNA, 512 bp, Chlorella sorokiniana
  Clone ID: LIB3602-102-Q1-K1-D6
gcgcgcgagctggcggtgattggcgagcagttcccctacgagccgctcaagttcctgcccaagtcgctgcgcctcacgtttgcggagggcatccagatgctgcaggaggcgggatacgacgtggatccctttgcgaccttaacaccgagctggagcgcgcgctgggcaagctggtcaaggagaagtacaacacggagttctacatgctgcaccgctacccgctggccatccgccccttctacaccatgccctgcaaggacgacccccgctactcctgctccttcgacatcttcatccgcggcgaggagatcatctcgggcgcgcagcgtatccacgaccccgcgctgctgactgagcgggcggaggcgctgggcctgccggtggagacgatccagtcgtacctggactcgttcaagtacggcgcgccaccccacggcggctgcggcgtgggcctggagcgcgtggtcatgctgttctgcggcctggacaacatccgcaagaccagcatgttc

SEQ ID NO: 9247 - DNA, 451 bp, Chlorella sorokiniana
  Clone ID: LIB3602-102-Q1-K1-D7
ggcagcagtgcatccagcagcgaatgcagcagcgacagcagcggcggcagcttggcaagcggctgggcaaggctgggcatgggcctaccgatcggctatgcacacccccatggaatggccctgcctgtggcgtgccagttgtcacccgaggcaagatgagcaacctgctcagcaactttgcaaggctctatgtattccttgaggcgagcattggccacaccaaccctcacacggaggctgacgcgctgcatcaagtgcaggagcgactgccggacatgttacctatgatccgacctactagcagaactgcacactgaaatgctgactgtgatcctggtgctgagatgccatccgagcacactgttctacactgtgccacactgtcatacagaatgccatgctatatcttactccatcccgtcttctgtgacatgctcttcgtcatgctcct

SEQ ID NO: 9248 - DNA, 460 bp, Chlorella sorokiniana
  Clone ID: LIB3602-102-Q1-K1-D8
agaaggctcggcccatcaccttacgggacagcaaaggcggacgagcaacatggggcggcggccggcgcggtgctaccgccagatcaagggcaagccctaccccaagtcgcgcttctgccgcggcgtgcccaccccaagatccgcatttatgatgtgggcgccaagaaggcgggcgtggacttcttccctcactgcgtccacctggtcagctgggagaaggagaacatctcgtccgaggcgctggaggcggcccgcatcgcggccaacaagtacatggtgaagaacgcgggcaaggacgccttccacctgcgcgtccgtgtgcaccccttccacgtgctgcgcatcaacaagatgctttcgtgcgccggcgcagacaggctgcagacaggcatgcgcggtgcgttcggcaagccatttggtgtgtgcgcgcgcgtgggcatcggtcagatcctgctgtcca

SEQ ID NO: 9249 - DNA, 505 bp, Chlorella sorokiniana
  Clone ID: LIB3602-102-Q1-K1-D9
tggaggctttggttgacgatgggctggcgcggcacatcggcgtcagcaacttcagcctggcgcaggtggaggggctggtgtcctgggcacgcatcaagccggtgtgcaaccaagtcgagctgcaccccatgttggcgcagcgcaaactggtggatggctgccgccgcctgggcgtgcaacccattgcctatggcccgctgggccatggcaagggtgggctgctggaccacccagtggtagtggaggtggcagaggcagctgccaagtcgcctgctcaggtgctgctgcggcggaacgtgcagcgcgaggtgccggtgatccccaaggccggcagcgagccgcacctgcgcaacaacattgagggcctgtttggctgggagctcacgccggatcaccaggcaaagctggatgcactgtacagccacacgcgctatgtgaacaacagctggcacgactggcgggatggagactaaccagcgtgacatgcagccttttaactggtgac

SEQ ID NO: 9250 - DNA, 482 bp, Chlorella sorokiniana
  Clone ID: LIB3602-102-Q1-K1-E1
tccgaacgtcccgaaaaccaaaaaggccttctgcaagggcaaggagtgccgcaagcacaccatgcacaaggtcactcagtacaagaccggcaaggcgtcgctctacgcgcagggcaagcggcgttacgaccgcaagcagtccggctatggtggccagaccaagcccgtgttccacaagaaggccaagaccaccaagaagattgtgctgcgtctggcctgcaccgtgtgcaaggcccagcacatgcacgccatcaagcgctgcaagcacttcgagatcggcggcgacaagaaggtcaaggggctatactagtaaaaaaaaggagagcggcaggcggagagcatgaccgagaaatggaggcagcggcgcccgctcaccctgggcggcctgctccccgcccggcgcctcgctttggccgcctctggccactcgtacgcctccttgtccatgcccttgtgcttcctgaagctgccaacctggcatg

SEQ ID NO: 9251 - DNA, 421 bp, Chlorella sorokiniana
  Clone ID: LIB3602-102-Q1-K1-E10
ctacgaaaccgcaaagaaggtgctcgcctgagcggatgcccgaccccctagccctagcgcacggcactcctgcagcatgtcagtcagctgccgcgagcaactggcagcacccacagatctgatcgaatcaatgccagcgccccgcctgcctgcgcctgcgctgttgtgggtcctttgtgcgaccctctccgcccacccgccatgcacccctctcagcccatatgcccgtcaaaccccacatggcctcagtcctttcagcgtttttccctcttcggcacgaatgaactgatcggctccgtcagtgacaacccaacccctgtttggcattgcactaaccccttttttccgatgcttggcatgccgcccgtgttcacagctttgcagtaacgcatgagcctcatgtgagaaaggccagtcccca

SEQ ID NO: 9252 - DNA, 256 bp, Chlorella sorokiniana
  Clone ID: LIB3602-102-Q1-K1-E11
cggacgcgtggggacggtgcaccgcgcgtacggcggccacctggcggcgggcgtggtcaaggagcgcatcgtgcgcgccttcctggtggaggagcagaagatcgtgaagaaggtgctgaagctgcaggctgcaaggaggctgcgcaggccaaggccgcggcggcaggcagcaagggcaagaagaagtccaagaagtgagcggcgcacgcgagcggacagttgcgccccatgctcccgctgtaatgcaccctcgatg

SEQ ID NO: 9253 - DNA, 470 bp, Chlorella sorokiniana
  Clone ID: LIB3602-102-Q1-K1-E12
ggacgaggccaccggcgcctcgctcaagctgtccatcctcaacccaaagggccgcatctggaccatggtggcgggtgggttgggcgggcgggtggggcctgaataaagtcgtgtttgcttcgccagccagctgtacacgcaacgggcacagcccctctggcttccttctgatcagacacgagtcgatgtagcccctcgccctgtcccccgcacctgccctaggcggaggtgccagcgtgatctacgccgacactttgggagacctgggctatgccgaagagcttgggaactacgccgagtatagcggcgggcccaaccagcaggaaacgtacaactacgccaagacgctgctggaggcggccactgcgtacccagacgggcggccacgtgcactgattgttggcggcggcatcgccaacttcacagacgtggcggccacgttcaagggcatcatccaggcgttccgagag

SEQ ID NO: 9254 - DNA, 206 bp, Chlorella sorokiniana
  Clone ID: LIB3602-102-Q1-K1-E2
ccggtggtttgcaggcaagtgaatggttggaagcatgttggcctagaccagtcagcacccagccatgctgcgcatgaacccattgcagcccgacagttgcactttgcaccagatccatttcgacttcagcttttttggagttttccttgcttgcaaagcctccacttgttttcaaacagcagcgccctgtaaccgaacgcgcccca

SEQ ID NO: 9255 - DNA, 445 bp, Chlorella sorokiniana
  Clone ID: LIB3602-102-Q1-K1-E3
caagcacgcgtttgacattgtcaacctgctgaccgaccagaacccggtccaggtgctcgtggacgccatcatcaacggcggcccgcgtgaggatgccacccgcattggcagcgccggtgtggtgcgccgccagctgtggatgtgtcgccgctgcgccgcgtgaaccaggccatctggctgatcaccaccggcgcgcgcgagagcgcgttccgcaacatcaagaccattgcggagtgcctggcggacgagctgatcaacgcggccaagggcagctccaacagctacgccatcaagaagaaggacgagatcgagcgcgtggccaaggccaaccggtaaacggctgttgcgcacccaccaaaacagcagcccgccacagccggcacccctgggcaggatgccagaccgccagtgcagcagcacggtgtggttcagctgctgttatcgt

SEQ ID NO: 9256 - DNA, 505 bp, Chlorella sorokiniana
  Clone ID: LIB3602-102-Q1-K1-E4
gggcgtgtggactacctgctgcccggcgcggcgcgcacgctgtcggcctgcgcccgcctggcgcaccgcctgcgcatggaggtgctgctggagcggctggacctgcgcatggaggccgcggttggctcccaccaggcaacgctgcagcggctcatggactggacgcaggtggctgaggagtgcgggctgaagcggctgtggactaagtgcatccgcgagatctgtgtcacgctgtcgcgcggcaagaagggcgtggggccacgcacgacgtccagcaaggacctgcagggtgcgctggctgcggtgcctcccccttcggacaacatgcacacggcggtgcatgacgtggccctgctgaaggacctgagcttgaaggccaagctgagcatcatggccaccctgctggcctcgctgcgccgccagccgggagaccccagcgagctggtgccgccggaggcatgcctggcatctgcactgccggccatgccgctgccacccctacctg

SEQ ID NO: 9257 - DNA, 513 bp, Chlorella sorokiniana
  Clone ID: LIB3602-102-Q1-K1-E5
gccttcacctctgtggagaaggcggtggccgatgcccagaagaaggtcaacggcaactgagcagatgcgagcacccgctgctgaaggccagaagaagtcgagggcaactgagctgagctttgggccaatgcccaccatgtcgagcagcaaactgatcacatttcatccaactgcctttccactggagggcccggtgctgctcaccgcagccccgatgctgcggctcagccgcccacccaccgaggtgctgcccgcccctgcgatgcaacgatccgggtcaccctcccacattttaatcaaatagatatgtttcgggccgggcggcgtggcgggcagatgagccaccataccacgccgcgccgcatgtgtttgctccccctgctttgcttgtgcttgtgactgtcaccccaacccggtttgaacgcccaccccttgaggcttgcatgccttcgcaccccaccccacctctcctgttattggcaccgaaaccaaccctcttgcaccgcttgaacc

SEQ ID NO: 9258 - DNA, 420 bp, Chlorella sorokiniana
  unsure (1)..(420): unsure at all n locations; Clone ID: LIB3602-102-Q1-K1-E6
gccctggcggccgagaccaacgtgcagggcgaggaccagaagaagctggacgtgatctccaacgaggtcttctccaactgcctgcgccagtgcggccgcaccggcatcatcgcctcggaggaggaggaccagcggtggctgtggaggagaccttcagcggcgagtacgtggtggtgttcgaccccctggacggctcctccaacattgacgccggcatctccgtgggctccatctttggcgtgtacgagccctcccccgagtgccgcatcgaggacatggacgaccccgaggccatgatgcagaagtgcgtgctgaacgtgtgccaggcgggcaacgaactgctgtgcgcgggctacacgctctactnctnctccaccatcctggtgctgaccgtgggcaagggcgtgtacggctttcacg

SEQ ID NO: 9259 - DNA, 494 bp, Chlorella sorokiniana
  Clone ID: LIB3602-102-Q1-K1-E8
gctgcggcggcggcggcagcagggagcggcagcggcgtgtcagcggcacggctctcagcgctgctgcagcagcgcagcgtggcgctggctgcagcggcggcaggggatgggccggtggcggtgccccttcaagaggacccagccctctggccagagtggggcgacgcaaatgcaagttccgcagctgccgcctcgcctgctggggcagcagcagccaagcaggcagcggctcacgctcacaggcagcagcagcgcgcctgggaggcagagcgcaacgcggcgctggggctgccgccggcgccgccgcaggcggacgacccagctgcctacatcggccgcctcgacccgctctcaggccggctgctgtcctgggagcacccggtcacctacgcagcggccgacggcagctgcggcacagcagagctgcagccgcggtcccagcttcccatcggcatggcaaaagagggctggcagtcggcgtatgcctgtgccgc

SEQ ID NO: 9260 - DNA, 463 bp, Chlorella sorokiniana; identical to SEQ ID NO: 7626
  Clone ID: LIB3602-102-Q1-K1-E9

SEQ ID NO: 9261 - DNA, 474 bp, Chlorella sorokiniana
  Clone ID: LIB3602-102-Q1-K1-F1
gggcctctcaactgctggctctgggcctgctagcactgctggcagctggcgtgtcaggcgcgctgcctggcccttttgcaaacgagggcgggccaagcttcatcaacggcgcgacgtttctgctggacgaggctggagggattgtcgcggttgctttggtagctgacgacggctacgttgcgggcatccaatccaacggcaccctgctggccgagcgaggcgtgtacacttcgtgggagtgcgccgccgacatgccgggatactaccgatctctggtgcaagtgacggtcaccgaccccactggcgctgtggtggatgagaggacggtgtgtgagctgggcacgatgactgattccgaaaatcgctgggcgcaatctgagacgggctgccccacggtgacaaacaggatcaatagattcttcatcccgcctggtgcagctccccgccaggctgtcaacgagtgtgcagcctgag

SEQ ID NO: 9262 - DNA, 505 bp, Chlorella sorokiniana
  Clone ID: LIB3602-102-Q1-K1-F11
gtgcttgtgggagagaccaaggactcggggcaaaacatgcacaagtttgtgctcacgccgccagaagccccgccgggcggcaacaccagcgcagcagccggaggggcagccgcaggcggtgctgctcagcctgctgggggcgaggccctgactgaagctgagctggcagagcagcaggcactggcggaagccaaggccaaggccgcagcacactttggcggttccacgcacggcgggcagcacgcggcgggcggcggcaagcaggagttggagggtgaggaagctcagcatgaggcggaagcggcggctgtggggcaccgcccggtgcagccggtggatgctgggaaggagccgaaagaggaggaggacgacgaggatgtggagagcattgggcacggcctagtgaagccggtggagaatggcggcgatggcagtggcgacggcagcggcggcagcggcggcagcggcggcagcggcggcagcggcgagccagaaggtggggcgc

SEQ ID NO: 9263 - DNA, 510 bp, Chlorella sorokiniana
  unsure (1)..(510): unsure at all n locations; Clone ID: LIB3602-102-Q1-K1-F12
gcgccagtctcccagtgcctgtgaggcgagcaagcaccggtgtgccacaccagcagaaccagccatgtccctgcctggctacgagcggctggagctgtcgggggtgctagacgccaccacagcccagctggtgcagctggtcattgatgcggtgaagagcggcaagaagaaggtcaagattgaggtggaggttgagggcaagctgtccgaggatggcaagtctgttgagctggagatcgagatcgaggccaaggagggcgaccgcaaggagagccgcgagctggagtactcggtgcccctgtgataaaccactgaaccagcctcaaatctgtacagctgctgcataacacctgctggccatttgtagttgggcgtttgccactccacttgctgcaactggatcaggctgcactgcctgctgttgtgcgtgctgctcaaatgttgcctctcttncatgtgctggcatgccatgtctcgtgttgctttgctgctgtgttggtttaagtgcat

SEQ ID NO: 9264 - DNA, 509 bp, Chlorella sorokiniana
  Clone ID: LIB3602-102-Q1-K1-F2
acccttccgccaacccgtccggtcggcagctgccggatgcactgcttccctccctgcctgccaacccatgttgtcacagcgccgcaaggcgcggttttgccaagagcggcgcccccacctcccagctgctccccaagttttgttagtggcgagttggagcactctagcgccaggcgcgccccaattttcagcccagcgcactcattcatgctctgcttgtgtttggtcagcttttcttgaacccccgccgaacttgcttccattgttctcctccctgccgtcacacgattgcccaccctcacgccagccccaattttgcacagcaacacacccgaaatcctccctcctcccaccatcaccacaccgacccaccacgctgtcgcattgccagcagccaccgtcctgctcctgttgcaagccttgcctctgtttcatctcctgcttgatgtgcttgcctgatgttgctccatggcgccgttgtggggccgcattctccaagcacccctgcg

SEQ ID NO: 9265 - DNA, 386 bp, Chlorella sorokiniana
  Clone ID: LIB3602-102-Q1-K1-F3
ccgcgacctggatctgccccagggcgtgcgcgacggcctggcccaggcccgcgagaacctggacgtggccaaggcccgcatcaaggaggctgagaagcgcatcgacgccgacctggacgcctacatcgccaaggcgtactggactgagggccgcaacgagctgcgccgccaggtgggcaccctgcgcttcgacctgaacgcggtggccgacaccctgcccaaggccgccaagaaggaggcgcaggccgccaagaacgagttcctggccgccgtggaggcgctggacctccagctgcgcaagaagaacggggacaaggccgccgctgccctggctgacaccaaggccaagctggacgccgtgatcgccaagctggcgtaagcacccg

SEQ ID NO: 9266 - DNA, 166 bp, Chlorella sorokiniana
  Clone ID: LIB3602-102-Q1-K1-F4
aaaaaaaaataaaaaagaaaaggcaaaacgatataaaaataaaaaaaaaaattaaaaatactccaaaataaaatctaagggggtgtgaaacctatattcagggaactggacgcctgcttccactttatgactgtacttaacgcctcgccgttacttaaattaatcg

SEQ ID NO: 9267 - DNA, 487 bp, Chlorella sorokiniana
  Clone ID: LIB3602-102-Q1-K1-F5
gcagtttgtgcaggtggagccagacggctcggatgcctggcggctggacccagtggtggaggcgctgaaggagggagcggtgggcatcatccccacagacagcaacctggcgtttgtgtgcgacctgggcaaccgcggcgcggtggagaagctgctgaccatcaagcgcagcaagggcagccagcgcatgtccatcctgtgccgcaacctgcaggacgtggacacgtacacgctggggtggccacccagccgcgcccccggccagcccgacatgttcaagctcgtgcgccgcgtcctgccaggcccgtacaccttcatcctgctggcatccaaggaaatgcccaaggcagtgacaaacgtggacaaggggcgcagcaagaagcggcacgaggtgggcgtgcgcctgcccggcgacccagtggcgctggccatcctgcagcagctggaccgcccgctgctgtgcaccactgcggggggcgagggcgcg

SEQ ID NO: 9268 - DNA, 440 bp, Chlorella sorokiniana
  Clone ID: LIB3602-102-Q1-K1-F6
aatggtattgtgccaccgtaaagactgtatgtggatgtgcttttttttggttttatgtgcactcttgttgacccgaacaaaggttgcatgtgctacagacaccttttcattgtgaacgaatctgtgccctgggcaattaataattttgaccagagacacccactctgagatgagttggaaaaaacaaagcttctcgcagaaccaggaagggaaacaatcctgatcttaaggtggtgtaaaccctgatataaaaaacgctgttgcacttgtttgccaggatgctaacatcaacaaaccactcaagctgagggcattatgatgcccgattgttttgctgcaaaaaatggaagcaacccgagtttattcaattgacatgtgcccgcttagaaaaccacttcaggggggctgggatgtgaaccaaacggcgatgtttttgttgg

SEQ ID NO: 9269 - DNA, 464 bp, Chlorella sorokiniana
  Clone ID: LIB3602-102-Q1-K1-F7
gccctggtgcccgccgctggtgccggcgcacgaggcgctgcagcagcaggagcggcagcggcaagaggagcaggggcgggtggagcggctgaagcgggagcacctgctgcgccgcctgcagctcaaatttgaccacgaacaacccctcgagctgggcggcggcatgcaggtggaccgagtggtgggcagcagccagggagtgctcatagaggagctgcccacacacggattcatggcagcagcagcagcagcggcggcggcagcacctgcagcagtggcaccacatgcggcggcggcaggggtgggcataccccaccagcaagcgcagcagcagtgggcagcgccggcgggccagcagccgtttgcaggcggcggcggcagcggcagcgatgccatggaggaatgaaagcacttcaagtagattttgactgcagccagacatgacgatttttgagggccgactg

SEQ ID NO: 9270 - DNA, 365 bp, Chlorella sorokiniana
  Clone ID: LIB3602-102-Q1-K1-F8
acataccatttgttacacattaagtcctggtaccagatcggcataaggacgcaaaaaggcactgtacagtcgggccttgaaaatgggtctggatacgttggacgtgtgggtgagtgggtgtgcgagcatgatggatgggtttggcagcagctttgcatggcagcagccgctgtgtgaagcgcgggtgaagggtggacatggagtgaggtgtgggaggtaggatgtgcggcggtgagcggcaagaaaggtggcgggtggaaaatgggtgcgggtgagggggcgtcatgtggtgcagccgcggacgtgcgtttggggtggcagatttggtggatggggaggatggtgcatggaaggccttaaacggg

SEQ ID NO: 9271 - DNA, 501 bp, Chlorella sorokiniana
  Clone ID: LIB3602-102-Q1-K1-F9
gcggctctgcaaccatggcggagtccgtccagactttcggccgcaagaagaatgcggtggctgtggcctatgtgaagcgcggcaagggcgagatccgcctcaacggcgccccgctggagctggtgcagcccgagacgctgcgctggaaggcgtttgagccggtgctgctgctgggcaagcagcgcttctccaacgtggacatccgcatccgcgtcaagggcggcggccaggtgtcccagatctacgccatccgccaggccatctccaagggcattgtggccttctaccagaagtacgtggatgagcagagcaagaacgagatcaaggacatcctgctgacctacgaccgcacgctgctggtggccgaccctcgccgctgcgagcccaagaagttcggtggccacggtgcccgcgcgcggtttcagaaatcttacaggtgaaggctgccccgtgggacggttgggcgcctttggaggctttttttgcgccgctggcgtggcg

SEQ ID NO: 9272 - DNA, 449 bp, Chlorella sorokiniana
  Clone ID: LIB3602-102-Q1-K1-G1
acccttccgtgcacgccctgcgcctgcactgggtggagttcaacaacaagttctaccacggcgacggctaccagttcacgcccttctcgttcgagaccatcgacaaggagccgctgtgaggagatcaaggaactctcgtacggtggcagcatgagcagcgcaagcgtttcaaccagccatgaccggcgcaaggagccgctgtgaggcaacgatgctttgcttcaacgccggcagcaggcagcctgagccgtgcaagcagccaacgagcggcgaaggcagccgcccaaccgaagcagccgctcaacgaaaggcaggagggcgcagagcctgagcgtggcggcggcggcacgtggtgctgcactgctgcactgcacgtgctgtgcagcttgttgtgttccttgccgcctgaagaagtacggatgggacatgattttgtaatgctagtgttc

SEQ ID NO: 9273 - DNA, 472 bp, Chlorella sorokiniana
  Clone ID: LIB3602-102-Q1-K1-G10
ccttcgaccccctgggcctggctgacgaccccgacaccctggctgatcttaaggtcaaggagatcaagaacgggcggcgggccatgctctccatgctgggcgtgttcgtccaagccatcgcgaccggcaagggcctccctggacaactcttctgcagcatttggaggagcccggggagttcaacttctacgccctgtacgccaactccctggcgtaagcagcttgtttggagcacctgctgcggccgaggcggcggcgctgagctggcgcaaagcgcggttggcgaccgccgccggctgacgctgttgcccttgatcctattccctttacgcgctcgcatgcgttcccgagctcgctgtatgtagcctgtgtgtgcaattgtgcatcatgcaaaagatactataagaaaactccacccaaacaccataatgactggaaaaccatcctgtacgaaaaggaagctggcgcccct

SEQ ID NO: 9274 - DNA, 448 bp, Chlorella sorokiniana
  unsure (1)..(448): unsure at all n locations; Clone ID: LIB3602-102-Q1-K1-G11
cggctgccttgcacgcatggtgcggcacggcctgctctgcggcccttcatacctttgtacctttctgtatcatcttgcagcaatggcagccggctgcatctttctaacatcgtcaccggcccactcgtttggccatgcccacctgcctccaacgtcacccttcatcaaccctcacccaacccatccacctgccacccatccactcaccttccctccgccacaacctctgccacccactcaccacccatcacccgctcaacgccctccatgcaccatcctccccatccaccaaatctgccaccccaaacgcacgtccgccgctgcaccacctgccgccccctcacccgcacccatcttccacccgccacctttcctgccgctcaccgncgcacatnctacctcccacacctcactccatgtccacccttcacccgcgcttcacacagcg

SEQ ID NO: 9275 - DNA, 489 bp, Chlorella sorokiniana
  Clone ID: LIB3602-102-Q1-K1-G12
tgcccctctctcctgctctcaggactcgcacgacaacagcttcttccgcaagctggccatgctgcgcgaccgctccctgcccggcggccccaacgagaaggacacccgcatcttccgcggctttgcgtaagcccctggcggccctcccggcggcttcatggtgacaacccccgcaccggccagcggcgcaagcgggcggcgagggcccaaggcctgaggcctcccacccctcccttgcccagcttgcggccaccgctggcgctggcgcagcagtggcgagctggcgccactgcggggacagccagcgcggcttggcagcgccgacacttcgctcaggcaaggcggccgcatccgtgctggtgctggcccgtagtgctcgcagccccgcctgctccttgcgctctatgtatgttttatcctccctcgtctgcactgtttttccaccgcacccatttttgcgtgccctgtatgctacagaacgaattatgc

SEQ ID NO: 9276 - DNA, 483 bp, Chlorella sorokiniana
  Clone ID: LIB3602-102-Q1-K1-G2
acccttccggccaggtggtcccagtggggcttcctcttctccgtgctctacctctcggtctgggtcttcgtgggcggcgcctggtggaaggccatcggcatcttctaagcagcagcgctcagcagccgctgccagcagcagctcaagcagccagtaagcagcagcgctcagcagcccttgagcagccgctcttagcaggcttaagcagccgcgacacactctgagcagccgccctcagcagccctgaggagctcttggcaggctctaagcagctgcggcgcgttctgagcagccgcggcgctctgtaagcagcctgcgcctggtgcggccctgccgcccgctcggcagcccactgcacggaccgacccaggcctgccacaccccaaacccacccacccgcccgtattgtttcgcaccgagacacccgaacttccctgcctgagcctttgccttctgatcctctgcacaactgttgttgacccc

SEQ ID NO: 9277 - DNA, 512 bp, Chlorella sorokiniana
  Clone ID: LIB3602-102-Q1-K1-G3
ggtgaagtacgcgaaggaggtggcggagccgaaggccgccaaggcccgcgggtccgacctgcgcgtccacttcaagaacacgcgtgaggccgccttcgctctgcgcaacatggacctgaccaaggccaaggcgtacatgcaggcggtgattgaccacaagcgctgcgtgcctttcctgcgctacaacggcggcgtgggccgcacctcccaggccaagaacgagggcaactcgattggccagggccggtggcccaagaagtcggccgagttcctgctgggcctgctgaccaacgcggagagcaacgccgagagcaagggcctggacgtggatgcgctgtacgtgagccacatccaggtcaacaaggcgcagaagggccgccgccggacttaccgcgcgcacggccgcatcaacgcctacatgtccagcccctgccacattgagctgatcctggcggagcgcgggcaggcggtgaaggccgaggcggaggacaagcgccgcaagctgagcaaga

SEQ ID NO: 9278 - DNA, 512 bp, Chlorella sorokiniana
  Clone ID: LIB3602-102-Q1-K1-G4
acccgcccgttcctggtttcttgccctgcaccagatctccaagcaacgatgcaggctgcccagctccaggctcgcgccacccggcccgccgtggctcgccgcaccaccgtgcgcgtgcaggctcagcaggccgcgccccgcgctcaggcccccaagccccagcagtttgctgctggcctggctgccgccttcgctgccgtgaccctggtgctggcgcccgccgccaacgctgctgaggcccgcgcggaagtgaagagcgtggtgtgcgccagcaaccccacctccaagatctgcctcaaggacagcgccaagaactgaggcgtgccagctggactgagcgagcgctgagcccttgctggccgcacctgaggcaggcagccattgctgactgccggggggcaccgggccgccacccgctgcccggcagcatgggcgaggcggcgtgagaaagagaggacttgtgcactgccacacagttttttggacacctgtgcttgaacatatacttgagg

SEQ ID NO: 9279 - DNA, 468 bp, Chlorella sorokiniana
  Clone ID: LIB3602-102-Q1-K1-G5
gtgcaggcggcagccaggggcaagtgcgctgggtagtcgacaaaatgctgcgcaactggtggcacgtgggcttcatcgcaatgatgctgcctgatgcgtgcatcgtccatgctgtgcggcacccagcagacgcggggctgtcttgctttgcgcagccgtttgaggggcgcggcacgccctgggccgccaacctgtcacatattgcgcaccagatacagctggtgcacaggcttggggagcactgggattcggtgctgccggggcgcgtgctgcacctgcgatatgaagacctcgttcgcgaccaggaggccgccagccggcgtctgctggcgcactgcggcatcccctgggagcccgctgtgctgcgcttccacgaaacgcagcgcaccgtggccaccgccagcctggcgcaggtgcggcagcggctgtatagcaccaacgtggggcggggaaacgctacgcccgaca

SEQ ID NO: 9280 - DNA, 458 bp, Chlorella sorokiniana
  Clone ID: LIB3602-102-Q1-K1-G6
acaacgcgtccgggaatgccacccgcattggcagcgccggtgtggtgcgccgccaggctgtggatgtgtgggcgctgctccgaatgaacaacggcatctgggtgctcaccaccggcccccgcgagagcactccgaacatcttgaccattaccgtgtgggtgaagaacaagctgatcaaggcggactatggcagctccatcagctacgccatggccaagatcgacgacatggagggcatgcccaatgacaaccggtgcatggttgttgcgcacccaccaaatcaggacggcgccacacctggcaaactatgggcatgatgacgagtcgcgttgaacatgacggtgtgcttgagctgctgttttattgacccgctcttgaatatcgtgcgcctgatgtgaatgcggaacacaatgctctgccgaaagtgctacgcccgcctgcacccccgggctgtgaac

SEQ ID NO: 9281 - DNA, 203 bp, Chlorella sorokiniana
  Clone ID: LIB3602-102-Q1-K1-G7
cagacaatatcttggcagcacggctggcaggctgtggtggcgccgggcggggtggcacgcaatgcgccgcccctgcatgctgcacgtcacagaggtggccttcctacatctgtgctcaataataaaatatcctttctgatccctgcctacaacacatgcagtaccgactcacaatctagccctctctgtcagcaaatgtctgc

SEQ ID NO: 9282 - DNA, 438 bp, Chlorella sorokiniana
  Clone ID: LIB3602-102-Q1-K1-G8
cggacgcgtgggcggacgcgtgggcgccgacggcaccgctacattctgcttcttctctccgcgcttcttctccttgccttcgtgcgacactgtccagctgctccctgtaactcattcactagaaaaaaaaaaaaaaaaaaaaaaaaaaaaaaaaaaaaaaaaaaaaaaaaaaaaaaaaaaaaaaaaaaaaaaaaaaaaaaaaaaaaaaaaaaaaaaaaaaaaaaaaaaaaaaaaaaaaaaaaaaaaaagggggggccccttttaaaggaccaaactttacgtccccggtcatcaaacttaaaagcttttttttggggcccccaaattcaaattcatgggccgtgttttaaaaacgtggaaatggaaaaaacccggggggtcccaaattaaaacgtttggaaaaaaaaccccttttaccaagtgggtgtaaaaccaaaa

SEQ ID NO: 9283 - DNA, 481 bp, Chlorella sorokiniana
  Clone ID: LIB3602-102-Q1-K1-G9
cccggcggcgccttcgaccccctgggcctggctgacgaccccgacaccctggctgagctgaaggtcaaggagatcaagaacggccggctggccatgctctccatgctgggcttcttcgtgcaggccatcgtgaccggcaagggccccctggacaaccttctgcagcatttggaggagcccggggagttcaacttctacgccctgtacgccaactccctggcgtaagcagcttgtttggagcacctgcggcggccgaggcggcggcgctgagctggcgcaaagcgcggttggcgaccgccgccgcctcacgctgttgcccttgaccctcttccctttacgcgcttgcatgcgttcccgactccgctgcatgttgcctgtgtgtgcaattgtgcatcaggcaaaagaaacgagaagaaaactccacccaaacaccattttgcctgttgtaccatcctgtacgaaaaggaggctgtagtggtgt

SEQ ID NO: 9284 - DNA, 461 bp, Chlorella sorokiniana
  unsure (1)..(461): unsure at all n locations; Clone ID: LIB3602-102-Q1-K1-H1
cggccgttcgcgatctagaactagtcggcgcgatgtgtacattgacgtcgccggctggcatctgtacctgaaggacgtgaaggtggggcaagggctgtccctggcccaagcgctggccagcaacctggggccaagctgcaggggcagggcttcagcccttccgacttggacctcctcaaaaaggtgcccatcaagctgggcggcggccgcgccacgctgcccctctccgacctgctgcctgctgcctgcgtggcggatctggagcgcatctgcgacgactttgcccgccagtagaaggagcgggcaagcagcaaagcaagctggcggcagcggtgcttgcattttcccgccgcagctgagcgcttcgctccggctgccctggcacccctgaggattgaattttgtatcattattggacatcctgctgttccgactttgtaacttcgactgggcgccccana

SEQ ID NO: 9285 - DNA, 288 bp, Chlorella sorokiniana
  Clone ID: LIB3602-102-Q1-K1-H10
gttctagatcgcgagcggccgctcgcgatctagaaccccacgcgtccgcaagccgctaggtgatgaggagggcgcacccgtgctcaaggtcatggtccggtcgccgtccagcgcggccctggctgcagctgcgaggcgcagggcgcggctgagcgggcagcggcggcggcggtggggcaggcggacagtgtggaaacggactgatgagtgctgggggattgaaggcaaatgctgccattgtgagggacccattttgtatttcatttgctctgtacaacatttcattgg

SEQ ID NO: 9286 - DNA, 512 bp, Chlorella sorokiniana
  Clone ID: LIB3602-102-Q1-K1-H11
gctttaagccgctgcggcggcgcccctcgtcgcaatgcggccgctcacggaagatgagaccaaggtggtgtttgagaagctgcacaagttcataggcaagaacatcaaggcgctggtggacaagggcgaccagccacactgcctgcgcctgcagaggaaccgtgtgtttaacgtccggaaggatgtaatgcgggggccaccaacgtggcgcgcgacaagctggtcggcctgggcacctgcatcggcaagttcacgcacagcggcaagttccggctgaccatcggcgcgctggacgtgctgtcgcagtatgcaaagtacaaggtgtgggtcaagccctcggcggagatgcagttcctgtacggcaaccacgtgctgaaaaacgggctggggcgcatcaccgaaaacacgcccggctacacgggggtcgtggtgtacagcatgtcggacgtgcccctgggctttggcgtcaccgccaagtcgacgagcgagtgccgcgccggcgaccccaacgt

SEQ ID NO: 9287 - DNA, 338 bp, Chlorella sorokiniana
  Clone ID: LIB3602-102-Q1-K1-H12
gcaaagcggtgctcaagcagtcagagcattgtgaggctcaagggcacaagtagcagtgtaacaggcacatagatggcagttgagtggtgcacgtgcagcggcaaagcggcgcagacccgccggccctgcagacgccaccaggtgtcttcttgtggacatgaccatctgctaagtactgactgccctcccctgttcctggctatgcgttcctgtacctgatatgggcccccggcctgctgtgtgatacattgacgacatgcacctggtgtacccccattaacccatgaacgtcggcatttctaacaaagcctgaaaagtggacatccgcaaccttactt

SEQ ID NO: 9288 - DNA, 512 bp, Chlorella sorokiniana
  Clone ID: LIB3602-102-Q1-K1-H2
cttccgttacaggacagcgtgtttgtggcggccaaaatgtactcggcgccctccatcgtgctgcagagccggcggccggatggcggcgtcaaggtgtttgacgacttccgggaggcctactcctggctgtcgcacaacaccgaccccgacgacaaggtggcgtcatggtgggactatggctaccagaccaccgccatggccaaccgcaccgtcattgtggacaacaacacgtggaacaacacccacatcgccacggtgggtcgcgccatggccagccccgagaagaaggcgtggcagatcttccgctccctggacgtcaagtacgtgtttgtcgtgtttggcggctacatcggctacccctcggacgacatcaacaagttcctgtggatggtgcgcatcggcggcggcgtgttccccgacatcaaggagtccaactacctgtcctctgatggcaactaccgcgtggacgacaaggcgggcaaggcgctgctagactcgctgatgtggaagct

SEQ ID NO: 9289 - DNA, 505 bp, Chlorella sorokiniana
  Clone ID: LIB3602-102-Q1-K1-H3
ccgaccaggacgtgtggtttgtgaccatgcaccagctgatcgactggatccgcaacccgatccccaaggaccagatgaaggagaagttcaacgtgggctgccaggcgggcggcgcgggcgccgtgggcatgaagagcgtggagagcagcagcaccgacaccggcagcaccgacaccggcgccgacatgccggctgttgagcctgagactgctccccagctggatgagtatggctggcccgcccctgccccctcttccgctcccgcggagctgcccaccgtgccgcagacggccgccagcggcgccgccgccggcgcgcccgctgcctttgccgctgcgctgctcggcgcgctggccctggccctgctgctgtaggacagcggttggcagccgcctggctgaccgattgacgtcgatcgcttccaccttacttggtctactgctcgcccttcccccattgccaccacacccgtatcatcccaaatgcaacccataccgcacaccct

SEQ ID NO: 9290 - DNA, 400 bp, Chlorella sorokiniana
  unsure (1)..(400): unsure at all n locations; Clone ID: LIB3602-102-Q1-K1-H4
cgggcgaggcgctggccaacggcaagcgcctcagcgattatggcctggccgacggctcggtgctctacttcaaggacctggggccgcagattggttacgccaccgtgttcttctgggagtacttgggcccgctgtggtctaccccctcttctacctcgcgccccgcctgctgtacccgggcctcaaggcgcccgagaagagcgtggtccagaacctggcactcgcttactggtccttccattacgtcaagcggctgctggaaacagcgtntgtgcacaagttctcccacgccaccatgcccgtgttcaacctgctcaagaactgcgcctactactggctgttcgccggctatgtggcctactttgtgaaccacccgctttacacgccgncgnccacgcgc

SEQ ID NO: 9291 - DNA, 482 bp, Chlorella sorokiniana
  unsure (1)..(482): unsure at all n locations; Clone ID: LIB3602-102-Q1-K1-H5
ggcggctacctccgaatcaggtccaagacgcagggcattgcgctcagcctgggcgacaagctgatcctcaaacagaagggcgcctgaggcggtgatgggcccagcacccgggagggggcaggatgccccgcctcactccaggcttgcgggctacgccagcgcaagccggccaacgcagcagcaccgcaccttcacatgcttttgagcctgcaatggaccggcatgtaacgataggcttgtnaaaaaaaaaaaaaaaaaaaaaaaaaaaaaaaaaaaaaaaaaaaaaaaaaaaaaaaaaaaaaaaaaaaaaaaaaaaaaaaaaaaaaaaaaaaaaaaaaacccctggggggggccgcttttaatgatccaaatttacttacccgtgaaaccgacttattatcttttttttagggccccccaaattaaattgacgggccgggtttttacaaatgtctgaaattggaaaaacctttgggttcccc

SEQ ID NO: 9292 - DNA, 510 bp, Chlorella sorokiniana
  Clone ID: LIB3602-102-Q1-K1-H6
ctcggaccctcgtcatccccgatgaggtgtctatcgaggtcaaggcgcggcgggttcgcgtgaagggccctcgcggcacgctgcagcgcgacttcaagcacctggctgtggacatgttcctgactgaggaggaggcaagaaggtgctcaaggtggactgccactttggcaagcgcaagagcctggcgtccatccgcacctgcacctcgcacgtgcagaacatgatcaccggcgtgaccaagggctacgagtacaagatgcgcctggtgtacgcccatttccccatcaacatcaacatcgagaacaagggcggcaaggtggagatccgcaacttcctgggcgagaagattgtgcgcgtggtggacatgctgccgggcgtgacctgcgagcgcagcgccgccgtcaaggacgagctgatcctgaccggcaacgacatcgagctggtgtcccgcagcagcgcgctgatccaccagaagtgcctggtgaagaagaaggacatccgcaagttcct

SEQ ID NO: 9293 - DNA, 423 bp, Chlorella sorokiniana
  Clone ID: LIB3602-102-Q1-K1-H7
ggcggctgcaccgtgggcgccctggcgctgggccgctttgtgttcctgcccttccaccgcgcctccctggccaaggcgggcatgcccaagcagaacggcatgacccacctgcaggctggcgatgctcgcgctgagaggcgtctttcattctaaagaccaacgaccccgccggcttcaccgtcgtggacgtcatggcctggggcgccctgggccacgctgccgccttctacatcctcgcaacctccagcctgggcctcgaccgcaaccccttctaaaccagtccacggccgcagcctgcgcccaggccacaaccccatcccgagaagagcatttgtccggcgctgtgcctttttctgttgggcatggcgactgcagccacgcatgtgatactgctatgtaaacgaccgcttgtaaaaacaaggg

SEQ ID NO: 9294 - DNA, 491 bp, Chlorella sorokiniana
  Clone ID: LIB3602-102-Q1-K1-H8
gccagacgctggaggttgtgttccagaactcgctgcccttccccgccaacttcatgcctgacggtgggctggagctgctgcccgcgggcggcgagggcggcgccaacggcaccattgaggccgaggcgccggtggccacgggcgagaccgtcaccctgcgctactacgtgcctgccagcgctgggcctgggccgggcgacctgaacactgttgcctacacctacacctcgtctgtggacttggtgggccaccccaacgccggcctgattggcgtgatggtgatcggcgcccctggcgccctggacagtgccagcggcactccccagggcgttgattccatcgtgcccctgctgttcaccatcctggacgagggcgcctcgccgctgctgcccgacagcatgaaggcggcgggcgtgggcatggcggccaccttcacccccacctggggagagtccaacctcaagcacgtggtcaacggctacctgtattgc

SEQ ID NO: 9295 - DNA, 501 bp, Chlorella sorokiniana
  Clone ID: LIB3602-102-Q1-K1-H9
cccgtgtttgggtttggcctctccaccatcttctgcctcatggtgttcatgttcctgctcaacgtggtgatcggcgtggtgcagggcttcaccaaccagaagaagaagagcgagttcagcgacgaccactggtaaacagccggccgatcgtaacggttgtggcgccccgttgtcggcagcttggttaggttccaacccttccgactgcctgcgcttgcacgagccattggtctgcttgctgcctggccctgcggaatcctgtgatcaccttccagaccaggagaggcaccgctggagctctacacagtgtcgacacacttcccgagttgtttgattgcatagtgcgcctgttgtaacatttactggacgatggcgtctcagactactgatgacctacagcattaagcgcttgtccgctttattcatggatgacactttctaccccactctggggagaggcctaaccttaagcactttgtgaattgatacctgtattgggaa

SEQ ID NO: 9296 - DNA, 572 bp, Chlorella sorokiniana
  unsure (1)..(572): unsure at all n locations; Clone ID: LIB3602-116-Q1-K1-A1
cttccacatggaaggaggttgccgccgccggcctgttgggcaagcccttgaccgccaaaaacgtggaggagatgctgggcaacctgggcctggcggggagttttgcaaccacttccagatccgcggcctgtcggccggcaaaagtgactgttcttggttcccgcatgttgcaacaagcccacattcttgtgcttgattaacccaacaacttacttgaaccgcaagtcctggggcgcattggcttccgccatcaaggagtacggcgggcggtgtggtgattgtgtcgcatcaccacgagtttgtgaaccaagtgtgccaggagaagtggaccgtgngcgggcggcaagcttggaggtgaaccggccagtcccgcggcccgcttcttggaggctcgccaagcttggaaagtggaagcgccagtgaggaagaccactcgacgcctttcggcaacaccatcaagatcaaggcccccaagaaggagctgtcgcgcaaggagaagaaggccaaggccaangccaacgccgtccgccgcgcgcgcggtgagaggtgtctgaaacgaggatactactgag

SEQ ID NO: 9297 - DNA, 550 bp, Chlorella sorokiniana
  unsure (1)..(550): unsure at all n locations; Clone ID: LIB3602-116-Q1-K1-A10
cacttgagaagatgccaaagatcacatactgtatacccaaccagacagatgatgcccagggggcgtataaggagaatgaactgtgcccggcacgttgcctggacaggcataaagcgcggtacgactctctggcgagggctggcactatcgcgcatgagtatcctaggctggatactcagttcacgcgccgccaagttgcatgcgattccctgttggatgcatatcggagtactgttgcagcacctttgccgacctgtgtcgtcctggcgcgatgctgaaccaactgagcatgccaggcggncataaacgcattctgttgctatcgtcagcctctcagcctgcctatagagtaccatttgaaaattaaacatatcatcctaacagtgctcgatgctttatgatcgcccattctggtgtgggtcggcccctcttccaatcggccccgcctcgacttgatcctcatcacgtccgcttttgtctgcactcctcaggggcgtgccaattgtgcgcgccgccgttgtattctgccaactgtaacattaatgactnc

SEQ ID NO: 9298 - DNA, 655 bp, Chlorella sorokiniana
  unsure (1)..(655): unsure at all n locations; Clone ID: LIB3602-116-Q1-K1-A11
gggagaaggagaacatctcgtccgaggcgctggaggcggcccgcatcgcggccaacaagtacatggtgaagaacgcgggcaaggacgcgttccacctgcgcgtccgtgtgcaccccttccacgtgctgcgcatcaacaagatgcttcgtgcgccggcgcagacaggctgcagacaggcatgcgcggtgcgttcggcaagccatttggtgtgtgcgcgcgcgtgggcatcggtcagatcctgctgtccatccgctgcaaggacacgcacgctgcggtggcggaggaggccctccgtcgtgccaagttcaagttccccgggcgccagaagatcgtggctagcaggaactggggcttcactccctacctgcgcgacgattacttggagtggaagcgtgagggccgccttgtgaacgacggtgtgaatgccaagctgtttggcaaccacggcccgctggacgcacgggagcccggccagattttcgagggtcctgcccgtctgtggcgtgtgccggtgcatgcctaacatgttgcttgggttctaaagatgtaacgaacatctgagcaagacaaagaaaacaacaagagctggattggattgttttctgcatcatcagtttgaggctnnttctttcttatacttctctttgtaaaaagc

SEQ ID NO: 9299 - DNA, 580 bp, Chlorella sorokiniana
  Clone ID: LIB3602-116-Q1-K1-A12
gcgccgccgcccacctgtttggcgattccagagccggcaagcaagccgccctgatggacatgtcccctccaaccggcggctctccgggctactcctaccagatgctggggacctggtggctggccgtggccgcggtctcggcctggcctcagcaacccactcaagttcagcccggtctttctgatccagatttgctacaagctcgtcttcctgttcactgtcgttgcgcctctcgtcctgaagggtcgctgggccgccctcccggctgtgcagaccatcattttcgaagccttcctggtcccgctgtttgcgctcactccctggacctacctgctgggctcgagcgccactgctggtgccaacggagacaagtggagcgcagccaaagccgagtgaggcagcaaggtgcacacaagactaagacattatgcaaagttcacagaccaagcccttcttgcagctgccatatcccaccgaatacattggcacagcaagccgcatctgcatgtcgactgtcacgattcttgaacagcaactacttacaggaataatagcggaagatagtacatattgcaacatg

SEQ ID NO: 9300 - DNA, 147 bp, Chlorella sorokiniana
  Clone ID: LIB3602-116-Q1-K1-A2
ggcggagctgtgtacagccttgctagtggtgggctcacctggtgtcttcacctcccaatcacgctgttggcggtggacactcgttgggagggcttgctctcggcactcagtccgcctttgtgtcatgatggatgaccgcggctctgg

SEQ ID NO: 9301 - DNA, 423 bp, Chlorella sorokiniana
  Clone ID: LIB3602-116-Q1-K1-A3
gtgcgcgcgtgtgcagctgatcaagaacggcaagaagattgcggcgttcgtgcccaacgacggctgcctcaacttcatcgaggagaacggcgaggtgctcatcgccggtttcggccgccgcggccacgccgtgggtgatatccccgctgcgcttcaaggtggtgaaggtgtccggtgtgtccctgctggcgctcttccgcggcaagaaggagaagccccggaactaaacggcccgcgcccagcagcggcagcagcggcgcgcctcggcaacggggggcgccgcgtccgccagcactgcacctgcctggcggcggcttgggagggcgtgcagcgcatgcagcgtgcaccgccgcggccctcccgatagtttaggaccccacaaccagctccctctgctcccactactgatgtaacacgcaactg

SEQ ID NO: 9302 - DNA, 114 bp, Chlorella sorokiniana
  Clone ID: LIB3602-116-Q1-K1-A4
gctgtccagctttgtgcctcgactggcagagctgctgggcggcatggggcaggaggtgggagaggcggtggcgggcgcctttggagaagcggcaagactggacggcggacgcct

SEQ ID NO: 9303 - DNA, 187 bp, Chlorella sorokiniana
  unsure (1)..(187): unsure at all n locations; Clone ID: LIB3602-116-Q1-K1-A5
cctggctgcatcttcccaggtggggaaagacaggggtcagtcggcaggcggtggtcaaggtgcgccagatcttcgctgacggcggcctgaactacctgggcaactccggcctggtgcacgcccagtccatcgtggccaccctggtggtccaggtgggttgctgatgggcnngccgtggaagaatcta

SEQ ID NO: 9304 - DNA, 382 bp, Chlorella sorokiniana
  unsure (1)..(382): unsure at all n locations; Clone ID: LIB3602-116-Q1-K1-A6
gaaagcccgcttgccaaaaaaaacccaccaatgaatgatggagttgatgccagcaaacaattgacagccgcggcgcgacccgccggcactgcgagttttcccctttcatgcacttcacactggcagatgacgccgcgcttgatgtttgcttgtcgatacgaacatgtatgagcactgatccatgctgttgcactgcccaacgctgtacatttttcaccccgctgtcacaaggaagttntgccctcgctcaccccacactttntgttcaccccgctgccctgccttgcccctttgcatggttttgatgcatcatgccttggctgtacattccacaccccttgcacccttgtacctttcctaaattgcaagaccctggctgcac

SEQ ID NO: 9305 - DNA, 597 bp, Chlorella sorokiniana
  Clone ID: LIB3602-116-Q1-K1-A7
gggctatgcggagctgatggagtcgtgcctcaaccgcgaccacacccagcgccccagctttgaggacctgattgtcaccatcgacgccctgctggtggagggagaggagccttctatggctcccccgccgcccctcatctagcggcccctgcaaggaggccgctgacatggcggcggcagccgccgcgctgaacagcgtagcccccgtcacccccaactaaccagctaggttgggttacgcttgaccggtgggactgcgcctgccgcgccgcggcgtgcaaccgcgtgcatgagcgcaacccgtgcgctgggcgcaacgcatgcgctgggcgctgcgtgtttctaatacccaagcctcaaacacaacaccccggggattgcctggcacaactgctatgacactgtaccgctagctaacccaaccctgagcccacccccgactgctgcgccccttccaatcatgtgtgcgccctccacagccgtgcgtctctgccccttggtctgtccctgcttgcactggttctgtgctcccgattttcattacccccgagcgagagtccccgtgtgtgtgtgccagtgattcctgcctgtgccttg

SEQ ID NO: 9306 - DNA, 596 bp, Chlorella sorokiniana
  unsure (1)..(596): unsure at all n locations; Clone ID: LIB3602-116-Q1-K1-A8
agcagggcagcagctttgcagcagtccagctacgattccgatgaagaggagctgcgggtgctgggcggcagcggtgctggcaacggcggcggaatgcaccaatccagcagcatggctgatgtcgtgtccaaccctgggcagcctgctggtccggccggccgtctgctcccatgcgctggacgcgaagctggcagaggcggcgcaggcggagcacatctgtctggacaatcacattctgaactgctcaaacctgctgaacgaagtggcgtaccagaacgtgcggcggcagtgcagcgaggtgtgggacgccatggagcgcttcattgagcagccggcagccagggagctgctgatggtgcaggccatgtacagcctggagaccggggaggtggactggtttggcctgctggcctgaggctctgttcaacagagcagagcacggacggcagtttccatcttctttgcagttcgcaaccttccttgtcccaataccttccatcgcattctggcccagcccgttccaccgncaccccacccgcatttgtaccagtaggcacaacangcagcagcaatgttgccgatgccgcatgacacat

SEQ ID NO: 9307 - DNA, 327 bp, Chlorella sorokiniana
  Clone ID: LIB3602-116-Q1-K1-A9
accaaatctgccaccccaaacgcacgtccgccgctgcaccacctgccgccccctcacccgcacccatcttccacccgccacctttcctgccgctcaccgccgcacatcctacctcccacacctcactccatgtccacccttcaccccgcttcacacagcggctgctgccatgcaaagctgctgccaaacccatccatcatgctcgcacacccactcacccacacgtccaacgtatccagacccattttcaaggcccgactgtacagtgcctttttgcgtccttatgccgatctggtaccaggacttaatgtgtaacaaatggtatgt

SEQ ID NO: 9308 - DNA, 116 bp, Chlorella sorokiniana
  unsure (1)..(116): unsure at all n locations; Clone ID: LIB3602-116-Q1-K1-B1
acccccctccttattccccgtctacccatcgtccgaaaacaataaaaaacataatttaccctcttctctcctactaccttttccnaccacacaattcccacccaccttccacaccc

SEQ ID NO: 9309 - DNA, 531 bp, Chlorella sorokiniana
  unsure (1)..(531): unsure at all n locations; Clone ID: LIB3602-116-Q1-K1-B10
cggacgcgtgggcggcaccggcgcgctgccatgcaagcactgcggcggcacggggcggctggggcccgcgcagtaacagggccaaggggggtcagcccatggcaagtccccacatgcagccatcagctcgtgggtcccgtcctctgctgcttgttctggtgtggtcgtgtgttcttttctggcctgctgactgtcagccgcttgcagtgcactgctgtgcgccacctcttccctttttccagcaaaataagctccagtgttcctcttctgctgctgaaaacgagtgatactaaaacagatgcatgccatcgtgtccatttacaaacccgtggccctgctgcctggtgcactacgaatgctgccttttcctgcatgcatgccctctccgaacgcacccttgcacccctcaatgtcctcagctacccctcagccaactcgcggaagaacctgtaataaatgacatccnnnnnaattataccgttaaaaataaaaaatgggggcccccttagaggccccaaataaaattttttg

SEQ ID NO: 9310 - DNA, 557 bp, Chlorella sorokiniana
  Clone ID: LIB3602-116-Q1-K1-B11
gggacgccttggtccagctgcacaccaactggagcgtgaacgaccaactggacaagtgcacgcgcaacatcaccaagcagctgcccgagggaccgcacgagatgatgttgaagactgcaccaaccacggccctcaacatgatcaaagtcgaaggaaatcaacaagacaccacagctgagcggcatcatcctcaccaagctcaacggcacggcgcgccgcgcatccataacgtccccaaccgactagctattcgtgcccatcaagatcgcagccatgaccaagagtatctatgaccataattctttttaccgactcagctttatgaacacactattaccaaaggcctgtgcttcctctaaaagcaagcatccgtcagacacgcaatgacacagtacactcaacatgggaacgcatggctggccatattgtgactttgctgcctgcacattacgcactagaactaggatgctcgctcgctcgacttatgcacatttacattttagttgtgacaacaccacagttttgtttttgcacacacaatgtcaactaacatacat

SEQ ID NO: 9311 - DNA, 520 bp, Chlorella sorokiniana
  Clone ID: LIB3602-116-Q1-K1-B12
gaggaggaggcatcctacaagctctgcaaggtgaggcgcctggcattcggcaagggcggcatcccccacatcggcacccacgacgggcggaccgtgcgctaccccgaccccgagatcaaggtgaacgacacggtgatgctgacctggagactggcaagatcaaggacttcatcaagttcgatgtgggcaacctggccattgccaccggcggccacaacaacggccgtgtgggcaccattgtgcacaaggagaagcacaagggctccttcgacattgtgcacatcaaggacgcggccggccacacctttgccacccgcgtgaacaacgtgtttgtgattggcaagggcgacaagcccatgatctcgctgcccaagggcaagggcatccggcagagcatcctgcaggagcaggccaagctgtacggcaagtctgcctaagcgcaggcgacgccacatgagctgagccgacgccggcgagggccgcccgccggcggcccccacggcagacgcgcagcagcaga

SEQ ID NO: 9312 - DNA, 549 bp, Chlorella sorokiniana
  unsure (1)..(549): unsure at all n locations; Clone ID: LIB3602-116-Q1-K1-B2
tcctgcaccgctccgcattcccgctcgacccagcgttcggggggcgctacaccgtccaaccggttggccggttcaccatggtgttgcgcggccagcgcgcggctgtggcgttctcagatcccaacatgcgggggttgccacggccgcggctggcaggactgctcnataagctgggcctgagtatagctcgatcgccttgcagtgaatcggctgtactacgatcaaactgaggagcacgttcagtacagccgctgccagcacctgcacaccctgcgctccctgtctgtgtcgggcctgtatgcccggggcggggcggacacccgggaggctgcgctgtgcgcgctgctgcagccggcgcgtgggctgaccgagctgcgcctcaaccattgcgtggacgaagaggatggcggctgggaggcgctgtgcccagccctggccggccacaccgcgctgcgcaagctgcacctcgccaacaactccttctacaccacacgcggagcgcccttcctgctggttgtggagcacctggacctgacttgctgtagcctg

SEQ ID NO: 9313 - DNA, 319 bp, Chlorella sorokiniana
  Clone ID: LIB3602-116-Q1-K1-B3
gcacttcaacaaactgggcatcaaccctactctcccctacttcatcctctccacacacaacatcttgttcctgcccaaccagagcctcatttccatctcctttcttcccttcaacccttctaagatacacctcatacatactcattaaccccttgaaccacattcccctccacttcatcaacaacacatattccatcatacttccctacccctcatttgacaccctatccctcttcataaacaacttttaccaaatgaaacttaaagaaatcaataacgctcttctgcccatacttgcctttctctacattggcaacca

SEQ ID NO: 9314 - DNA, 579 bp, Chlorella sorokiniana
  unsure (1)..(579): unsure at all n locations; Clone ID: LIB3602-116-Q1-K1-B5
cgcggcgcggtttccccgcttttaatctgcancttggcccgcgcgtcagccgcaagagcgtgaacaccaccgtggtggcctccagcgggaagagatcgacatcagcaagcagggcctgaactccatccagaatagaccgtaactacctgatgggcaagtccaagaccatggagagcaaggactgggtggacccccagggccgcaagggcaagggctacggcgtgtaccgcttcgccaacaagtacggcgccaacgtggacggctacagcccgatctacacccccgacacctggtccgagtctggcgactcttacaagctgggcaccaagggccttattgcttgngccggcctgattgtggtgctgctgggcgtgggcatcaacctggtgatctccacctttgccctgggccagtaaatggcgacgccccccgcgtcggcagcagcagcagcagccagcaacattcccttgcagctaccccccgagaagacaaaccctcaccctaccctagctggcggcgtcaccatgcgccggtcccttgctttccgtttcactgtcccttttcgttcctgcgtttcgt

SEQ ID NO: 9315 - DNA, 401 bp, Chlorella sorokiniana
  Clone ID: LIB3602-116-Q1-K1-B6
agtgctcaaggtggactgccactttggcaagcgcaagagcctggcgtccatccgcacctgcacctcgcacgtgcagaacatgatcaccggcgtgaccaagggctacgagtacaagatgcgcctggtgtacgcccatttccccatcaacatcaacatcgagaacaagggcggcaaggtggagatccgcaacttcctgggcgagaagattgtgcgcgtggtggacatgctgccgggcgtgacctgcgagcgcagcgccgccgtcaaggacgagctgatccctgaccgcaacgacatcgagctggtgtcccgcagcaacgcgctgatccaccagaagtgcctggtgaagaagaaggacatccgcaagttcctggacggcatctacctcagcgagcgcggcaccc

SEQ ID NO: 9316 - DNA, 195 bp, Chlorella sorokiniana
  Clone ID: LIB3602-116-Q1-K1-B7
tcttccatacaacttcatatcccttctatactatcacctaaattcaataacctcacctaacttttacaatcgtcttaactctaaaaacccttcacttacccaacttaatcccctcccaacacattcccctttccccaactatcctaatacccaaaagccccccacctaaaacccttaccaacaatttcccatcct

SEQ ID NO: 9317 - DNA, 466 bp, Chlorella sorokiniana
  Clone ID: LIB3602-116-Q1-K1-B8
gcgagaggaaacatacacacctgatatcacttaacaccaacacctaacccttcactagacacacgatctaccctgcctacgactaattgacgatgaccttcacaagcaagaaattcctctttctctactagaagttgcgattctctcaccaactaaccccctccatctatctttcctataccaccctataccacaaacatgactggaaaaacctgcatgtccatcaagttaataggaatctatgaaactccacatagcaaacacctccttcaagaaaaaaacccccctcgaattgatcttcaaaaaaaatacccaaaatcaataggaaacgaaacctcccttgaagcggcacttaaaaaaaacaaggtgcgcgcctacaactcaaaggcccacctttctttgcacaacgcccaaacccaaagatcttttcacttgctaccctaactataacacacctaacggcgct

SEQ ID NO: 9318 - DNA, 399 bp, Chlorella sorokiniana
  Clone ID: LIB3602-116-Q1-K1-B9
ggcgggcgcggtgcagcaggagtgcgggctgcccatcacccccgaagagtttgtgaccagcaccctcaagtttgggctgaccgagggggggtaccagtgggcgcgcggcacgcccttcaaggacatttgcgggctgacagactgatggagggcagcattgtgcgggccatggtgcgcctggacgagacgtgcagggagttccgggatgctgcgcgcgtcatgggcaacactgccctgttccagcagatggagaaggcgtcttccgccatcaagcgggacgtcatcttcgccgcctccctctacgtggcgtgagtgtggcagaaagtgcagcggcagctttgagcattagcagaggtatcctgttcatgtctgctgcggaacattgtaaaacaacttaag

SEQ ID NO: 9319 - DNA, 288 bp, Chlorella sorokiniana
  Clone ID: LIB3602-116-Q1-K1-C1
gggggaatcctatgaactcctcttggtgcacatggtgcagcagctggcctcggccctcgccaccggccggctgcccgacagctgcgactgtgtgttcaaacacatggagcagctgccgcgcaagcagccaccctgctgctccctgtgcgactactggcagctgccctgctccgcacatgaagccacactgcgcggcgcgcgcgtgacgcggcaatgatcgaagggccgtgtctgcgtgtgctgtgtagtgcagtatgtgtgattagtggtatgtctaatgctgactgt

SEQ ID NO: 9320 - DNA, 517 bp, Chlorella sorokiniana
  Clone ID: LIB3602-116-Q1-K1-C10
ccagcggagtcgaaggcaacatgggtcgcgttattcgtgcccagcgtaagggcgcgggctccgtgttcaagagccacaacacccaccggaggggcgccgccaagctccgcaagcttgacgctgctgagcgcatggctacataagcgtgatcaccgaggtgctgcacgaccccggccgtggcgcccctctggcgcgggtgcacttccgccacacggtgcgctacgccaccgacaagcagctgttcatcgcgcccgagggcgtgtacagcggccagtacatctactgcggcaagaaggctaccctgaacatcggcaacgtgaagccggtgggtgacatgcccgagggtaccatcatctgcaacgtggaggagaaggcgggcgaccgcggcagcctggcgcgctgctctggcgactacgccatcatcgtggcccacaaccccgacgccggcatcacccgcatcaagctgcccagcggctccaagaaggtgatcagcagcgagtgccgcgcgaccgtgggc

SEQ ID NO: 9321 - DNA, 597 bp, Chlorella sorokiniana
  unsure (1)..(597): unsure at all n locations; Clone ID: LIB3602-116-Q1-K1-C11
ctccatcaaggcagccagcggcaccagccctgcacattcgtgcccctgctggcatttgcagcagcacaactggtggcagcggtggcaggagcggcagcagcagcagtggcggcagcaggatgcagactcttgggcttgctccatctgtgctaggcgggtgcccggcggctcatctgtggtgtgggttgctccaccctcagccgccttcaaaaagaagcagcagctgctgccagcagatggcacctcggccgccacggcagcagcgggtgcgtccggcagcagcgccggagccacggccatgccggtgctggtgggaggcacatctgacgctgtagcacgcggcaatgggctgaaggtcggggcagcacgggtaaagcctggccagcccatcccagcatcagcgcaggcgtctgtttgcaaggcagcgctgtatcggcagtggcagcagctggtggcggcactgcacagtttggcatgcagcggtgggcaggaggcggcgcancaggcccaggtgtcggcacccggcacagcagatgaagcagtagctgcgccgcaagaagcagcagcggcagctagtcgcagccctgctgagggtct

SEQ ID NO: 9322 - DNA, 462 bp, Chlorella sorokiniana
  Clone ID: LIB3602-116-Q1-K1-C12
gtccggggaaaaaaaaaaaaaaaaaaaaaaaaaaaaaaaaaaaaagagaaaaaaaaaaaaaaaaaaaaaaaaaaaaaaaaaaaagaaaaaaaggggggggggaaaaaaaaaggggaaaatttatgaaaaaggggggggggtttaggaagtttttttgggggggggagaaaggtttttgggggcctaatttaatgggggggggtttaaagggggggggggaaaacgggggggtccaatttggggtgggggggaatttttttggggggggggaatgggagggggcgaaggtgggtttttaaaaatgggaaattgggggggaaaggggagcgcttttgggggttttaagggggggggggggggggttcacgaagggggcgtttattgggggggtttgggggggtttttgggttgtttgttttttttggggggggggggggtttcggggggtttaatgggggggtt

SEQ ID NO: 9323 - DNA, 383 bp, Chlorella sorokiniana
  unsure (1)..(383): unsure at all n locations; Clone ID: LIB3602-116-Q1-K1-C2
gggctgggggaccgagccactgcgggcatctggatatnccgagcagaacggagacgcagcgactgcacacggnggtcacacgggatgaagtgatgtacaaggctaagaagcaggcgctactggcgggagagctgcagccagcgccgcccgtgccgctgccgcagcggcagtgacgctcgataagcgctggcgcaccgctcgcgcaccactgctcgcacttaacctacacttttcacctcctgctaacggtaccttatgactagcctctcttacccacattgacctgacccctttcttgtgccgctgactccttctctacctgctattctgccttcgctgcccgctgcctcgctgcccttctgcccagcttctgccaggcgtgc

SEQ ID NO: 9324 - DNA, 412 bp, Chlorella sorokiniana
  unsure (1)..(412): unsure at all n locations; Clone ID: LIB3602-116-Q1-K1-C3
ggcggtgcagacctgagagcactatccatatcttagtcaagaccctcaccgacaagaccataaaactctatgtgaagtcttccngacacgcagcnagaatctgaacaccaagatccacaacaaggaggacatcccccctgaccacatcactgatcttcttcgataagcaccttgaagacggctcgcacctctcgccaggactaacagacaatccactaaggatctcgatgctgcaccatggtgctagacctacgctgaccaatcattcaaccttacctagcgattctgccacgtaagtacaaccaacacactatgatctgccgtaaatgctacgctcgcctccatccacgcgctgtgaactgacgaacgaataaatacggccacactctcgcaagttcgccaaacgaagaaa

SEQ ID NO: 9325 - DNA, 519 bp, Chlorella sorokiniana
  unsure (1)..(519): unsure at all n locations; Clone ID: LIB3602-116-Q1-K1-C4
aaaagaaaaaaaaaaaaaaaaaaaaaaaaaaaaaaaaaaaaaaaaaaaaaaaaaaaaaaaaaaaaaaaaaaaaaaaaaaaaaaaaaaaaaaaggggggaaaaaaaaaaaaaggggggcggccgtttaaaagaatcaaagttaacttacccttcagcaacngtaatactttttttatagggccaccataaataaattaattggccgccgtttaaaaacgtcgaaactggaaaaaccttggcgtaaccaaattaaatccctttgaaaaaaatccccttttcccaagttggcaaaaaaccaaaaaggcccgaacaaatcgcctttccaaaaatttgcccaccctaaatggcaaatgaaacccccccttaaccggcccataaaccccggggggtgtggggtttaccccaagggaaacctttaaatttgcaagcccctaaacccccgttcttttcgtttttttcctttcttttctcccaactttcgccggtttcccccttaaagtttaaaatcggggcctcctt

SEQ ID NO: 9326 - DNA, 53 bp, Chlorella sorokiniana
  unsure (1)..(53): unsure at all n locations; Clone ID: LIB3602-116-Q1-K1-C5
aaagggaggaaaaaaaaaaaanaaaaacaaaaaaaaaaaaaaaaaaaaaaaaa

SEQ ID NO: 9327 - DNA, 527 bp, Chlorella sorokiniana
  unsure (1)..(527): unsure at all n locations; Clone ID: LIB3602-116-Q1-K1-C6
gccggcttagtccgtactaaacaaaataaccacctttcgttcgtcgcctttcattccgctctcgtcctccctgcctacctggtctgcctgggctagtgtgctggactggtagcaccctttgctgccccagcgtctgtctgccttgctcttgtgctttcatgcagctttcatgcagcttatgcagcatcgttgcggctgtcccgctgttcacccctttgcctcacctccctgcccctgctagctccttcccctccccacaaatgaacccaacagctggcctcgctcggctgtgaaccagcccctaaccttgccagaacaattcgttcgcttcgcgcgcttgcaccctccatactgcaccgctgccgaccctccttcccttccctcctgcacaccaaaacaccctgctgcacacgtccctgccactcgcccggcgattgatcccgggagggttgaaccctccaacccgctgcgcggttttttcccttcaatttttgcagttgtaacatgtggcagcgcccccnnaaaaa

SEQ ID NO: 9328 - DNA, 605 bp, Chlorella sorokiniana
  Clone ID: LIB3602-116-Q1-K1-C7
cgccctctccctgcggcacaacaccctctctcgcgctcggcgtgccagccgcgccacgatcgccacccgcgccaccagcgaggattgggtcgtcgagaaggccaagggagccctcaactctgccaaggaagccgtgggcgacatgactcagaaggttaaggagagcctgtcctctgctgccgaccatgtcaaggaggctgcccgcgaggtgggcactgccgtgaaggaggacgccaccaccgccaaggacaaggtggctgatgccgccaccgccgccggcgattccgcaaaggccaaggcagaggccgccaagcagcgcatgtcggaggctgcggagggagctaaggacggcgccgccgacatgatggagcgcgccaaagagaagggcaaggacatggccaacaccgccgccgacaaggcggaggacatgattgaaaagatccggccctaaaccaagggctataccttgctggctgtggcggcaacaaaaccgagcccaccaaacagccagcggcctatgccggcagccctcgtggccgtgccggcggccggcactgccgcagctagccgtcggcgccagcagcccagctgaacgactcatctgt

SEQ ID NO: 9329 - DNA, 108 bp, Chlorella sorokiniana
  unsure (1)..(108): unsure at all n locations; Clone ID: LIB3602-116-Q1-K1-C8
gcggttctagatcgcgaggngccgccctnnntttttttatttttttntttttttttttaccaacaaatgttacaaccgacncccccacgtggccaatgagagcaaaca

SEQ ID NO: 9330 - DNA, 703 bp, Chlorella sorokiniana
  Clone ID: LIB3602-116-Q1-K1-D10
gggtgccgcaaagacaccgaaaatgctgtatatggggcgtgctggagggatggcaagcgcgttatcttgttgtacgcaaaagttgctgtgctgcgcgagtgcaggagcggcaggagcagcagcggcgggcggagcgggaggcggaggcaagctgggttggtttaagctgccagcagtgatgccaatgatccaagagaaccccttgtagacttgaaagtgcacgtccagggtagggggggttcaaacatgtgtgatggctgcccgctcgagtcgccttacattcaactcctccagaccgctgccaccaccgccctctgcagaaaaggcggagtgggaagcagccaatgcgctgcgggaggtgcacattccaccccttgtactcaacccagactgctctctgggactggcagagccagacaaacagcttgcagttgctgccgctgggtcgggcgctgcaacacagccaggctgccccgagcagccgcagcagccgcagccgcaggcaacgcaaccaatctggcggcggggcgagcggcagcagcggaaccagcagcagcaggggcagcaggggcagccggcgcagcaggggcggcagcactcgcagcgcttgcaagggcggcccagtgggggcgtggagctgcagcagctgccgcctgcggttcagcagccggcgccacggccaggtgaagcagcctggccggga

SEQ ID NO: 9331 - DNA, 498 bp, Chlorella sorokiniana
  unsure (1)..(498): unsure at all n locations; Clone ID: LIB3602-116-Q1-K1-D11
gtacaatctcaagcggcaggagatggagggcgcggaggcggggctgtcctccaaggccgagcgcttcttcgtgctggtgcagacggacaacctgtggaaggagcacctgatggccatcaagttctgcacagccgcagctgcggctacgcgcagcgcgaccccctggtggagtacaagctggagggctacaacctgtttgtggagatgatggcgcagatccgccgcaatgtcatctacaacgtgtacatgttcaagccggcggaggcagaggcgaagcagaaggcattcgaggaggagcagcggcgcaaggcggaggcggctcaaaacggcggctctcgcggcaagggaaagaaagcggcgcctgcggccgcgtgaggcacagcgcgccccttccctgtctcgtctctttgattgattgtccccgtgtgcattccctttcattcgacaccctagctggtgcactaccggtcttacgaagcctgaaaacatgctgtntat

SEQ ID NO: 9332 - DNA, 91 bp, Chlorella sorokiniana
  Clone ID: LIB3602-116-Q1-K1-D2
aagaaaaaaaaaaaaaaatatatgtaacatgaaaaaaagaaaaaaaaaaagactgaaaaaaaaaaaatctaaataaaataaaaataaaatg

SEQ ID NO: 9333 - DNA, 173 bp, Chlorella sorokiniana
  Clone ID: LIB3602-116-Q1-K1-D3
tatgcactgcacaaagtgagtcagcagcggcccttccaccctctgccgctagcacaagctgcggccgcggctggcagctgccgccactccgccgttccgcctttcagcagcgatttccagcctctgcagttggggagagtcggggcccgcctttcaagggaacacttaaagaa

SEQ ID NO: 9334 - DNA, 428 bp, Chlorella sorokiniana
  Clone ID: LIB3602-116-Q1-K1-D4
agagtgagcccctcctctgtgcagagcgtttttcagtccctgtgccgtccctctctctccccgtcacgtctcgtattgccccccttgcgcgggcgcccccgcggcgccgcccacccctcgctgtccctccttctgctgtctctctcggtcccctttctgctccgccctcttttccccacgcccacgggcgagggccccgcgcttgcttgcacgaccgccgcactgttgaatgcatgagctcctcaccaccgccacggcccggcgcttgcaccgccggtgccgccgccccctcacccctggcgtgcggcggccccgcccgcccctagagtacgcctaagcctaacccctctctccaacccttgctcgcaccgccactgatttttggcgcccgcgcttgcgggcgcgcctgttctatagcctattgcggc

SEQ ID NO: 9335 - DNA, 595 bp, Chlorella sorokiniana
  unsure (1)..(595): unsure at all n locations; Clone ID: LIB3602-116-Q1-K1-D5
cggacaggctaacctttgagacgtttgggctggaatcgcccgacaccatcacccccggcctgcagtacgcgcgccaggtggcgcagctgtgggtggaggggcgcaggcgcagcggcactgcgagcgcggactgaccgcgcagcacaccggcagcctgagcagcagcctgccgtcgcggctgggccaggtgccgcccatcagcgcccccctcatggcgatgcgtatccccgatgacagcagcggcctggacgacagcagcaccggcggcacatccgggggtggcaccagcccatcactgcatggcgaggcatcgctgcgcgtctccactgagctggacaggctgagctgacggccttggggtagagctgtgttgagtgacattgtaccatctgaagttttttcatgcccttttttggaacccaagctctcgctagatttttccagctgaccgaccgactcatctccacaccactgttcgactgactgatgctcgcagcccatgctggcttcaccgctttacacttctgatttcactttcactttgcctagtcaactntgtttggcccgccttgcaacagacagacgggtttnaaaa

SEQ ID NO: 9336 - DNA, 496 bp, Chlorella sorokiniana
  unsure (1)..(496): unsure at all n locations; Clone ID: LIB3602-116-Q1-K1-D6
ngaaagaaataaaaatacaataccaaactgaaaccaaaaaaaaaaaaaaatacatacaaaaaaaaaaaacgctcaccctataaaacaaacccggagggatgcttcccctctatttgccccccccattcttatctctaccctcccctaaataactactgtgtccatttttccaccccgtttttctcaaaaaaaacctttgttaaacccatttaattccccttcaaaaacattccctttcccacaccccttttaaaacttaacaccccccccccattcccccttccaaacatttccccaacctaattcccaactgaaaccccccttgtaccgtcctttaaacccccctttttttgtttcttcctcaaagtgtcccccctatttttcccctccccttacccccccccctttnccctctctcccttttttctcccccccttttcgttgctttccccccctaattttataatttgggctctcctttcggggccccccttta

SEQ ID NO: 9337 - DNA, 697 bp, Chlorella sorokiniana
  unsure (1)..(697): unsure at all n locations; Clone ID: LIB3602-116-Q1-K1-D7
cagaaacatcgccggtgcatatactgcgcgcaggccccaggtggcggcggcggcggccggcagcttcgacggggcgtgtgcctctacgctacttgcccagctctcggctcgctgcccgcgttagcgcgccgggcgattgggctaacaaccacgncgtcngccgcttttggcgcccgacngggccctgcacgaaccngcccctcgtgccatgnccgacgttcagggcgccagggcctggctgtggtcaactacgccttcgacgtggtggctcaagacctgccgcgcgaggaccgcaagaagaaggcgtacgtcctgaaggtggcggcggaccgctggaagaagctccgcccggcgacgcagcccgggtcaaatgcgtgaactagcgtcggagtcgcccagccggcagcactgcggcggtgacacccgcacaactcacatccatttgtccactggggggtgcggccgtctggctggcatacttggcccatgtttgcggagggttggctgtgcccagaggatgcagcgtggggttcaaggtggactntgggtgggtccttgcctaggatggatgctccggaggggggcttccggagggggggccacgagatcacccgttagcgttgtcttcatttgtttagtgcgtgcttagcgttctcttcatttggttggtggcgctgacatgtgacccatgtaacat

SEQ ID NO: 9338 - DNA, 150 bp, Chlorella sorokiniana
  Clone ID: LIB3602-116-Q1-K1-D8
ccggtccacccaacccttccgcaattgcccgatattatttttccttaaccgaattttttttctttccttccttaagccccatttaactgtaatattctccattgtcgaggaaaattaaaaaaaaaaaaaaataacaccccttctccaatt

SEQ ID NO: 9339 - DNA, 144 bp, Chlorella sorokiniana
  Clone ID: LIB3602-116-Q1-K1-E1
ccggcgcgtggggggggaatgatcccccgcctggttggcaccgtatgtgcttgcaattggccggcgcacagccgcgctgcccctcccctcgtctcgcttgctccacgcttgtagcctgccgccatacccagccctcccctgctg

SEQ ID NO: 9340 - DNA, 99 bp, Chlorella sorokiniana
  Clone ID: LIB3602-116-Q1-K1-E10
cggacgcgtgggaaaaaaaaaaaaaaaaaaaaaaaaaaaaaaaaaaaaaaaaaaaaaaaaaaaaaaaaaaaaaaaaaaaaaaaaaaagagggggaaaaa

SEQ ID NO: 9341 - DNA, 567 bp, Chlorella sorokiniana
  unsure (1)..(567): unsure at all n locations; Clone ID: LIB3602-116-Q1-K1-E11
aaaaaaaaaaaaaaaaaaaaaaaaaaaaaaaaaaaaaaaaaaaaaaaaaaaaaaaaaaaaaaaaaaaaaaaaaaaaaaaaaaaaaagcggagagaaaaaaaaaaaaaaaaaaaaaaaaaaaaaaaaaataaaaataaaaaattttttataaatttttttttctattctattaataaaaattttataatatcttcttttatatttatttcttnttattcttttttggtttatttttttttcttgtattcatttctttttattaatctctatatttttctttaacttattattttttagtattttatgtatttttttttattttttattttttttttattagttattttagtattttttattttcaccattgttctatattcattagttattttttttttctttattttattatgtctttcttattctttctatatttttatttgttcattttcacttttattttatctatttttttatcttatttaatattttttaacttttgttcctcttcattattctattttttttttactgttatttaatattcattttattttattttttttt

SEQ ID NO: 9342 - DNA, 606 bp, Chlorella sorokiniana
  Clone ID: LIB3602-116-Q1-K1-E12
ggccgttggagaggacagcggctctgcaaccatggcggagtccgtccagactttcggccgcaagaagaatgcggtggctgtggcctatgtgaagcgcggcaagggcgagatccgcctcaacggcgccccgctggagctggtgcagccgagacgctgcgctggaaggcgtttgagccggtgctgctgctgggcaagcagcgcttctccaacgtggacatccgcatccgcgtcaagggcggcggccaggtgtcccagatctacgccatccgccaggccatctccaagggcattgtggccttctaccagaagtacgtggatgagcagagcaagaacgagatcaaggacatcctgctgacctacgaccgcacgctgctggtggccgaccctcgccgctgcgagcccaagaagttcggtggccacggtgcccgcgcgcggtttcagaaatcttacaggtgaaggctgccccgtgggacggttgggcgcctctggaggcttcttctgcgccgctggcgtggcggcagcggcgtctgcggcctaagcagctgccctggagcagcatgccctcagcgaaagcaccatgagtacaccttgcgtgtgtaacaaaac

SEQ ID NO: 9343 - DNA, 372 bp, Chlorella sorokiniana
  unsure (1)..(372): unsure at all n locations; Clone ID: LIB3602-116-Q1-K1-E2
cacatggctctccttttgctacacctcttggttcctctcttgctcttccttacttgctaactgccatacggactagtgttgcctgtcagtgctcaccggcacgcatccctgctcgagacacgttgcttcccctccttgcgaccttgctgccagtgccttgcaccgctgctcactgccggttactccagttcgttaacacacctgcacgcagagtccccctcgctacctttgagcccaagactccaaaccaccctcccctctctctccctctttgtttgtttatgtggccatttctctccccccagccctgtgggccacctgngggcgtgtagtcgcctcgcacgacagacatgtaacagccagccagccccc

SEQ ID NO: 9344 - DNA, 348 bp, Chlorella sorokiniana
  Clone ID: LIB3602-116-Q1-K1-E3
ggcaccctgcctcacaatgactgcctgccggcgtgggcaggcgcagcgctccgccctgtgagccccctcgccagcgggcactagccagtggaccatcgcgggcggcagcaagcggagcttgccccggcgaactattctttctgacccgcgggcgccactcacgcaaacaaatgattggccctgtcccctattccccccgcccctgtccccacgctctgtctccccaccaccaccctccagtccacaccgcggcattcatcccatttgcgggccccgcaagttttgttgttttattcctcaggctttaatgctagcaatcgatgtgatgttgtaacaagcggctcataa

SEQ ID NO: 9345 - DNA, 570 bp, Chlorella sorokiniana
  Clone ID: LIB3602-116-Q1-K1-E4
gtttgcgtcaggagtgaaggagctgcaggcttcgctgcaccaggccatcatcctgctgctgttcaacgagcatgagcagcttagctttggcgacatccaggcagctgtcaggctggaggaagcggagctgcggcgcacactggccagctgtcgattgccaaggagcgggtgctgcttaaggagccggcagggtcagaggtggcgcgcaccgatgtgttcaaagtcaacccaggctacacatcgcgcatgttccgtgtgaaggtcaacaacctgcagatgcacgacagcgacgaggacagcaagaagaccaacgagcaggtgctgcaggaccgcttccaccagattgatgctgccattgtacgcatcatgaagatgcgcaagaccctgagccacaacctgctgctgactgagctggcatcgcagctgcgcttcccggttgggcagtcggatgtgaagaagcgtgtggagtcgttgattgatcgcgagtacctgcagcgcactgagcacggctacgaataccttgcatgacagcagctgcacctgtgtacatgttcctgctgtaaaataggc

SEQ ID NO: 9346 - DNA, 677 bp, Chlorella sorokiniana
  unsure (1)..(677): unsure at all n locations; Clone ID: LIB3602-116-Q1-K1-E5
cccgcgccggcagcgactccgacaagtgcgccctcgagttcagcgatccgtgcgagcagacctggaacgtcgaaagcggccagatcgggggagctgatggcctagacctggaagtcgcctccgcctgggcggccgacctcgccgcgcgctccgagcgcgtgcacaaggacaaggagtgcaagatcgcctcctggaccgtgctcaaggcctgccgcatggccgacaatgccgtccacatgttcttccagcacaacatcgagtgcccggacaacaacggcttcaaggtcaagtacgagaccaagggcacgatcacctctgaggagtctgacaagctggaggacccgaacacacgctttgtctgcgtcttcgacagcaccttcgtctaggcgaacagccccccccatctgcccccggggcaacaaccggcaaccgcaaccctccctcgccaaaccgcatgccccgcagccacggncggcnctgtgcgcagcctttgacacaccnctagccgtagttatgcaacccaccatcagcgcgaccggatccccgtgaccatctcccgcagaaggcgctgttacgccacattagtacactgactgactttgcgcatatcctcgcatgacatgttctgcttgacctattgcatgacattgctgagttatccagctcatcgtgctgtc

SEQ ID NO: 9347 - DNA, 182 bp, Chlorella sorokiniana
  Clone ID: LIB3602-116-Q1-K1-E6
cggagccctccgataacagccccctcaaccaaacctggcttggctgggagctccaacgaacgactgcttttgcaccgccggcccggctcacccgttttaccacaaccagccgcgcccgccggcgtccgaatgcacccatcagcacgccgatctctgttggatatatgtaactgtacatctgt

SEQ ID NO: 9348 - DNA, 354 bp, Chlorella sorokiniana
  unsure (1)..(354): unsure at all n locations; Clone ID: LIB3602-116-Q1-K1-E7
gaacattttgccatgcatgcatgtacatctacctccgactgccgctcactgctgacggtggccctcttggcaggcatgccaacttgcgcttgcaaagactgcgctgcgagtggtgaagggacggttccatgcgctcccctgtatggatgcttggcattgctgcgtttcatgtgtgtgcaagcaatgccagccaagaactgaaggtggacggttgctcctaccgagcatcctgctcagctgactgtccctgctgcatgcacgcagcatagctgtgcatgctttgccaaccacaagggctgagctactttttttaaatggtgttcaatatgccaccttgaaacacgggacccnnga

SEQ ID NO: 9349 - DNA, 563 bp, Chlorella sorokiniana
  Clone ID: LIB3602-116-Q1-K1-E8
accgcacccgtgctcacaggtcaaggagtgcctgaagctggctgccaagggccaggaataccggccggcaggcggcgccacagcgcgggcagcgggcggcggcgcggcagggcaggcaggcggcgagtcggggcagcgacaggagcagcagctgcacgaggacgaggcggcgctgcaggcggcggctgcgggggaggagggcgagggcgcggcagcacagcaggtggacgaccgcctgcccggaggcggcgcagtgctcacggaacacggcggcggcggccggcgctcggtggtcaagcgcatcgacggcgtgctggtgggggaggctcgcccgctgggcacctcacggctaggcctgtacggcgtgctgctgtgggcgggcgggctggtgggggccttcttcctgctgcccgcggcgcgcaaggcggctcgcaaggcgggctcgctgctgcccacaacggcaccctaccggtcaaaaggccgtgacgactgaccgcagtgtttatgctttgtgcttccctggcctccctgcttgctcttattactgctgctgtgtgatgcta

SEQ ID NO: 9350 - DNA, 526 bp, Chlorella sorokiniana
  Clone ID: LIB3602-116-Q1-K1-E9
gaggtgttctatgccgaggctgagaggatccggtcggaatttgatcaactgaagacactggacgaccccatccagatagagcgtgcgctggagcgcggagaggcgcgcctgcgcgaccacctgcacccagacccttacatcgtgctaccgcccaggcggcagcatgtacgcgcgcaacccgcccttcgacccgtctgtgcacatccatctggactttggccgcgagggccactgagcgcttgctggcggcggctgcagaccgacgcagggcagccactggagccgctgtcctgccgtcctgcagcagcgcacaaccggcagccctgaagagcctctggatgtagcggcggccctgcagagtctgctagtgcagccgcagtaatgagcctgtgctgtggaaccctgctgcatgttgtcgggcatgggttgtgctgcgccgacgggcctttgcagcctgaggctgctcccgtttcgcatgcggcactctgaactttgccaccctcacactgtaatcctcctggcgatg

SEQ ID NO: 9351 - DNA, 140 bp, Chlorella sorokiniana
  Clone ID: LIB3602-116-Q1-K1-F1
tccgggggggggccttcaaccccttgggcctggctgacgaccccgacaccttcgctgagctgaaggttaaggagctgaagaacggccgcctgggcgtggtgtccatgctcggcttcggcgtgcagggcctgatcacccgc

SEQ ID NO: 9352 - DNA, 100 bp, Chlorella sorokiniana
  Clone ID: LIB3602-116-Q1-K1-F10
aaaaaaaaaaaaaaaaaaaaaaaaaaaaaaaaaaaaaaaaaaaaaaaaaaaaaaaaaaaaaaaaaaaaaaaaaaaaaaaaaaaacgccggggggcaaaaa

SEQ ID NO: 9353 - DNA, 568 bp, Chlorella sorokiniana
  Clone ID: LIB3602-116-Q1-K1-F11
gcccggcagcattgaggcgcggctgagcccccagctggcgcaggcggccgagttcacgccccaggagctggagcacatcgacgagggccgcttcaacgagtacctgggcatggctgcgcgcgacctgctgtcggacggcatccacgcctgattgacgacgccaaccggctggagcctttcttcctcaacctggcgggcggccaggagtgagcgcggcagaccagcggcaagcccgcctgcctgaccaccccctgtggcgcacggcaaacctgcccgcctgaccaccccctgtggcttggggcacacggccggccggccattttcccgcgaggccggctgcacagctgtgctgcctcgtttgcactcatgcgcaactgtttcactcggtttttccgtgtagcgtgcccgtttcatgcatccccgatcctgcatcagtagtgctattcccgcagcctggtagaaactgcttgtcttccccaactgccaacatggttcgaaatgccaccaccctcttgctgagcctccctgctgcagtgcactgtccagctgcctgcatgttgcccaacta

SEQ ID NO: 9354 - DNA, 376 bp, Chlorella sorokiniana
  unsure (1)..(376): unsure at all n locations; Clone ID: LIB3602-116-Q1-K1-F12
tggcggcggtgtgatggcctggtcattcctgtttgatgcgtacgtcgacctgcggtctcacctgcgcccagctaagggctccgctggagacaacgcgccggcgccaccgcgctgccgccagccgccggcagctggnccaatgccgatccacagtccagacattgtgaagcagcacgccagtgcagagtgtgcccggcaaacagccaagctcaacgctttgcctgcagaggctgcatggggaaagaggggcacacaatacttgcattcaaaagtacatgcatacagctttgcatcatgggggcaacgcaagtagggtctggggagtgctgagtgcttttgggtgtgctcacgcaggacagcatgtaaatgaagcacc

SEQ ID NO: 9355 - DNA, 72 bp, Chlorella sorokiniana
  Clone ID: LIB3602-116-Q1-K1-F3
tccgaaaaaaaaaaaaaaaaaaaaatatattaaaaaaaaaaaaaaaaaaaaaaaaaaaaaaaaaaaaataaa

SEQ ID NO: 9356 - DNA, 164 bp, Chlorella sorokiniana
  Clone ID: LIB3602-116-Q1-K1-F6
cctttgtgctcaactgcctgggcgagggcgagtacaaccaagtgctcaaggggttcctgcagcgcttcccgcccggcgccgaccgtttgcggcatcggtgcgccgcgcaacggagccgtgctgagttgcttgcaatggaggcggtgtgtccatgaacccaatga

SEQ ID NO: 9357 - DNA, 473 bp, Chlorella sorokiniana
  unsure (1)..(473): unsure at all n locations; Clone ID: LIB3602-116-Q1-K1-F7
gcgctgcgagtcgctctctttgcgctgggcacgctgctggcactgagcgcctaccgagtgctgggctccgcgctctcactgctgggcggcctctgctccatcacttgctccctggtgctgcccacggccttttatctccgctagctgggggcggctcacgctgccccgacgggtgggcctgctggccatgctggcattagggttggccctggtgtgcttagtcaccggcatgaacgtctgcgagctgctgcccgcctgccgagaaaagtacctgcacccaggcggcccggcggcaggttttgctctcctgccggttggctgagtgggcagattttttgttatgattgctcccccactttcactgcatcctctgtacctgcctctccccagttttccctgcacttttttcggggccctgtcatcttctgtacccgttatatttaaccctgtttgccccannanaaannannnna

SEQ ID NO: 9358 - DNA, 564 bp, Chlorella sorokiniana
  Clone ID: LIB3602-116-Q1-K1-F8
caacgccctccatgcaccatcctccccatccaccaaatctgccaccccaaacgcacgtccgccgctgcaccacttgccgccccctcacgccgcacccatcttccacccgccacctttcctgccgctcaccgccgcacatctacctcacacctcactccatgtccacccttcacccgcgcttcacacagcggctgctgccatgcaaagctgctgccaaacccatccatcatgctcgcacacccactcacccacacgtccaacgtatccagacccattttcaaggcccgactgtacagtgcctttttgcgtccttatgccgatctggtaccaggacttaatgtgtaacaaatggtatgtaaaaaaaaaaaaaaaaaaaaaaaaaaaaaaaaaaaaaaaaaaaaaaaaaaaaaaaaaaaaaaaaaaaaaaaaaaaaaaaaaaaaaaaaaaaaaaaaaaaaaaaaaaaaaaaaaaaaaaaaaaaaaaaaaaaaggggggcccctttaaaggacccaaatttaatttccgcgggttgggaaagtaaagttttttttttggggcccccaa

SEQ ID NO: 9359 - DNA, 459 bp, Chlorella sorokiniana
  Clone ID: LIB3602-116-Q1-K1-F9
gtctccatcgggcgcgtggcgctcgtccagtacccggaggcggaggccggcaagctggtggtgattagcgatgtggtcagccccagcgcggccctggtggacttccccggccagacgcggcgcgtgatcagcttcaagcggtgcactcaccgacttcacggtggacatcccccgcctcgccaagaaggcggtgctgaagaaggcgctggaggaggcggaggttgaggccaagttcgccaagagcgcgtggggccagaagctggccaagcgcgcggccaaggcggcgacgaccgactttgaccgctacaaggcggcggtgcagaagatgaagcgcagcgcgcaggtgcgccgcgccttcaactcgctgaagaaggccgccaagtgagcggagctcctcgcagccgcagcagccgcccaattcattgcgcccggctcgccccctggtgtaatgtagcacgc

SEQ ID NO: 9360 - DNA, 282 bp, Chlorella sorokiniana
  Clone ID: LIB3602-116-Q1-K1-G1
gggcgggagtgcaacatgtgcggcggccggcccatcgaggcctatttccttgcggagctggaggccgccgactgagcggcagtgttggccgaatgctctctcagacagcatgtgccacgcggcagcttgtttttcacgttgcaggtcttgcaaggcatctgggctcgccgcttctggcgcttggcctgcgaaccggtggaacacaaccactgcaagcacttgaccaagtctttcagtttttaaattggtgatttgttttccaataatattgacgttgtaaac

SEQ ID NO: 9361 - DNA, 396 bp, Chlorella sorokiniana
  Clone ID: LIB3602-116-Q1-K1-G10
cacgctgcacctggtgctgcgcctgcgcggcggcatgcagatctttgtcaagatgctgacgggcaagaccatcacgctggaggtggagtcgagcgacacgatcgagaacgtgaaggccaagatccaggacaaggagggcatcccctgaccagcagcgcctcatctttgccggcaagcagctggaggatggccgcaccctggccgactacaacatccagaaggagtccacgctgcacctggtgctgcgcctgcgcggcggcaactaggcggctggggcacccacccacctgccttcacacccatcgtgtgcggtaggagcggcgcgcgcgtgcacatgtagcatcctgccctgtaccctcaccctctgtaccccacccctgtaaccgccgcgctcta

SEQ ID NO: 9362 - DNA, 624 bp, Chlorella sorokiniana
  unsure (1)..(624): unsure at all n locations; Clone ID: LIB3602-116-Q1-K1-G11
gcaggcggaacgctatgacgagatggtggcggagatgaagaaggtggcgcagatggtccacgaccaggagctgagtgtggaggagcgcaacctgctgtcggtggcctacaagaacgtcatcggcgcgcgccgcgcctcctgcgcatatctctagcattgagcagaaggaggaggccaagggcaacgaggagcacgtcaagcgcatcaaggcgtaccgcgaagtggtggagaaggagctgcaggagatttgcagcagcatcctgcagctgctggacgaccacctgatccccaccgcctccaccggcgagtccaaggtcttctacctcaagatgaagggcgactaccaccgctacctggccgagttcaagacgggcgcggagcgcaaggaggcggcggagcacacgctgctggcgtacaaggcggcgcaggacattgcgctggtggacctgccgcccacccaccccatccgcctgggcctggccctcaacttctccgtgttctactacgagatcctcaactcgccagagcgcgcgtgccacctggccaagcaggcgtttgacgaggcgattgctgagctggacacgctgggcgaggagagctacanggacagcacgctcatcatgc

SEQ ID NO: 9363 - DNA, 495 bp, Chlorella sorokiniana
  Clone ID: LIB3602-116-Q1-K1-G12
ggcagaagggcttcatcccgctgtccacctacctgaccaactacaagctgggtgactatgtggacatcaaggtcaacgccgcggtgcacaagggcatgccccacaagttctaccacggcaagactggctgcgtgtggaatgtgaccaagcgcgccgtgggcgtggagctgctcaagcaggtcaacgggcggtacatcaagaagcgcatccacgtgcgcatcgagcacgtgacccccagccgctgccacgaggagttcctgcgccgctgcaaggagaacgacgcggcgcggcacgcggccaaggtggagggcaagccgctgccggtgctcaagcgccagcccaagggcccccgcaccgaggccatcatgctggagaacgtgaagatggagaccatcacggccatcccctacgatatcctcaaggagggcgtgctctgagcgtgatcggcggcgacgttccgttgattgcggctgcagcttaatgagatgtaacccc

SEQ ID NO: 9364 - DNA, 589 bp, Chlorella sorokiniana
  unsure (1)..(589): unsure at all n locations; Clone ID: LIB3602-116-Q1-K1-G3
cgcaggtgctccatttttagggctagcaagctgtcgcggttccagcccctttcgcaactccaccagctccccctgtctgcacacgccagggctcccaaggttttcagctggaacttccccggcgcttacgccgtgcagttcaaaccggtngtcgtgcacccgcctgcgtgtacacttgctaccactttctggtcaagaaccccgatgtgcactttgtcaaagaagctgaaccaagacaagcttgcggaaagcgccccgtggtcccagcaggccaaggccggccagggcaacgtgttccgctggctggcgcagacgcgcgacaccgccgcgggcgagcagaaggacacccgcatcttccgcgtttgagcgcccgccaggctgctgcgctaaatcggcgcgcaataccagccgctcaccgccactcgccgccgctgcgcccccctgtgcttgctctcagggcctgaggccctctgccagtcagccacctggggccggcacccccttgccgctatgatatgcgtccccaaagctggagtgaggcattgcggaacccaatgctgnttttccaccgccctgcttttaatatatc

SEQ ID NO: 9365 - DNA, 447 bp, Chlorella sorokiniana
  unsure (1)..(447): unsure at all n locations; Clone ID: LIB3602-116-Q1-K1-G4
cggtggcggtggcggctacgaccgtggctatggcggcggcggcggcggctacgatcggggctacgaccgcgggtacgagcggggctacgatgatcgctaccggaggtattgagagtgacgtgtgtgccagcctggcgcctgcacagctgcacagctcgcttgcgtgtgcacgcccgaccccagctgcacagtcgtgtgtgtttgcctttccgtgccacctgttgctgcactgtctgcatgcgcgtgatgatgccctgtgacgcctcgtgttgatacgcttacccacatgtaacatgaaatcggtcaaaaaaaaaaaaaaaaaaaaaaaaaaaaaaaaaaaaaaaaaaaaaaaaaaaaaaaaaaaaaaaaaaaaaaaaaaaaaaaaaaaaaaaaaaaaaaaaaaaaaaaaaaaaaaaaaaaaaaaaaaaaangggggggggccttttt

SEQ ID NO: 9366 - DNA, 153 bp, Chlorella sorokiniana
  Clone ID: LIB3602-116-Q1-K1-G5
tcctgcactaccgctcactaattcccgggaccacccactcctccagcactgcacccttgccccttgtaactcccctgcccgcgcaaaaaatttaacaaaaaactaacaaacaaaaccataaaaactaataaaaggaggaggactatacggtcc

SEQ ID NO: 9367 - DNA, 68 bp, Chlorella sorokiniana
  Clone ID: LIB3602-116-Q1-K1-G6
aacaataataaaaattaactataataaaaaaaacaaaaataaaaaataaaaatataaaaaaataaaaa

SEQ ID NO: 9368 - DNA, 246 bp, Chlorella sorokiniana
  Clone ID: LIB3602-116-Q1-K1-G7
agctgtgtatgatagccccatatttcggccgcttcaggtcgattttgtttccacactgtgcccctttcttgtcccccctctcacctggtccgaatctctttctcagcctgaccccgccccacccagcaccggcgggctgcacctcgagcattgccttccaccctgcaactgagcgcctgagcgtgggacttgcactccattggcctcggggcagggccacttgcaacgatgtaaataatgaggaac

SEQ ID NO: 9369 - DNA, 596 bp, Chlorella sorokiniana
  Clone ID: LIB3602-116-Q1-K1-G9
gcgggcaagcgcaccatcgactttgaccggggcggcggcgccaaggccggcggcagcggcggcctggccgcttcctgctgcgcagccgggacgctcggctgctgcggcgggggcgccgcctgcacctgccagcccggcgcctgccctgcgccgggggggagtgcagcagtgcctctcgagctgcaccggcgtcctgctgcgccaagcctgccacgacagagcctgccgctgcgcagccctccagccggctgtgaaggctgtgatgctgtggcagctgtaccaatccttgcagccgcccagcgcgggtggctgcccctggtgtgactgctccactggggtgccacatctgctgttaacccaccatgtggtggcatacataccaacctgtgcacctgtctgttgttcagtggcctctgagcccagcatgcgtgttgtgcaccacgcctagtttttcctgcccccctcccctgatgcttgctgccttgcaaagcctgagacatgcatgccgcctgtgctccccctttgctgtacattgcccgccgacgcagtggttgccttgcaaacgcttgctttcatttcacgtgcatgccaaacac

SEQ ID NO: 9370 - DNA, 113 bp, Chlorella sorokiniana
  Clone ID: LIB3602-116-Q1-K1-H1
aaaggcgacgctttgaacgctttgtgctgggcgagggcatcaccgtggccaaggcctacctgaccgcaaatgtgaaggcgcagaccaagggcgtgcatgacgctgctctcaag

SEQ ID NO: 9371 - DNA, 652 bp, Chlorella sorokiniana
  Clone ID: LIB3602-116-Q1-K1-H11
ggcagcagcagacgcggcagcaaaagccaaggacgatgcctactgggacgggcatgccaaccccaaggcaaagcgcgaccaaaagcgggaggagcaggagcggcagcgggaggaagcggccaacaagaaggcggaggcaaagcggtggcagcagaggaggaggctgcgctggcggctgctggcaagaagaaggcatccaagcctgcgccacccaaggtcaccgcagcgcagctggccagcatgcgggagcgggagcagcgggagatggcgcagcaggcggcagagcagcaggatgcgcagcgccgcatggtgtcagaggaccagtacgcagcagctgtggaagtggacaaccgcaaccgggaggagggcgtggtggaggcgcgcagcatggatgcggcgctgcaggcgctgtcactgggcaagcaggaagtggaccggcaccccgagaagcgggccaaggcggcgtgggaggcctattacgaggagcagctgcaagtcctcaagcaggagaagcccggcctgcggctcatgcagtacaaaagcatgatcttcgagcggtggcagcgcgacccacgcaatccccgcaatcagaaagtcgacgcgtgaggggaaatggctgccactgacttgtcagctgttgctgaattcgtgt

SEQ ID NO: 9372 - DNA, 146 bp, Chlorella sorokiniana
  Clone ID: LIB3602-116-Q1-K1-H12
atcccatattaacggaggccagcctgttttggacaagcacacacagcatatgagattcccaacctccctgcgcactgcttgtaacaatgctggctccctcttgtacccttgacccgcactcgggcgtggatatgtaacgttcgcgg

SEQ ID NO: 9373 - DNA, 485 bp, Chlorella sorokiniana
  unsure (1)..(485): unsure at all n locations; Clone ID: LIB3602-116-Q1-K1-H2
cccgaattcccggtcgcccaccctccggctggtggaggaccgcggccggccgttcccaatctaaaactacccacccgtccgcgattcggtgaggagcaccaacgttatgccgaagagccatattaagccagcggcgcgcagaacgcgcatgccctgcgcccgcagctgcaacacccaaaaagcctgttttccttctttgtttctgctgtttcactacacgcacgctgtatctgcgctgtacactcctttgcgcccgttctctctgcatgcaattntcagttggaagcatgaggcacccctgttgttccacctttgtttgtttctgccgcccgggtgcgctgctgtacccctgagcatgccggccgcccttgctgcccgcctgccccttccctcggccctcagcccgcccattcacgcgacattcttcatctcagagctcatcctcaccgctctgcaagcattataattgtaagctctggcatggc

SEQ ID NO: 9374 - DNA, 142 bp, Chlorella sorokiniana
  unsure (1)..(142): unsure at all n locations; Clone ID: LIB3602-116-Q1-K1-H3
cggagaaccggccaccgccgtttccgcaccggcttccgcgagggctctgctgccaagaagatcgctgcctaaacagctggtgtctgcagctaggcggcagcacgttgagccagctgtgtagcangatgtaacaccgcgacac

SEQ ID NO: 9375 - DNA, 439 bp, Chlorella sorokiniana
  unsure (1)..(439): unsure at all n locations; Clone ID: LIB3602-116-Q1-K1-H4
ggcggcgctgcgggcgcggcagctggcgtgctggcacatgtcgccacaatgccgaagccagaggagtgaactgatggagggatagtgccccgactaaggggcctactgatcgaaatgacgccagaggctgcgactggctgcccagcacacttttcacccgttttcatgctgtcacatgtattatggccaagcttcccaccctcacgtgtatgcaagcatatgcctcacggctgcatgctatgccatccatcaagccaagtccgccaattgttcttctgccggcagtatgcctgccgttgcctgcccgcaaggactcggggtcctgagcctggatgcagtttatgttactattagttcgcctgtacagcatagtaatgacatgcntganaaaaaaaaaaaaaaaaaaaaaaanaaaaaaaaaaaaaaaaaannnnnanaa

SEQ ID NO: 9376 - DNA, 566 bp, Chlorella sorokiniana
  unsure (1)..(566): unsure at all n locations; Clone ID: LIB3602-116-Q1-K1-H6
ggcagcagcagacgcggcagcaaaagccaacgacgatgcctacaacggaccgccgaggcggaggcaccctgcaatatagtggcaagggcgtttgccctcttaagccctgttgaaccggctgtgccagcggatgtggacgctcgtggaaacccatgtttgtgactcgcacctagcccgcaaagaaagaaaaaataccggcaccgcctgcttgcgcttgacatgacgctatgcaggccgcccctgctcctctcaacaccaccgcctgtattttattgcacatgcttctatggctcctcgtacccgccgtcgccggcatcgtcactgccctgtaggtcccccttctgcnnaaaaaaaaaaaaaaaagaaaaannaaaaagaaaaaaaaaaaaaggcggcgctgcaagaactgacactgggcaagccggaagtggaccaggaccccgagaagcgggccaaagcggcgtgggaggcctattacgaggagcagctgcaannncttaagcaggagaaacccgggctgcagctcatgcagtacaaaagcatgatcttcgagcggtgggagcgcg

SEQ ID NO: 9377 - DNA, 416 bp, Chlorella sorokiniana
  Clone ID: LIB3602-116-Q1-K1-H7
gccaggcgtgcaaaccagcgtggaagggagcacacttagaaacatttatggctcgacgtgagaagatcgtgctgccgttgtggctgcagatgggggcctaccaccaaggcgttcccagcgaagcaccgctggtcacattggtatagtacagacgtctcctattctggctgtgatgcacaccaatggacttacagcagcacgcacctaggacttcactgacgacctggcagagcagtcagttactcgtgtagacctaaacaagctcaacgatgacacgctgttgaagtacacgaagcactatgaggtgcatgccgtgctcctcactagtacgaatgaggacattgccaaggagtgtgaccgaccactgataactcgctgatgatctcggaggagactgtgctgcagaccttgctgaa

SEQ ID NO: 9378 - DNA, 335 bp, Chlorella sorokiniana
  Clone ID: LIB3602-116-Q1-K1-H8
cggacgcgtgggctacaaggaggtgctcacctacgcgcccgacaacaaggtggccaacgcacgcagcgagtactgccgcacacggctgcagcgcacggcgtgagcacgggcgccaacccatgctcgcgtggacgtcccaagtaggcccattttttccaaggaacctccccaacctcatccctgcaaacccagccccctgcagcccggctgctgcgcctgattgtatcccccttctcttcgtcattcgcccgtctcagtctgcactgcgccccttctgctccctggaacaacacagatgcagttgcgctacaaacgctgcaaaactcaatgccatc

SEQ ID NO: 9379 - DNA, 650 bp, Chlorella sorokiniana
  unsure (1)..(650): unsure at all n locations; Clone ID: LIB3602-116-Q1-K1-H9
agcgcctgaaggtgccccctgccctcaaccgcttcacccgcacgctggacaagaacatggccgagagcctgttcaagctgctgatgaagtaccggcccgaggacaaggcggccaagaaggagcggctgctgaaggaggcggaggccgcgaggctggccaggaggttgagaagaagaagcctgtggtggtcaagtacggcatcaaccacatcacgcagctggtggagagcggcaaggcgcagtgcgtggtgattgcgcacgacgtggaccccattgagattgtggtgtggctgcccgcgctgtgcaagaagatgggcgtgccctactgcatcgtcaagggcaaggcgcggctgggcaccgtggtgcacaagaagacggccaccgcgctggcgctgacggcggtgaagaacgaggaccagcgcgagttcgccaagctggtcgagtccttcaagaccatgtacaacgacggcccccgcgtcagctggggcggcggcatcatgggccccaagagccaggcggcgcagaagaagaaggagcgggctctggccaaggacgccggcctccgcgtgtaagcgggcaagaaccacctgccgttcaccgngcgccgggccgggacagcccggccagcaaggtcggcgtgccgcgcgtggg

SEQ ID NO: 9380 - DNA, 312 bp, Chlorella sorokiniana
  Clone ID: LIB3602-035-Q1-K1-D10.F2B
ggggcattcccctacacaaaagtgggcccggcctgaattaatgtgcactagtttctatctcaaagcctaatggcatgcatgcttaaacctccgttcgcatcatgcactgccgcccgccgcgacgttgccgccgccgcccgggcgccgcccgcgcaccgccgcccaaaactgctcccgcaactcggggctggtgggccgtcggaagggcccgagcttctgcaaacgccagcgggtctcctcgcggtttgttgcctggctgaacccgcggttgaaggcggcggccccccccccccaaaatcctgcccgcgcatc

SEQ ID NO: 9381 - DNA, 385 bp, Chlorella sorokiniana
  unsure (1)..(385): unsure at all n locations; Clone ID: LIB3602-035-Q1-K1-D10.R2B
cggacgcgtgggctgcgctacacatggacccgctcagctcgctgggcctgctgctggcagctgcgctggcaggcttctgggcggcggcgaccgccgccttcaaccgccgcttcattttgatacantccgcgaggagagccgctggcgtttgctgttgctctggcccttcctgctgctcaccagccccgagtttcgggagcagttttgggcggcggtgcgcgggcggcgcccgggcggcggcggcaacgtcgcggcgggcggcagtgcatgatgcgctgcaggagttttgcatgcatgccattatgctttgagatagatactagtgcacattaattcttgcctggcccacttttgtgtagtgtaatgccacaaaccaaannnnana

SEQ ID NO: 9382 - DNA, 547 bp, Chlorella sorokiniana
  Clone ID: LIB3602-039-Q6-K1-G9-F3
ttccgaagggcggcatgatagcggcgccagaggcgccagcggcgctgccggcgccacagcagcagcagcaggcgctcccagtggtgggagcaccggcaccccacctgtagcccagcagccttagccattcccagcacacagacccctctaggctgcgcggccggcggcagttcgcctcccctccccctggcagcacgatagcctcgtcaaaaaactccagatgttgcgtcagttagcgtgtgtgtgtgttcctctctcctcccgttagcttttttccagaaccagcctgcttgcggagccacggcatgcccttcctacctgcctgctccaaactcattgtagctctgctctgctccctttccttacacagttccgccgctcccctacctctgccctttgcgcgccgcctgcagtaaggcggcagtgcctgccagccctatggctgcgacagcgataaacaaattcgaagcaagtgccgccactacgtccctccttccctcctttgacttggaattgactcggacagcgtccatgtaacatgggtgcc

SEQ ID NO: 9383 - DNA, 508 bp, Chlorella sorokiniana
  Clone ID: LIB3602-039-Q6-K1-G9-FPOLYC
aaaattccctttttttttttaaacataaatgttggagggaatggggcccttcttttttccccccccccccgccccaagggggggaggggggggacctttttttgaaaagggggaaaaaaaaacaaccatttttttttttttaggcaggaggaaagggggggggggggggccgaatttttttttttttggggaaaaactaaatggaggggggagggaaaaaaaaaaaaccccaccccccccccccccccccctttttttttaaggtatttttctttcccccggagggggggggaaaagaaaacggtccccccccccccaacgagaagggggcttgggaaaggtaaaaatggtggggtaaaaggggggggggggggggtgtaccccctggaaagccccccgcctcttttttgggggcgggggggacggttgggccctttgcgccgcgtttattacccccctcccggaacggcgcaaccccggggggaaggtttttatatggccgggaagg

SEQ ID NO: 9384 - DNA, 642 bp, Chlorella sorokiniana
  unsure (1)..(642): unsure at all n locations; Clone ID: LIB3602-039-Q6-K1-G9-R2
ccgaccccagatcgtgctgctcatctttgtgtccggcaaggtggtgctgacgggcgccaagaagcgtgaggacatttaccgcgcctttgagaacatctaccccgtgctgcagacgttccgcaaggtttttatgatagcggcgccagaggcgccagcggcgctgccggtttttcatcagcagcagcaggcgctcccagtggtgggagcaccggcaccccacctgtagcccagcagccttagccattcccagcacacagacccctctaggctgcgcggccggcggcagttcgcctcccctccccctggcagcacgatagcctcgtcaaaaaactccagatgttgcgtcagttaacgtgtgtgtgtgttcctctctcctcccgttagcttttttccagaaccagcctgcttgcggagccacggcatgcccttcctacctgcctgctgcaaactcattgtagctctgctctgctccctttccttacacagttccgccgctcccctacctctgccctttgcgcgccggctgcagtaaggcggcaatgcctgccaaccctatggctgcgacagcgataaacaaattcgaagccagtgccgccactacgtncctccttccctccttggacttgggaattgactcggaca

SEQ ID NO: 9385 - DNA, 566 bp, Chlorella sorokiniana
  unsure (1)..(566): unsure at all n locations; Clone ID: LIB3602-017-Q6-K1-F7.R2A
aaaaaccggaagcagtttggccgcaacttctactcgcggtgcgactacgagggggtggagagcgacaaggcggtcgccatgatccagcacctggagggcgtgatcgcggccgccatgattggcgactggtttggcgactacgtgctggtgacggccgtcggcggttctctctcgcgttttgcgctttttgccgtttttcctttttccccgccctttttcgctttttcgttgtttcttctttctttcccccttttctttgtgttttttttgccccctttgttcccccccttttttttcccttccctctcctccttttccctcctctttttccccccttttttctctgtttttcctcttccccttttcctttcctttttttttttcccctttttttttccccctttttttttttgttttcctgttttncttgcctctgttttgttccgttcccctcctcttttttccttccctgtttttttcccttttttcctttgttttttttccgttttccccccctcctttttttttttttttttttctcttccttttgttcgtttccttttttt

SEQ ID NO: 9386 - DNA, 213 bp, Chlorella sorokiniana
  Clone ID: LIB3602-039-Q6-K1-G9-F25c
gcctgctgctgctgatgaggagccggaagagacgatggcgcctatggcgccagtatcatgccgaccttgcggaacgtatgtagtacggggtagatgtgctaaaaggcgcggaaaatgaactaacgctttttggcgcccgtaagcaccaccttgccggacacagagatgaacaggttcgatacttgggggcgagatgacgcgtgggaagacccg

SEQ ID NO: 9387 - DNA, 558 bp, Chlorella sorokiniana
  Clone ID: LIB3602-039-Q6-K1-G9-FPOLYGcc
ccgagtcaattccaagtcaaaggagggaaggagggacgtagtggcggcacttgcttcgaatttgtttatcgctgtcgcagccatagggctggcaggcactgccgccttactgcaggcggcgcgcaaagggcagaggtaggggagcggcggaactgtgtaaggaaagggagcagagcagagctacaatgagtttggagcaggcaggtaggaagggcatgccgtggctccgcaagcaggctggttctggaaaaaagctaacgggaggagagaggaacacacacacacgctaactgacgcaacatctggagttttttgacgaggctatcgtgctgccagggggaggggaggcgaactgccgccggccgcgcagcctaaaggggtctgtgtgctgggaatggctaaagctgctgggctacaggtggggtgccggtgctcccaccactgggagcgcctgctgctgctgctgtggcgcccgcagcgccgctggcgcctctggcgccgctatcatgccgcccttgcggaacgtctgcagcaccgggtagatgtttttaaaagcgc

SEQ ID NO: 9388 - DNA, 561 bp, Chlorella sorokiniana
  unsure (1)..(561): unsure at all n locations; Clone ID: LIB3602-039-Q6-K1-G9-F24g
tagggttcgcggggcgctgccgtcttactgcgcgcggcgcgcagggggcaggtgtgggggagcggcggcactgtgtcgggaaagggagcagcgcagatctacagtgagtttggcgcgcgcaggggagaagggcattttgtgtctccgcaagcaggctggttgggggaaaaagctcacggggggagagaggaacacacacacactctctctgacgcaacatctggagttttttgccgaggttctcgctctgccagggggaggggaggcgaactgccgccggccgcgcagcctagaggggtctgtgcgctgggaatggctaacgctgttgggtctcaggtggggtgccggtgctcccaccactgggagcgcctgctgctgttgctgtggcgccggcagcgccgctggcgcctctggcgcctctctcatgccgcccttgcggaacgtctgcagcacggggtatatgttctcaaaggcgcggnaaaatgcctcactcttcttggcgcccgtcagcaccaccttgccggacacatatttgagcagcacgatcttggggtcggcgct

SEQ ID NO: 9389 - DNA, 169 bp, Chlorella sorokiniana
  Clone ID: LIB3602-039-Q6-K1-G9-F25g
gcgccggtggggggctggcgcctctggggccgctgtatgccgcccttgcggaacgtctgcggcacggggtagatgttctcaaaggcgcggtaaatgtcctcacgctttttggcgcccgtcagcaccaccttgccggacacaaagatgagcagcatttttttggggtcgg

SEQ ID NO: 9390 - DNA, 486 bp, Chlorella sorokiniana
  unsure (1)..(486): unsure at all n locations; Clone ID: LIB3602-039-Q6-K1-G9-FPOLYGcg
gaggagggacgctggggggcncttgcttcgaaatgctatcgctgtcgcagccatagggctggcgggcactgccgccttactgcaggcggcgcgcatagggcagaggtaggggagcggcggnactgtgnttggaaagggagcagagcagagctacagtgatttttttgcaggcaggtaggaagggcatgggggggctccgcatgctggctggttctggaaaaaagctaacgggaggagagaggaacacacacacacgctaactgacgcancatctggagttttttgacgaggctttcgtgctgcctgggggaggggaggcgttctgccgccggccgcgctgcctataggggtctgtgtgctgggaatggcttaggctgctgggcttccggtggggtgccggtgctccctccncttggngcgcctgctgctgctgctgtggcgccggcggttccggttggccctgtggcgccggttttctgcctgcct

SEQ ID NO: 9391 - DNA, 546 bp, Chlorella sorokiniana
  unsure (1)..(546): unsure at all n locations; Clone ID: LIB3602-039-Q6-K1-G9-R2cg
ccgaccccaagatcgtgctgctcatctttgtgtccggcaaggtggtgctgacgggcgccaagaagcgtgaggacatttaccgcgcctttgagaacatctaccccgtgctgcagacgttctttatgggcggcatgatagcggcgccagaggggccagcggcgctgccggcgccacagcagcagcagcaggcgctcccagtggtgggagcaccggcaccccacctgtagcccagcagccttagccattcccagcacacatacccctctaggctgcgcggccggcggcagttcgcctcccctccccctggcagcacgatagcctcgtcaaaaaactccagatgttgcgtcagttagcgtgtgtgtgtgttcctctctcctcccgttagcttttttccagaaccagcctgcttgcggagccacggcatgcccttcctacctgcctgctccaaactcattgtagctctgctctgctcccttttcttactcatttccgncgctcccctacctctgncctttgtgcgccgcctgcggcnaggcggccgtgcct

SEQ ID NO: 9392 - DNA, 523 bp, Chlorella sorokiniana
  Clone ID: LIB3602-017-Q6-K1-G8F2B
ggggtgatgttttaaagctgtgttccgaagctgcagcggcgatgtcaatgccagcagatgggaggcgaaaagtcgtatgaaatggggtgtggaggggtgcagaaaagccaaggcatgggcatgcgacaatacgtccggcatgcgcccgccggcatcctaacctactagcgttgaggggtcttctgtgtgcaagggcatgttttcagttcgagcatgggaggaggggccgccgccgcgctgtaaggaatggcccagcagcgcggccggcatggcggactaagctgctccgtgttgatggagccatcagcagcccggcgaccatttacatggtcaggccagcgggcatgccgccgggggacatgcccggcagcgcctccttcttccgcttctgctcagtcatcaccgcctgggtggtgagcatgatgccggcgatggagcaggcgttggtcaggccgctgcgggtcaccttggcggggtccagcacgcccgcctcgatcaggttctcgatgcggtcgtacatcgc

SEQ ID NO: 9393 - DNA, 547 bp, Chlorella sorokiniana
  unsure (1)..(547): unsure at all n locations; Clone ID: LIB3602-017-Q6-K1-G8R2B
gcgatgtacgaccgcatcgagaacctgatcgaggcgggcgtgctggaccccgccaaggtgacccgcagcggcctgaccaacgcctgctccatcgccggcatcatgctcaccacccaggcggtgatgactgagcagaagcggaagaaggaggcgctgccgggcatgtcccccggcggcatgcccgctggcctgaccatgtaaatggtcgccgggctgctgatggctccatcaacacggagcagcttagtccgccatgccggccgcgctgctgggccattccttacagcgcggccgcgccctcctcccatgctcgaactgaaaacatgcccttgcacacagaagacccctcaacgctagtaggctaggatgccggcgggcgcatgccggacgtattgtcgcatgcccatgccttggcttttctgcacccctccacaccccatttcatacgacttttcgcctcccatctgctggcattgacatcgccgctgcagcttcggaacacagctttaaaacaacacaccnnnnnaaaaananaanannaanaaaa

SEQ ID NO: 9394 - DNA, 470 bp, Chlorella sorokiniana
  Clone ID: LIB3602-055-Q6-K1-H10F2B
acccgacgcacacgttacacagcttaatcaatgcgacagttcacagttctagctcacgaacgcgcacaacagacgcaggggtgccagggcagttgtgcggctgcgcagtaatgcaccgccggcgctgcaacgatgcaagccgtgccgagcaacgaccgcccggctgtatgactaacccttgcagctgccgccgcccgccgtcttcagctttgggtcatcacgcatcaactgggtcacgtgtaaacgtagtcctccacctttgcggtgcacacctggaactctgggtgctccttgaagaactccagcaggtgctggaggatggtcttcatgccgcccgcctgctcgctctccacattcagcacaatgtctggatcgtgcagggaggggcgcagcagcagccagccttccttgccgtcgccctccaacaccttcacgcgccagcccttgtagttttcatcctccagcttcca

SEQ ID NO: 9395 - DNA, 677 bp, Chlorella sorokiniana
  unsure (1)..(677): unsure at all n locations; Clone ID: LIB3602-055-Q6-K1-H10R2B
cggtggggcgcgacccccgcctctcttctccgctcatggctgccagcctggcggcggggctggcggcggcgggcgccggcgtggcgcgctttggcccctgcaccaccccagccatgttcatgagctgcatcctgcctgggcacgagtacgacggagcggtgatgatcacagcctcccacctgcccgtcaaccgcaatggcgccaagttctgcacgggcgagggcggccttgagaagaaggacatcacgcagctgctgacccgggctgctgagctggcggaggaagcgggtcagcgcccctcagaccgccacaccgacgccgcattcgtcatcacagccgcgctgcaggccagccgcagcctggtgtcgtacgtcgatttcctgccggagtatgctgcctacctgcgtgagctgatgaagcgcagcatcgcgcaccccaccaaccccgacgccccgctcaccggcttcaaaattgtggtggatcccggcaacggcggcggcgcgttcatcgcggatcaggtgctgggcccgctgggtgctgacgtgtcgggcagcatcaatttggagccagatgggagcttccccaaccacatgcccaaccctgaagacagcaagcggtggcggccacgcgtgcggctgtgctggacagcaatgcagacctggngatcatgctggata
